United States Patent Application Publication US 2023/0026259 A1 - sequence listing, part 85

SEQ ID NO: 191436 - DNA, 32767 bp, Homo sapiens
  Payload ID: 17810
  Gene Name: titin
  Uniprot ID: Q8WZ42
  ENST ID: ENST00000460472
  CDS Start-End: 226-81006
gagcagtcgtgcattcccagcctcgcctcgggtgtagggattgcatagaaaagcaaaactacacagtcttgactgtgtagttttgtttttaggattagaggctcaccgattcatgtcggagatggtcagaaaaaccaactctccataggacgtcgtttcagaagcaaccttgggcttagtcccaccctttttaggcactcttgagaaatcagagtgcctagaaagatgacaactcaagcaccgacgtttacgcagccgttacaaagcgttgtggtactggagggtagtaccgcaacctttgaggctcacattagtggttttccagttcctgaggtgagctggtttagggatggccaggtgatttccacttccactctgcccggcgtgcagatctcctttagcgatggccgcgctaaactgacgatccccgccgtgactaaagccaacagtggacgatattccctgaaagccaccaatggatctggacaagcgactagtactgctgagcttctcgtgaaagctgagacagcaccacccaacttcgttcaacgactgcagagcatgaccgtgagacaaggaagccaagtgagactccaagtgagagtgactggaatccctacacctgtggtgaagttctaccgggatggagccgaaatccagagctcccttgatttccaaatttcacaagaaggcgacctctacagcttactgattgcagaagcataccctgaggactcagggacctattcagtaaatgccaccaatagcgttggaagagctacttcgactgctgaattactggttcaaggtgaagaagaagtacctgctaaaaagacaaagacaattgtttcgactgctcagatctcagaatcaagacaaacccgaattgaaaagaagattgaagcccactttgatgccagatcaattgcaacagttgagatggtcatagatggtgccgctgggcaacagctgccacataaaacacctcccaggattcctccgaagccaaagtcaagatccccaacaccaccgtctattgctgccaaagcacagctggctcggcagcagtccccatcgcccataagacactccccttccccggtcagacacgtgcgggcaccgaccccatctccggtcaggtccgtgtctccagcagcaagaatctccacatcccccatcaggtctgttaggtctccattgctcatgcgtaagactcaggcatccaccgtggccacaggtcctgaagtgcctcccccttggaagcaagagggctacgtggcctcctcatctgaggctgagatgagagagacaacgctgacaacctctactcagatcaggacagaagagagatgggaagggagatacggtgtccaggagcaagtgaccatcagtggtgctgcgggtgctgccgccagtgtgtcggccagtgctagctacgcagcagaggctgttgccactggtgctaaagaggtgaaacaagatgctgacaaaagtgcagctgttgcgactgttgttgctgccgttgatatggccagagtgagagaaccagtgatcagcgctgtagagcagactgctcagaggacaaccacgactgctgtgcacatccaacctgctcaagaacaggtaagaaaggaagcggagaagactgctgtaactaaggtagtagtggccgccgataaagccaaggaacaagaattaaaatcaagaaccaaagaagtaattaccacaaagcaagagcagatgcacgtaactcatgagcagataagaaaagaaactgaaaaaacatttgtaccaaaggtagtaatttccgcagctaaagccaaagaacaagaaactagaatttctgaagaaattactaagaaacagaaacaagtaactcaagaagcaataatgaaggaaactaggaaaacagttgtacctaaagtcatagttgccacacccaaagtcaaagaacaagatttagtatcaagaggtagagaaggcattactaccaaaagagaacaagtgcaaataactcaggagaagatgagaaaggaagccgagaaaactgccttgtctacaatagcagttgctactgctaaagccaaagaacaagaaacaatactgagaactagagaaactatggctactagacaagaacaaatccaagttacccatggaaaggtggacgttggaaaaaaggctgaagctgtagcaacagttgttgctgcagtagaccaggcccgagtcagagagcccagagagcctgggcatcttgaagaatcctatgctcagcagaccactttggagtacggatataaggaacgcatttccgccgcaaaggtagctgagcctccccaacgtccagcctcagaaccccacgttgtccctaaagcagtcaagcctagagtaatccaggctccttctgagactcatatcaaaactactgatcaaaagggaatgcacatatcatcacagatcaagaaaactacagatctaacaacggaaagattagtccatgtggataaacgcccccgcacagctagccctcactttactgtttcaaaaatttctgttcctaagacagaacatggatatgaggcatcaatagccggtagtgctattgccacattacaaaaagagttgtcagccacatcttctgctcagaagatcaccaaatcggtgaaggctcctactgtgaagcccagtgagactagagtaagggcagagcccacacccttgccacagttccccttcgctgacacaccagatacttacaagagtgaagctggcgttgaggtgaaaaaggaagtaggggtgagcatcactggcaccaccgtccgtgaagagcgctttgaagtactgcacggacgcgaagccaaggtaacagaaacagcaagagtaccagcacctgttgaaattcctgttactccaccaactttggtctcgggcttaaaaaatgtgactgtcatagaaggtgaatctgtcaccttggagtgccacatctctggatacccatccccgacagtgacatggtacagggaagactaccaaatcgaaagttccattgacttccagataaccttccagagtggaattgctcgtcttatgattcgcgaagcatttgcggaagacagcgggcgatttacttgcagtgctgtaaatgaggctggaaccgtcagcacatcctgctatctggctgtgcaggtgtcagaagaatttgaaaaggaaaccacagccgtgactgagaaatttactacagaagagaaacgctttgttgagtcaagagatgtggttatgactgatactagcctcacagaggaacaagcagggcctggagaacctgccgcgccttactttattacaaaaccagtggtccagaaactggtggaaggtgggagcgtggtgtttggatgccaagttggcggcaacccaaagccccatgtatactggaaaaaatctggtgttcctctaaccactggatacagatacaaagtgagttacaacaaacaaaccggtgaatgcaagctggtgatttctatgacttttgctgatgatgctggagaatacactattgttgttcgcaataagcatggagaaacttctgcatctgcttccttgcttgaagaagctgattatgagttactgatgaagtcccagcaagaaatgctttatcagacacaagtgactgcatttgttcaagaacctaaagttggagaaacagcacctggatttgtatactctgagtatgaaaaagagtatgaaaaagaacaagccttaattaggaagaaaatggccaaagatactgtagtggtcagaacttatgtagaagatcaggaattccatatttcttcctttgaagagagacttattaaagaaattgaatatagaataataaagactacattagaagaacttcttgaagaagatggagaagaaaagatggcagttgacatttctgaatctgaagctgttgaatcaggatttgattcaagaatcaagaattatagaattcttgaggggatgggtgtcacttttcattgcaagatgtctggatatccattaccaaagattgcttggtacaaagatggcaagcgcatcaaacatggagaaagataccaaatggactttctacaagatggcagagctagtctgcgtatacctgttgttcttccagaagatgaaggaatctacactgcatttgccagcaatattaaaggaaatgcaatttgctcagggaaattgtatgtggagcctgctgcaccacttggagctccgacttacattcccacactagagccagtgagcagaatcagatctctctctccacgttcagtgagcaggtctcctatacgcatgtctcctgcacggatgtcacctgcaaggatgtctcctgcacggatgtcccctgcaagaatgtcccctggacgtaggctggaggagacagatgagtcacaacttgagagactatataaaccagtctttgtgttaaaacctgtttctttcaaatgtttagaagggcaaactgccagatttgacttaaaggttgttggtagacctatgccagagacgttctggtttcatgatggccagcaaattgtcaatgactatacccataaagtagtcattaaagaagatggtactcaatcactaattattgtccctgccacacccagtgattctggggaatggactgtggttgcccaaaacagggcaggcagatcttcaatttcagtgattttaactgtggaagctgtggaacatcaggtaaaaccgatgtttgtagaaaaactgaaaaatgtcaatataaaggaaggttcccgacttgaaatgaaagtcagagctacgggtaaccccaaccctgacattgtatggttgaaaaacagtgacatcattgtgcctcataaatatcccaaaatcagaattgaaggaaccaagggagaagctgcccttaaaatcgattccactgtcagccaagattctgcctggtatactgcgactgctattaataaagctggcagagacactacaagatgcaaagtaaatgttgaagttgagtttgcagagcctgagccagagagaaagttaatcatcccacgggggacatatagagcaaaggagattgcagccccagaactggagcccctccatttgcgatatggccaagagcaatgggaagaaggtgatctctatgacaaagagaaacaacagaaaccatttttcaagaaaaaactcacttccttaagacttaagcgctttgggcctgcccactttgaatgcaggctaacacccattggtgacccaacgatggtggtggagtggctccatgatggaaagccacttgaagcagccaacaggctccgtatgatcaatgaatttgggtactgcagccttgattatggcgttgcatattctagagacagtggtatcattacttgcagagccactaacaaatatggaacagatcacacatctgctacccttattgttaaagatgagaaaagtcttgtggaagaatcccaattgcctgaggggaggaaaggcttacagagaattgaagaattagagagaatggctcatgaaggtgcacttacaggtgtaacaacagatcagaaagaaaagcaaaagccagacattgtcttgtacccagagccagttagagtacttgaaggggagactgcaaggttccgctgcagggtaacaggctaccctcagcccaaagtcaactggtacctcaatggacagctcatccgcaaaagcaaaaggttcagagttcgctatgatggtatccattacctggacatcgtggactgcaaatcatatgacacaggtgaagtgaaggtcaccgcggaaaatcctgaaggtgtgatagagcataaagtgaagcttgagattcaacagagggaagattttaggtctgtccttaggagagctcctgaaccaaggcctgagtttcacgtacatgaaccaggaaagcttcagtttgaagtacaaaaagtggatagacctgttgacaccactgaaaccaaagaagttgtgaagttgaaaagggctgaaagaattacccatgaaaaagtgcctgaagagtcggaagagctgcgcagtaaattcaagcgcagaacagaagagggctattatgaagccattaccgctgtggagctcaagtctcgaaagaaggatgaatcctatgaggaactcctcaggaagacaaaagatgaacttctccactggaccaaagagttaactgaagaggaaaagaaagctcttgccgaagaaggcaaaatcacgattccaacttttaaacctgacaagattgaactaagtcctagtatggaggctccaaaaatcttcgaaagaatccagagccaaacagtgggccaaggatctgatgcacacttccgggtcagagtcgtggggaaaccagaccccgaatgtgaatggtacaaaaatggtgtcaaaattgaacggtctgaccggatctactggtactggcccgaagacaatgtttgtgaattggtcataagagatgtgactgctgaggactctgccagcatcatggtaaaagccatcaacatagctggagaaacctccagtcacgcattcttacttgtccaagccaagcaattgatcactttcacacaggaattacaagatgttgttgctaaggaaaaagacactatggcaacctttgaatgtgaaacttcagaaccatttgtcaaagtgaaatggtataaagatggtatggaggttcatgagggagataaatacaggatgcactctgacagaaaggttcacttcctctccatactgaccattgatacgtctgatgctgaagattacagctgtgtacttgtggaagatgaaaatgtcaaaacgactgctaaacttattgttgaaggtgcagttgttgagtttgtgaaagaacttcaggacatagaagttccagaatcatattcaggagaattagagtgcattgtatccccagaaaatatagaaggaaaatggtatcataatgatgtggagcttaaatccaatggcaaatatacaattacatctcgtcgtggacgtcagaacctcacggtcaaggatgtaaccaaggaggaccagggagaatacagctttgtcatcgacgggaaaaagacaacctgtaaattaaagatgaaaccccgccccattgctatcctacaaggacttagtgaccaaaaagtctgtgagggtgacattgttcagcttgaagttaaagtctccttggaaagtgtggaaggcgtctggatgaaagacggccaagaagtgcagcccagtgacagggttcacattgtgatagacaaacaatctcatatgctgctcattgaagacatgactaaggaagatgctggaaattactctttcaccattccagcccttggcctctccaccagtgggcgtgtctctgtctatagtgtggacgtgataacacctctaaaagatgttaatgtgattgaaggcaccaaggctgtgcttgaatgtaaggtgtcagtccctgatgtgacttctgttaagtggtacttaaatgatgaacaaatcaagcctgatgaccgtgtacaggccattgtgaaaggtactaaacagcgactagtcattaaccgaactcatgcttcagacgaaggaccttacaagctgatagttggcagagttgaaaccaactgtaatctctctgtagaaaaaattaaaattatcagaggtcttcgtgaccttacctgtacagaaactcaaaatgtggtgtttgaggttgagctgtcccactctggaattgatgtcctgtggaattttaaggacaaggaaatcaagcccagttctaaatataaaattgaagcacatggaaaaatatataaattgacagttctaaatatgatgaaagatgatgaaggaaaatacacattttacgcgggagaaaatatgacatctggaaaacttactgtggcaggtggggccatctccaagccactcacagatcagaccgtagctgaatcccaggaagctgtgtttgaatgtgaagttgccaacccagattccaaaggcgaatggttgagggatggcaaacacctaccactgactaacaacatcagaagtgagtctgatggccacaaaaggagacttatcattgctgccaccaaattagatgacattggagaatatacctacaaggtggccacctccaaaacatctgccaaactcaaagttgaagctgtcaaaattaagaagactctgaagaacctcacagtgacagaaacacaggatgctgttttcactgtcgagcttacacaccctaatgtcaaaggtgtccagtggatcaaaaatggagttgtgctggaatccaatgaaaagtatgctatctctgtcaaaggaacaatttactctctgaggattaaaaactgtgccatcgtggatgagtctgtttatggcttcaggcttggaaggcttggagccagtgccagactgcacgtggagactgtcaagatcattaaaaagccaaaggatgtgacagccttggaaaatgccactgttgcctttgaagttagtgtttcccatgacactgttccagtaaaatggttccataagagtgtggaaattaagccaagtgacaaacacagactggtctcagaaaggaaagtccacaagctgatgctgcagaacatctccccctcagatgctggggaatacacagctgtggtcgggcaattggaatgcaaagcaaaactgtttgtggagacattacatattacaaaaaccatgaaaaatatcgaggtgcctgagaccaaaactgcctcttttgagtgtgaggtgtcccacttcaatgtcccttccatgtggctgaagaatggtgtggaaattgagatgagtgaaaagttcaagatagttgtgcagggaaaactccatcagctgatcatcatgaacaccagcacagaggactcggcagaatacacatttgtctgtggcaatgaccaagtcagtgccaccctgacagtcaccccaatcatgattacttccatgctgaaagacatcaacgctgaagaaaaagacactattacttttgaggtgacagtgaactatgaaggcatctcttacaaatggttaaagaatggtgtggaaatcaaatcaactgacaagtgccagatgagaaccaaaaagctcacacactcactgaacatcaggaatgttcactttggggatgctgctgactacacctttgtggctggaaaagcaacatcaacagccacactttatgtggaagctcgtcatatagaatttaggaaacacattaaggacattaaggtactggagaagaagcgagccatgtttgaatgtgaagtttctgaacctgacatcactgtacagtggatgaaagatgaccaggaactgcagatcacagacagaataaagattcagaaggagaaatatgtccaccgccttctgatcccatccacccggatgtctgatgctgggaagtacacagtggtggcaggaggcaacgtgtcaactgcaaaactctttgtagaaggcagagatgttcgcatccgaagtattaaaaaggaggttcaggtcattgagaaacagcgtgctgttgttgaatttgaggtcaatgaagacgatgttgatgcccactggtataaagatggcattgaaatcaatttccaagttcaagaacgacacaaatatgtagtggaaagaagaatccaccgaatgtttatctctgagaccagacagagcgatgcaggagaatacacctttgtggcaggaaggaacaggagttctgtcactctctatgtcaatgctcctgaaccgccccaagttctgcaggagctccagcctgtcactgtgcagtctggcaagcctgcccgcttctgtgccgtgatatccggaagaccacagcccaaaatttcctggtacaaggaagagcagctgctttccactggcttcaagtgcaaatttcttcatgatgggcaagaatacacgcttttgctaattgaagccttcccagaggatgcggcagtctatacctgtgaagccaagaatgactatggtgttgccacaacatcagcttcactctcagtggaagttccagaagttgtgtctcctgatcaggaaatgcctgtttatccacctgccatcatcaccccgcttcaggacactgtcacttctgaagggcagccagcccgttttcaatgccgggtttctggaacagatctaaaagtgtcgtggtacagcaaagacaagaaaatcaagccatctcggttctttagaatgactcaatttgaagacacttatcaactggaaattgccgaagcttatccagaagatgaaggaacttacacgtttgttgctagtaatgctgtaggccaagtatcaagcacagccaacctgagtctggaagctcctgaatcaattttgcatgagaggattgaacaagagattgagatggaaatgaaagagttttctagttcttttctgtctgccgaggaagaaggacttcatagcgccgaacttcaattatctaaaataaatgaaacacttgaacttttgtctgaatctccagtttacccaactaaatttgattccgaaaaggaaggcactggcccaattttcatcaaagaagtgtcaaatgctgatataagcatgggggatgtggctacactgtctgtaactgtcattggcatccccaaacctaaaattcagtggttctttaatggagtgctattaaccccttctgctgactacaaatttgtttttgacggtgatgatcatagcctgatcattctgttcaccaaattggaggatgagggagagtatacatgtatggccagtaatgactatggaaagacaatatgtagtgcctatctaaaaattaattccaaaggagagggtcacaaagacactgaaacagaatcagcagtggcaaaatctctggaaaagctgggaggtccttgtcctcctcacttccttaaggagttaaaaccaattcgctgtgctcaagggcttcctgccatctttgagtacacagtggttggagagcctgcccctactgttacatggttcaaagaaaacaagcagctttgcaccagtgtttattacactatcattcataaccctaatggctctggaactttcattgtcaatgaccctcagagggaagacagtggcctctatatctgtaaagcagagaatatgttgggtgagtccacctgtgcagcagagctgcttgtgcttctggaagacacagacatgactgataccccctgcaaagcaaagtccacaccagaggctcctgaggattttccacagacacccttaaagggtcccgcagttgaagcacttgactcagagcaggaaattgcaacgtttgtaaaagacaccattttgaaagctgctttaattacagaagaaaaccagcaactatcttatgagcatattgctaaagccaatgaattgagcagtcagcttcctttgggagctcaggaattgcaatccattttggagcaagacaagctcactcctgaaagcaccagggaatttctttgcatcaatggcagtattcactttcagcctctcaaggaaccatctcccaacctacagctgcagattgtacagtcccagaaaaccttctccaaagaaggtattctaatgcctgaagagcctgagacacaggcagttctatcagataccgagaaaatcttcccaagtgccatgtccatagaacaaattaattcattaacagttgagcctctgaaaactttattagctgaacctgaagggaattatccacagtcttcaatagaacctccaatgcattcttatctaacctctgtggctgaggaagtactttcaccaaaagaaaagacagtatctgacaccaacagagagcaaagagtgactcttcaaaagcaagaggcacaaagtgcgctcatcttgagtcagagcttagctgagggacacgtggagagtctccagagtcctgatgtcatgatctctcaggtaaactatgagcccctagtcccttcagaacactcatgcacagaaggaggtaaaattttgatagaaagtgcaaatccactggaaaatgcagggcaagattctgcggtcagaattgaggaaggcaagtccttaagatttccactagcacttgaagaaaagcaggtactgctcaaagaagagcattctgacaacgtggtgatgcccccagaccaaatcattgagtctaaaagagagcccgtggcaataaagaaagtgcaggaggtacagggaagggaccttctttctaaggaaagcttgctttctggtattccagaagagcagagattaaacctgaaaattcaaatctgccgggctttgcaagcagccgtggccagcgagcagccaggtcttttctctgagtggctaagaaatattgaaaaggtggaggtcgaggctgtaaacatcacccaagagcccagacacatcatgtgcatgtaccttgttacttcggcaaagtctgtaacagaagaagtaaccatcattattgaagatgttgatcctcaaatggctaacctgaaaatggaacttagggatgctttgtgtgctattatatatgaggaaatagacatcctaacagctgagggtcctagaattcagcaaggagccaaaacaagtttgcaagaagaaatggattctttttcaggttcacagaaggttgaacccattactgaaccagaagttgaatctaaatatctgatctcaactgaagaggtcagttattttaacgtgcaaagtagggttaaatatttggatgccacacctgtcactaaaggggttgcttcagctgttgtctctgacgaaaaacaagatgagagtctgaaaccatcagaggaaaaagaggagtcttcctctgaaagtggtactgaggaggttgctacagtaaagatacaggaagctgagggtggcttaatcaaagaggatggccccatgatacatacacctttagtggacactgtttctgaggaaggtgatattgtacacctcacaacatccataacaaatgctaaagaggtgaattggtattttgagaataaactggtgccttcagatgaaaagttcaagtgtttacaagatcaaaatacatatacgctagtcatcgacaaagtaaataccgaagaccatcaaggagagtatgtctgtgaggccttgaatgacagcggaaaaacagcaacttcagccaaactcactgtagtaaaaagagctgccccagtgatcaagaggaaaatcgaacccctggaagtagcactgggccacctagccaaattcacctgtgagatccaaagtgctcccaatgtccggttccagtggtttaaagctggccgagaaatttatgagagtgacaagtgttctattcgatcttcaaagtatatctccagccttgaaatcctgagaacccaggtggttgactgcggcgagtatacatgcaaagcttccaatgagtatggcagtgtcagctgtacagccacactaactgtgacagtgcctggaggtgaaaagaaagttcgcaaattacttccggaacgtaaacctgaaccaaaggaagaagttgttctgaaaagcgttctaagaaaaagacctgaagaagaagaacctaaagtagaacctaaaaaactagaaaaagttaaaaaacctgcagtaccagaaccaccacctccaaaacctgttgaagaggttgaagtacctactgttacaaaaagggaaaggaagattcctgaaccaacaaaagtgcctgaaatcaagccagcaatacctctccctgcacctgaaccgaaaccaaagcccgaagcagaagtgaaaacaatcaaaccacctcctgtggaacctgaaccaacccccatcgctgccccagtaacagtgccagtggttggaaagaaagcagaagccaaagcacctaaggaagaggctgccaagccaaaaggtcctatcaaaggtgtacccaaaaagactccttcaccaatagaagccgaaaggagaaagttaaggccaggaagtggtggagagaaacctcctgatgaagccccgttcacctaccagctaaaggctgtgccactgaagtttgtgaaagaaatcaaagacatcatcttgacagaatcagagttcgttggctcttcagcaatctttgaatgtttggtctccccttccactgcaattacaacctggatgaaagacggtagcaatatccgtgagagtcccaagcacaggtttattgcagatggtaaagacagaaagctgcacatcattgatgttcaactttccgatgctggtgaatacacctgtgttttacgtttgggaaacaaagaaaagacctccacggctaaacttgttgtagaagaacttcctgtgcgttttgtaaaaacactggaagaggaagtcacagtggtcaaaggacagccattgtacttgagctgcgagttaaacaaagagcgtgacgtggtctggaggaaggatggcaagattgtggtggagaaacctggccgaattgtgccaggcgtcattggcttgatgcgggctctgaccatcaacgatgcagatgacacagatgctggaacatacacagttactgtggaaaacgccaacaacctggagtgttcatcttgcgtaaaagtagtagaagtcattagagattggctggtgaaacctatacgagaccagcatgtgaaacccaaggggacagctatttttgcctgtgatatagcaaaagatactccaaacattaagtggttcaaaggatatgatgaaatccctgcggaaccaaatgataagactgaaatactgagagatggaaatcatctgtacctcaaaattaagaatgctatgccagaagatattgctgagtatgcagtggaaattgaaggaaaaagataccctgcaaagctgacacttggagagcgtgaagttgaactgcttaaaccaatagaggacgttaccatttatgagaaagaaagtgcaagctttgatgcagaaatctcagaggcagacattcctggacaatggaaactgaaaggagaacttctaaggccctcacctacttgtgaaatcaaagcagaaggtggaaaacgcttcttaactttgcacaaagtcaaactggaccaagctggtgaagtcctctaccaggcccttaatgcaattacaactgccattttgacagtaaaagaaatcgaacttgactttgctgtgcccctgaaggatgtcactgttccagaaaggcgacaggctcgattcgaatgtgtcctcacccgagaggcaaatgttatatggtccaaaggacctgatataattaagtcatctgacaaatttgatatcatcgctgatggaaagaaacatattcttgttattaatgattctcaatttgatgatgaaggggtctatactgctgaggtggagggcaagaagacctcagctcggttgtttgtcacaggtataagactgaaattcatgtcacctcttgaagatcaaacagtaaaagaaggtgaaacagcaacttttgtttgtgaactttctcatgaaaaaatgcatgtagtctggttcaaaaatgatgccaaactccatacaagcagaacagtactcatctcttctgagggcaagactcacaaattggaaatgaaagaagtgacattggatgatatatctcagataaaagctcaagtcaaggagctgagctccacagcacagctgaaggtcttagaggccgatccctacttcactgtgaaattacatgacaaaactgcagtggagaaggatgagattactttgaagtgtgaagtgagcaaagatgtaccagtgaaatggttcaaagatggtgaagagattgtcccttcacccaaatattctatcaaggcagatggcctgcgccgcatcttaaaaatcaaaaaggcggaccttaaagataaaggcgaatatgtgtgtgactgtggcacagacaagaccaaggcaaatgttactgttgaggctcgactaataaaagtggaaaagcctctgtacggagtagaggtgtttgttggtgaaacagcccactttgaaattgaactttctgaacctgatgttcacggccagtggaagctgaaaggacagcctttgacagcttcccctgactgtgaaatcattgaggatggaaagaagcatattctgatccttcataactgtcagctgggtatgacaggagaggtttccttccaggctgctaatgccaaatctgcagccaatctgaaagtgaaagaattgcctcttatcttcatcacacctctcagtgatgttaaagtcttcgagaaagatgaggctaagtttgagtgtgaagtatccagggagcccaaaacattccgttggctaaaaggaacccaggaaatcacaggtgatgacagatttgagcttataaaggatggcactaagcattcaatggtgatcaagtcagctgcttttgaagatgaagcaaaatacatgtttgaagctgaagataagcacacaagtggcaaactgatcattgaaggaatccggctcaaattcctcacccctctcaaagatgtaactgccaaagagaaggaaagtgctgtatttactgtggagttatctcatgataacatccgagttaaatggttcaagaatgaccagcgcctacacaccaccaggtcggtctcaatgcaagacgaagggaaaactcattcgatcacattcaaagacctgtctattgatgacacctcccaaattagagtagaagctatggggatgagttcagaagctaaactcactgtgcttgagggagacccatattttacaggaaaacttcaagattatactggtgtagagaaagatgaagttattctacagtgtgaaattagcaaagcagatgcaccagtgaaatggtttaaggatgggaaggaaataaagccatccaaaaatgctgttattaaggcagatggcaagaaacgcatgctaatcctaaagaaagccttgaaatcagatattggacagtacacctgtgactgtgggacagataagacctcaggaaaacttgacattgaggatcgggaaattaaactggtgcgacccctgcacagtgtggaggtgatggagactgagacagcacgctttgaaaccgaaatctctgaagatgatatccacgccaactggaaactcaagggagaggccctactccaaacacctgattgtgaaattaaggaagaaggcaaaatacactcccttgttttgcacaactgtcgcctggaccagacgggtggggtggatttccaagctgccaatgttaaatctagtgcccacctccgagttaagccacgagtaattggtcttctgaggcctttaaaggatgtcaccgtgactgcaggggaaacagccaccttcgactgcgagctctcctacgaagatatcccagtggaatggtatctcaaagggaagaaactagagcccagcgataaggtggtcccacgttcagaaggaaaagttcatacacttactctgagggatgtaaagttagaagatgctggggaagtccaactaacagcaaaagatttcaaaactcacgccaacctctttgtgaaagaacccccagttgaattcactaagcctcttgaggaccagacggtcgaagagggagccactgcagtgctggagtgtgaagtctccagagaaaatgctaaggtgaaatggttcaaaaatgggacagaaatcctcaaaagcaagaagtatgaaattgttgctgatggcagggtcagaaaacttgttatacatgactgtaccccagaggatattaaaacatacacttgtgatgctaaggattttaagacttcctgtaacctgaatgtcgtgcctcctcatgtggaattcttaagaccactcaccgaccttcaagttagagaaaaagaaatggctcgatttgagtgtgaactttcccgagaaaatgctaaggttaagtggtttaaagatggtgctgaaattaaaaagggcaaaaaatatgacatcatatccaagggagcagtgcgcattcttgtcatcaacaaatgtctactggatgatgaagctgaatattcctgtgaagtaaggacagcgagaacttctggcatgctgacagttctggaagaagaagctgtctttaccaaaaatcttgccaacattgaagttagtgaaacagacactataaaactggtttgtgaagtctccaaacctggcgcagaagtgatttggtataaaggggatgaggagatcattgaaacaggaagatatgaaatactgactgaaggacggaagagaatcctggtcattcagaacgctcaccttgaggatgctggcaactacaactgtcgactcccaagctctcgaaccgatggcaaagtcaaagtacatgaactggctgctgaatttatctcaaagcctcaaaaccttgaaatacttgaaggagaaaaggctgaatttgtctgctctatatcaaaagaaagctttccagtccagtggaagagggatgataagacacttgaatctggagataaatatgacgttattgctgatggtaaaaagagggtcctagttgtgaaagatgccacattacaagatatgggcacttacgttgtcatggtaggggccgccagagcagcagctcacttgacagtcattgaaaaactcaggatcgtagttcctcttaaggacacccgggtgaaggaacaacaggaagttgtcttcaactgtgaagtcaatactgaaggtgccaaagccaaatggttcagaaatgaagaagctatatttgatagttcaaaatacatcattctccaaaaagacctagtctacaccctcagaattagagatgcacacttagatgaccaagccaactataatgtgtctttgaccaatcacagaggtgaaaatgttaaaagtgcagccaatctaatagtagaagaggaagaccttaggattgttgagcctcttaaagatattgaaacaatggagaagaaatctgtcacattctggtgcaaggtgaatcgtctcaatgtaacactgaagtggaccaaaaatggtgaagaagtgccttttgacaaccgtgtctcatacagagttgataagtacaagcacatgttaaccattaaagactgtggcttcccagatgaaggtgaatacattgtcactgctggacaagataaatctgttgctgagcttctcatcatagaagccccgacagaatttgtggaacacttggaagatcagacagtcactgagttcgatgacgctgtcttctcctgccagctctccagagagaaagccaatgtaaaatggtacagaaatgggagagaaatcaaagaaggcaaaaaatacaaatttgaaaaagatggaagtatacacagactcattataaaagattgcaggctggatgatgagtgtgaatatgcttgcggggtagaagacaggaagtctcgtgctagactttttgtggaagaaattcctgttgagatcatcaggcctccacaagatattcttgaagcccctggtgctgatgttgtctttttagcagaactcaataaagataaggtggaagtccaatggctaagaaataacatggttgttgtccagggtgataaacaccagatgatgagtgaaggaaagatacatcgactacagatttgtgatattaagccccgtgaccagggtgaatacagatttattgccaaagacaaagaagccagagctaagcttgaactggcagctgcaccaaaaatcaagacagctgaccaagaccttgtggttgatgttggcaagcctctgacaatggtggtgccatatgatgcctaccccaaagcagaagctgaatggtttaaagaaaatgaacctttatctacaaaaaccattgatactacggctgaacaaacttctttcagaattttagaagccaagaaaggagacaaagggaggtataaaattgtgcttcagaacaaacatggaaaagcagaaggattcatcaatttaaaagttattgatgttcctgggccagtacgtaacttagaagtgacagaaacatttgatggtgaagtgagccttgcttgggaagaacctttaactgatggtggaagcaaaatcataggttacgttgttgaaagacgtgacattaagagaaagacctgggttctggccacagaccgtgcagagagttgtgagtttactgtcactggtctacagaaaggaggagttgagtacctattccgtgtgagtgcaagaaacagagttggcactggtgagccagtagaaactgacaatcctgtagaagcaaggagtaaatatgatgttccaggccctcctttgaatgtaaccatcactgatgtgaatcgatttggtgtctcactgacatgggaaccaccagagtatgatggaggtgctgagatcacaaactacgtcattgaattaagagacaagacttctatcaggtgggatactgccatgactgtgagagctgaagacctgtctgcaactgttactgatgtggtagaaggacaggagtacagtttccgagtgagagcccaaaatcgaattggagttggaaaaccaagtgcagccacacccttcgtcaaagttgctgatccaattgagagaccaagtcctcctgtaaacctaacttcctcagatcagactcagtcatcagttcagctcaaatgggaacctcctctgaaagatggaggaagcccaatattaggctatataattgagcgatgcgaagaaggaaaagataattggattcgttgcaatatgaaacttgtccctgaactgacttacaaggttaccggattggaaaaaggaaataaatatttatatagagtatctgcagaaaataaagctggtgtttcagatccatctgaaattcttggtcctctcaccgctgacgatgcatttgttgaaccaacaatggatttaagtgcatttaaagatggtctggaagttattgtcccaaatcctatcacgatcctggttccaagtacaggctatccaaggccaactgcaacctggtgttttggagataaagtactagaaacaggggaccgggtgaaaatgaagaccttgtctgcctatgccgaacttgtcatttctccaagtgaacgttcagacaagggcatttatacactgaaattagaaaaccgtgtgaaaacaatttctggggaaattgatgtcaatgtaattgctcgcccaagtgcacccaaagaattgaaatttggtgatataaccaaggactcagtacatttgacttgggaaccacctgatgatgatggaggaagtccgttaactggatacgttgttgaaaaacgagaagtcagccggaaaacatggactaaagttatggactttgtgactgatctagaattcacagttcctgatcttgttcaaggaaaagagtacttatttaaagtttgtgctcgtaacaaatgtggccctggagaacctgcatatgttgatgaacctgtaaatatgtcaactcctgcaacggtacctgacccaccagagaatgttaaatggagagatcgaacagccaatagcatcttcttaacatgggatccacctaaaaatgatggtggttcacgcatcaaaggatatatagttgaaagatgtccacgtggttctgataaatgggttgcctgtggagaacctgttgcagaaacaaaaatggaagtgacaggtcttgaggaaggcaaatggtatgcctaccgcgtgaaggccttaaacaggcagggtgctagcaaaccaagcagacccacagaggaaatccaggctgtggacacacaagaggccccagaaatcttcctcgatgtgaagctccttgctggtctcactgtaaaagctgggaccaagattgaacttcctgccaccgtaaccggaaaacctgaacctaaaataacttggacaaaggctgatatgattctgaagcaggacaaaagaattaccattgaaaatgtccctaagaaatccacagtgactattgttgatagtaagagaagtgacactggcacatatatcattgaggctgtgaatgtgtgtggccgggccactgctgtggtggaagtgaacgtcttagataaacccggaccaccagctgcctttgacatcacagatgtaaccaatgagtcatgtcttctaacatggaacccaccacgcgatgatggtggatctaagatcacaaactatgttgtggagagacgagcaactgatagtgaagtgtggcacaagctctcatccaccgtcaaggatacaaacttcaaggccaccaaattaatccccaataaagagtacatcttcagagttgctgcagaaaacatgtatggtgttggtgaaccagttcaggcctctccaataacagccaaatatcagtttgatccacctggtcctccaactcgcctagaaccttctgatatcactaaagacgcagtgactctcacatggtgtgagccagatgatgatggtggcagcccaatcacaggatactgggttgaaagactggatcctgatacagataaatgggttagatgcaataagatgccagtaaaggacacaacatacagagtgaaaggtctcactaataagaaaaaatacagattccgtgtgttggctgaaaatcttgctggacctggaaaaccaagcaaatcaactgaaccaatcttaataaaggatcccatagatcctccatggccccctggaaaaccaactgtaaaagatgtaggcaaaacatcagtaaggttgaattggacaaaaccagaacatgatggaggtgcaaagattgagtcttatgtcattgaaatgctgaagactggaacagatgagtgggtcagagtggcggaaggggttcccaccactcagcacttgctcccagggctcatggaaggacaggaatactcattccgagttagagctgtgaataaggctggggaaagtgaacccagtgaacccagtgaccctgtgctttgccgggagaagctatatcctccatcaccaccacgctggcttgaagttattaatatcacaaaaaatacagcagacctaaaatggacagttcctgagaaagatggagggtcccccatcaccaactacattgtggaaaagagagacgtcaggcgaaaaggctggcaaacagtggataccactgtcaaggacaccaagtgcacagtcaccccactgactgagggctctttatatgtgttccgagttgctgcagaaaatgctataggacaaagcgactacaccgaaattgaggactctgtgctggccaaagacacctttaccactcctggaccaccctacgccctggcagtggttgatgtgacaaaacgacatgttgacctaaagtgggagccacctaaaaatgatggtggaagaccaatacagagatatgtcattgagaagaaagaaaggttaggtacccgttgggtgaaagctggaaagactgcaggacctgactgtaacttcagagtaactgatgtcatcgaaggaacagaggtccagtttcaggttcgggctgaaaatgaagctggagttggccacccaagtgaacccacagaaatcctatccattgaagatccaacaagtcctccctcaccaccccttgacctacatgtgactgatgctgggagaaaacacattgccattgcttggaagcctccagagaaaaatggtggaagtcctatcataggataccatgttgaaatgtgtccagtaggcactgagaaatggatgagagttaattctcgcccaataaaggacttgaaattcaaggttgaagaaggtgttgttcctgacaaagaatatgtcctgagagtgagagcagtcaatgctattggtgtcagcgagccatctgaaatctctgaaaatgtggttgccaaagacccagactgcaagccaacaattgacctggagactcatgacattattgttattgaaggtgaaaagttaagcattcctgttcccttcagagctgtcccagttccaactgttagttggcataaagatggcaaagaagttaaagcaagtgatagattaacaatgaagaatgatcacatctctgcacaccttgaagttcccaagagtgtccgtgcagatgccggaatttataccattacactggagaataagctcggctcagcaacagcctcaatcaatgtcaaagtcataggcctacctggaccatgcaaagatattaaagcaagtgacattaccaagagttcttgtaagttaacttgggaacctccagaatttgatggtggaaccccaattcttcattatgtcctggagcgcagagaagctgggaggagaacatatataccagtcatgtctggtgagaacaaactgtcatggactgtgaaggatctcataccaaatggtgaatacttcttccgtgttaaagcagtcaacaaggttggtggaggagaatatattgaactgaaaaatccagtcattgctcaagatccaaagcaaccccctgatccacctgtagatgtagaggttcataatcctacagcggaggcaatgactattacatggaagccacctttgtatgatggagggagcaagataatgggctacatcatagagaagattgctaagggtgaagaaaggtggaagagatgcaatgaacacctggtaccaatcctgacctatacagcaaaaggacttgaagaggggaaagagtaccaattccgtgtgcgagcagagaacgccgcgggtattagtgaaccttctcgggctactcctccaaccaaagctgtagatcccattgatgcccccaaagtcattctgagaacaagcctagaagtgaaacgaggtgatgaaatagcacttgatgcaagtatttctggatcaccttacccaactattacatggataaaggatgaaaatgttattgtaccagaggaaattaagaagcgtgcagcacccttggttaggagaaggaagggtgaagttcaagaagaagaaccatttgtcctgcctctgacacagcgtttgagtattgacaacagcaaaaagggagaatctcagctacgcgtccgagattctctccgacctgaccatggtctgtatatgatcaaagttgaaaatgaccacggtattgcaaaagctccttgtactgtcagtgtgttagatacaccgggaccaccaatcaactttgtatttgaagatatcagaaagacctcagtcctttgtaaatgggaaccaccccttgatgatggtggcagtgaaatcataaactacactttggaaaagaaagacaagacaaaacccgactcagaatggattgttgtcacttcaacacttagacattgcaaatattcagtaacaaaactgattgaaggaaaagagtacctcttccgtgtaagagctgaaaacagatttgggccaggtccaccatgtgtttcaaagccacttgtggctaaagatccatttggaccacctgatgcaccagataagcccattgtggaagatgttaccagcaacagtatgctagtgaaatggaatgaaccaaaagataatggaagccccattttgggttactggcttgaaaaacgtgaagttaacagtacacattggtctcgtgtcaacaaaagccttctgaatgccttgaaagccaatgtagatggcttattagaaggactcacctatgtcttcagagtatgtgctgaaaatgcagctggacctggaaagttcagtccaccttcagatcccaaaacagcacatgatccaatctctcctcctgggccacctatcccaagagtcactgacacaagctctacaactattgaactagaatgggaacccccagctttcaatggtggtggggaaattgttggctattttgttgataagcagttggttggcacaaatgaatggtcacgctgcacagagaagatgatcaaggtccgtcagtacaccgtcaaagaaatccgagagggtgctgattacaaacttcgggtgagtgctgtcaatgccgcaggggaaggaccgcctggagaaacacaacctgttactgtggctgaaccacaagagcctccagctgtggaactggatgtttctgtcaagggtggaatacaaataatggctgggaagactcttagaattccagctgtggtgactggtcgccctgtacctacaaaagtatggaccaaagaagaaggggagctggataaagaccgtgttgtaatagacaacgttggaaccaaatctgaactaattatcaaggatgcactgcgaaaagaccatggcagatatgtgattacagctacaaatagctgtggttccaaatttgcagcagccagggtagaagtttttgatgtccctggtccagttcttgacttaaaacctgttgtaacaaacagaaaaatgtgtctacttaactggtctgatccagaagatgatggaggaagtgaaataacaggctttatcattgaaagaaaagatgccaagatgcatacttggagacaaccaatagagactgagagatctaaatgtgacatcacaggtctgcttgagggacaagaatataagttccgtgttattgccaagaacaagtttggctgtggccctcctgttgaaataggaccaattcttgcagttgatccactaggtcctccaacatctccagagaggctcacatacactgaaaggacaaagtccactatcacacttgactggaaagagccccgcagtaatggtggcagtcccatccaaggatatatcattgaaaaacggcgtcatgacaaacctgactttgaaagagttaacaagcgactctgcccaaccacatcttttctggttgaaaatcttgatgaacaccaaatgtatgagttccgtgtcaaagctgtcaatgaaattggtgaaagtgaaccatccctacctcttaatgtagtcatacaagatgatgaagtgcctccaactattaagttgcgtctgagtgttcgaggagacactatcaaagttaaggcaggagagcctgtccacatccctgcagatgtgacaggccttccaatgcctaagattgaatggtccaaaaatgaaactgtaattgaaaaacccactgatgcacttcagataaccaaggaagaggtatcccgaagtgaggcaaaaactgagcttagcattcccaaagcggtccgggaggacaaaggcacttacacagttactgcttccaatcgccttggctcagtgttccgaaatgttcacgttgaagtatatgaccgcccatccccaccaagaaatcttgctgttactgacattaaagctgaatcttgctacttgacatgggatgcccctcttgataatggtggcagtgaaatcacccattatgttattgacaaacgtgatgcaagtaggaagaaagcagaatgggaggaagtcaccaacactgctgtagagaaaagatatgggatctggaaacttatccccaatggtcagtatgagttccgagtcagggcagtgaataaatatggaatcagtgatgagtgcaaatcagataaagtagtcattcaagatccttatcgccttcctggacctccaggaaaaccaaaagttttggcacgcaccaaaggatcaatgctagtgagctggactcctcctttggacaatggtggctctccaattactggctactggctggagaaaagagaagagggaagtccttattggtcacgtgttagccgagcaccaataaccaaagtgggattgaaaggcgtggaatttaatgttcctcgtttgcttgaaggcgttaaataccagttcagagccatggcaataaatgctgcaggaattggtcctcccagtgaaccatcagatccagaggttgcaggagatcccatatttccaccggggccaccttcttgcccagaagttaaagataaaacgaagtcaagcatctcactaggatggaaacctccagccaaagatggtggcagcccaatcaaaggatacattgtagaaatgcaagaagaaggtactactgactggaaaagagtaaatgaaccagacaaacttataactacctgtgaatgtgtggtgcctaatctgaaagagctcaggaagtacagattcagagtgaaagctgtcaatgaagctggtgaatctgaaccaagtgatacaactggggagatccctgccactgatattcaagaggaaccagaagttttcattgacattggagcacaggactgtctggtttgtaaagctggctcacagattaggattcctgctgtcatcaagggacgcccaacaccaaaatcatcttgggaatttgatggaaaggcaaagaaagcaatgaaggatggagttcatgacatacccgaagatgcacagctggagactgctgaaaactcctcagtaattattattccggagtgtaaacgatctcatacaggcaaatacagcatcacagccaagaataaagcaggacaaaagactgcaaattgcagagttaaagtcatggatgtaccaggcccacccaaagatctgaaagtcagtgatatcacaaggggtagttgcagactttcatggaagatgccagacgacgatggaggagacaggatcaaaggctatgttattgagaagaggactattgatggaaaagcctggaccaaagtcaatccagactgtggaagcaccacatttgtagtgcctgatctcctctctgaacagcaatatttcttccgtgtgcgagcagaaaaccgttttggtattggcccacctgtggaaaccattcagaggaccactgccagagatccgatatatcctcctgatcctcctattaaactcaagattggcctcatcacaaagaacacagtgcatctgtcatggaaacccccgaagaatgatgggggctcccctgttacccactatattgttgagtgccttgcatgggaccctactgggacaaagaaagaagcctggaggcagtgcaataagcgtgatgtggaagaactgcaatttactgttgaagacctagtagagggtggggaatatgaattccgagtcaaagctgtcaatgctgcaggagtcagcaagccttcagccactgttggccctgtgactgtcaaagaccagacatgcccaccatcaattgatctaaaagaattcatggaggttgaagaaggaaccaatgttaacattgtggccaaaattaaaggtgtgccattcccgacactaacctggtttaaagctcctccaaagaagcctgataacaaagaacctgttctctatgacacccatgtcaacaaactggtggtagatgatacttgcactttagttattccgcagtctcgcaggagtgacactggcttatataccatcacagctgtaaataatctgggaacagcatcaaaggagatgagactgaatgtcctgggtcgtcctggccctccagtgggacccataaaatttgaatctgtttcagcagatcaaatgacactatcttggtttccacctaaagatgatggtgggtctaagattacaaactatgtaattgagaaaagagaagctaacaggaagacatgggtccatgtctccagtgaacctaaggagtgcacgtacacgattcccaaattgctagaaggccatgaatatgtattccgaatcatggcccagaataaatatggcattggagaacctcttgacagtgaacctgaaacagcaagaaacctcttctctgtccctggagcaccagataaaccaacagttagcagcgtgactcgtaactccatgactgtcaactgggaagagccagaatatgatggaggctctcctgtgacagggtactggctggaaatgaaagacaccacttcaaagagatggaagagagttaaccgagatcctatcaaagccatgactttgggtgtttcttataaagtgactggtcttattgaaggttccgactatcaattccgggtatatgcaatcaatgctgctggcgtgggtccagcaagtctgccatcagacccagcgactgctagagatccaattgcccctcctggtcctccatttcccaaagtgacagattggactaaatcatctgcagatctggagtggtctcccccactaaaagatggtggatccaaagtaactggatacatcgttgaatataaagaagaaggaaaagaagaatgggaaaagggtaaagataaagaagtgagaggaacaaagcttgttgtgacaggattaaaggaaggagcattctacaaatttagagttagagcagtcaacattgctggcattggagaacctggagaggtcacagatgtcattgaaatgaaggacagacttgtttcacctgaccttcagctagatgccagtgtcagagatagaattgttgtccatgctggaggggtgatccgaatcattgcctatgtgtctggaaagcctcctccaaccgtcacctggaacatgaatgaaagaaccttacctcaagaagccaccattgagaccacagccattagctcatccatggtcatcaagaactgccagaggagccatcaaggcgtctattctcttcttgccaaaaatgaagccggagaaagaaagaagacaattattgttgatgtattagatgttccaggtcccgttggaacaccattcctagctcacaacctaaccaatgagtcctgcaaactgacatggttttctccagaagatgatggaggctctccaatcaccaattatgtcattgaaaagcgtgaatctgaccgcagagcatggaccccagtgacatatacagttacccgacaaaatgctactgtccagggtctcattcaaggaaaagcctactttttccgaattgcggctgaaaatagtattggcatgggtccatttgttgagacatcagaggcacttgttatcagagagccaataactgtaccagagcgtcctgaagacctggaagtcaaagaagttactaaaaatactgtaactttgacttggaatcctcctaagtatgatggtgggtcagaaattattaactatgtcctagaaagtcggctcattgggactgagaagttccacaaagttacaaatgacaacttgcttagcagaaaatacactgttaaaggcttaaaagaaggtgatacctatgagtaccgtgtcagtgctgtcaacattgttggacaaggcaaaccatcattttgcaccaaaccaattacttgcaaggatgagctggcacccccaacgcttcacctcgacttcagagataagctcacgattcgagttggtgaagcttttgccctcactggccgttactcaggcaaaccaaagcctaaggtttcctggttcaaagatgaagctgatgtgctggaagatgatcgcactcatataaagactacaccagcaacacttgctttagagaagatcaaggccaaacgttcagattccggcaaatactgtgtggttgtggagaacagtacaggctctaggaaaggtttctgtcaagttaatgttgttgaccgtcctggaccaccagtaggaccagttagttttgatgaggtgaccaaagattacatggttatctcttggaagcctcctttagatgatggaggcagtaaaatcaccaattatattattgagaagaaggaagtgggtaaagacgtctggatgccagtgacatctgcaagtgctaaaacaacatgcaaagtttctaaactacttgaaggaaaagattatattttccggatacatgctgaaaatctgtatggaataagtgatcctctggtgtctgattcaatgaaagccaaagatcgtttcagggttcctgatgcacctgatcagccaattgttacagaagttaccaaagactctgcattagtaacctggaataagccacatgatggaggaaaacccatcacaaactacatcctggaaaagagagaaactatgtctaaacgatgggctagagttaccaaagatcctattcatccatacactaaatttagggttcctgatcttctagaaggatgtcagtatgaattccgggtttctgcagaaaatgaaattggtattggagatccaagcccaccatccaaaccagtctttgctaaagatccaattgctaaaccaagtccacctgttaatcctgaagcaatagatacaacatgcaattcagtcgatctaacttggcagccaccacgtcatgatggtgggagcaagattctgggttatattgttgagtaccagaaagttggagatgaagagtggagaagagccaatcacacccctgagtcatgtcctgaaactaaatataaagtcaccggtcttcgggacggtcaaacctataagtttagagtgttagcagtcaatgcagctggtgaatcagatccagctcatgttccggagccagtcctagtaaaagacaggcttgaaccccctgagttgattcttgatgccaacatggcaagagaacaacacattaaagttggtgatactctaagacttagtgccatcatcaaaggagtgccattcccaaaagtaacttggaaaaaagaagacagagatgctccaactaaagcaagaattgatgtgactccagttggtagcaagcttgaaattcgtaatgctgcccatgaagatggtggaatttattctttaacagtggagaatccagctggttcaaaaactgtctcagtaaaagtacttgtattagataaacctgggccacctagagatctggaagtcagtgaaattaggaaagattcatgttaccttacttggaaagaaccactggatgatggtggttctgttattaccaattatg

SEQ ID NO: 191437 - DNA, 32767 bp, Homo sapiens
  Payload ID: 17810
  Gene Name: titin
  Uniprot ID: Q8WZ42
  ENST ID: ENST00000591111
  CDS Start-End: 226-103278
gagcagtcgtgcattcccagcctcgcctcgggtgtagggattgcatagaaaagcaaaactacacagtcttgactgtgtagttttgtttttaggattagaggctcaccgattcatgtcggagatggtcagaaaaaccaactctccataggacgtcgtttcagaagcaaccttgggcttagtcccaccctttttaggcactcttgagaaatcagagtgcctagaaagatgacaactcaagcaccgacgtttacgcagccgttacaaagcgttgtggtactggagggtagtaccgcaacctttgaggctcacattagtggttttccagttcctgaggtgagctggtttagggatggccaggtgatttccacttccactctgcccggcgtgcagatctcctttagcgatggccgcgctaaactgacgatccccgccgtgactaaagccaacagtggacgatattccctgaaagccaccaatggatctggacaagcgactagtactgctgagcttctcgtgaaagctgagacagcaccacccaacttcgttcaacgactgcagagcatgaccgtgagacaaggaagccaagtgagactccaagtgagagtgactggaatccctacacctgtggtgaagttctaccgggatggagccgaaatccagagctcccttgatttccaaatttcacaagaaggcgacctctacagcttactgattgcagaagcataccctgaggactcagggacctattcagtaaatgccaccaatagcgttggaagagctacttcgactgctgaattactggttcaaggtgaagaagaagtacctgctaaaaagacaaagacaattgtttcgactgctcagatctcagaatcaagacaaacccgaattgaaaagaagattgaagcccactttgatgccagatcaattgcaacagttgagatggtcatagatggtgccgctgggcaacagctgccacataaaacacctcccaggattcctccgaagccaaagtcaagatccccaacaccaccgtctattgctgccaaagcacagctggctcggcagcagtccccatcgcccataagacactccccttccccggtcagacacgtgcgggcaccgaccccatctccggtcaggtccgtgtctccagcagcaagaatctccacatcccccatcaggtctgttaggtctccattgctcatgcgtaagactcaggcatccaccgtggccacaggtcctgaagtgcctcccccttggaagcaagagggctacgtggcctcctcatctgaggctgagatgagagagacaacgctgacaacctctactcagatcaggacagaagagagatgggaagggagatacggtgtccaggagcaagtgaccatcagtggtgctgcgggtgctgccgccagtgtgtcggccagtgctagctacgcagcagaggctgttgccactggtgctaaagaggtgaaacaagatgctgacaaaagtgcagctgttgcgactgttgttgctgccgttgatatggccagagtgagagaaccagtgatcagcgctgtagagcagactgctcagaggacaaccacgactgctgtgcacatccaacctgctcaagaacaggtaagaaaggaagcggagaagactgctgtaactaaggtagtagtggccgccgataaagccaaggaacaagaattaaaatcaagaaccaaagaagtaattaccacaaagcaagagcagatgcacgtaactcatgagcagataagaaaagaaactgaaaaaacatttgtaccaaaggtagtaatttccgcagctaaagccaaagaacaagaaactagaatttctgaagaaattactaagaaacagaaacaagtaactcaagaagcaataagacaggaaactgagataactgctgcatccatggtggtagttgccactgcaaagtccacaaaactagaaacagtcccgggagctcaagaagaaactaccacacaacaagatcaaatgcacctaagttatgaaaagataatgaaggaaactaggaaaacagttgtacctaaagtcatagttgccacacccaaagtcaaagaacaagatttagtatcaagaggtagagaaggcattactaccaaaagagaacaagtgcaaataactcaggagaagatgagaaaggaagccgagaaaactgccttgtctacaatagcagttgctactgctaaagccaaagaacaagaaacaatactgagaactagagaaactatggctactagacaagaacaaatccaagttacccatggaaaggtggacgttggaaaaaaggctgaagctgtagcaacagttgttgctgcagtagaccaggcccgagtcagagagcccagagagcctgggcatcttgaagaatcctatgctcagcagaccactttggagtacggatataaggaacgcatttccgccgcaaaggtagctgagcctccccaacgtccagcctcagaaccccacgttgtccctaaagcagtcaagcctagagtaatccaggctccttctgagactcatatcaaaactactgatcaaaagggaatgcacatatcatcacagatcaagaaaactacagatctaacaacggaaagattagtccatgtggataaacgcccccgcacagctagccctcactttactgtttcaaaaatttctgttcctaagacagaacatggatatgaggcatcaatagccggtagtgctattgccacattacaaaaagagttgtcagccacatcttctgctcagaagatcaccaaatcggtgaaggctcctactgtgaagcccagtgagactagagtaagggcagagcccacacccttgccacagttccccttcgctgacacaccagatacttacaagagtgaagctggcgttgaggtgaaaaaggaagtaggggtgagcatcactggcaccaccgtccgtgaagagcgctttgaagtactgcacggacgcgaagccaaggtaacagaaacagcaagagtaccagcacctgttgaaattcctgttactccaccaactttggtctcgggcttaaaaaatgtgactgtcatagaaggtgaatctgtcaccttggagtgccacatctctggatacccatccccgacagtgacatggtacagggaagactaccaaatcgaaagttccattgacttccagataaccttccagagtggaattgctcgtcttatgattcgcgaagcatttgcggaagacagcgggcgatttacttgcagtgctgtaaatgaggctggaaccgtcagcacatcctgctatctggctgtgcaggtgtcagaagaatttgaaaaggaaaccacagccgtgactgagaaatttactacagaagagaaacgctttgttgagtcaagagatgtggttatgactgatactagcctcacagaggaacaagcagggcctggagaacctgccgcgccttactttattacaaaaccagtggtccagaaactggtggaaggtgggagcgtggtgtttggatgccaagttggcggcaacccaaagccccatgtatactggaaaaaatctggtgttcctctaaccactggatacagatacaaagtgagttacaacaaacaaaccggtgaatgcaagctggtgatttctatgacttttgctgatgatgctggagaatacactattgttgttcgcaataagcatggagaaacttctgcatctgcttccttgcttgaagaagctgattatgagttactgatgaagtcccagcaagaaatgctttatcagacacaagtgactgcatttgttcaagaacctaaagttggagaaacagcacctggatttgtatactctgagtatgaaaaagagtatgaaaaagaacaagccttaattaggaagaaaatggccaaagatactgtagtggtcagaacttatgtagaagatcaggaattccatatttcttcctttgaagagagacttattaaagaaattgaatatagaataataaagactacattagaagaacttcttgaagaagatggagaagaaaagatggcagttgacatttctgaatctgaagctgttgaatcaggatttgattcaagaatcaagaattatagaattcttgaggggatgggtgtcacttttcattgcaagatgtctggatatccattaccaaagattgcttggtacaaagatggcaagcgcatcaaacatggagaaagataccaaatggactttctacaagatggcagagctagtctgcgtatacctgttgttcttccagaagatgaaggaatctacactgcatttgccagcaatattaaaggaaatgcaatttgctcagggaaattgtatgtggagcctgctgcaccacttggagctccgacttacattcccacactagagccagtgagcagaatcagatctctctctccacgttcagtgagcaggtctcctatacgcatgtctcctgcacggatgtcacctgcaaggatgtctcctgcacggatgtcccctgcaagaatgtcccctggacgtaggctggaggagacagatgagtcacaacttgagagactatataaaccagtctttgtgttaaaacctgtttctttcaaatgtttagaagggcaaactgccagatttgacttaaaggttgttggtagacctatgccagagacgttctggtttcatgatggccagcaaattgtcaatgactatacccataaagtagtcattaaagaagatggtactcaatcactaattattgtccctgccacacccagtgattctggggaatggactgtggttgcccaaaacagggcaggcagatcttcaatttcagtgattttaactgtggaagctgtggaacatcaggtaaaaccgatgtttgtagaaaaactgaaaaatgtcaatataaaggaaggttcccgacttgaaatgaaagtcagagctacgggtaaccccaaccctgacattgtatggttgaaaaacagtgacatcattgtgcctcataaatatcccaaaatcagaattgaaggaaccaagggagaagctgcccttaaaatcgattccactgtcagccaagattctgcctggtatactgcgactgctattaataaagctggcagagacactacaagatgcaaagtaaatgttgaagttgagtttgcagagcctgagccagagagaaagttaatcatcccacgggggacatatagagcaaaggagattgcagccccagaactggagcccctccatttgcgatatggccaagagcaatgggaagaaggtgatctctatgacaaagagaaacaacagaaaccatttttcaagaaaaaactcacttccttaagacttaagcgctttgggcctgcccactttgaatgcaggctaacacccattggtgacccaacgatggtggtggagtggctccatgatggaaagccacttgaagcagccaacaggctccgtatgatcaatgaatttgggtactgcagccttgattatggcgttgcatattctagagacagtggtatcattacttgcagagccactaacaaatatggaacagatcacacatctgctacccttattgttaaagatgagaaaagtcttgtggaagaatcccaattgcctgaggggaggaaaggcttacagagaattgaagaattagagagaatggctcatgaaggtgcacttacaggtgtaacaacagatcagaaagaaaagcaaaagccagacattgtcttgtacccagagccagttagagtacttgaaggggagactgcaaggttccgctgcagggtaacaggctaccctcagcccaaagtcaactggtacctcaatggacagctcatccgcaaaagcaaaaggttcagagttcgctatgatggtatccattacctggacatcgtggactgcaaatcatatgacacaggtgaagtgaaggtcaccgcggaaaatcctgaaggtgtgatagagcataaagtgaagcttgagattcaacagagggaagattttaggtctgtccttaggagagctcctgaaccaaggcctgagtttcacgtacatgaaccaggaaagcttcagtttgaagtacaaaaagtggatagacctgttgacaccactgaaaccaaagaagttgtgaagttgaaaagggctgaaagaattacccatgaaaaagtgcctgaagagtcggaagagctgcgcagtaaattcaagcgcagaacagaagagggctattatgaagccattaccgctgtggagctcaagtctcgaaagaaggatgaatcctatgaggaactcctcaggaagacaaaagatgaacttctccactggaccaaagagttaactgaagaggaaaagaaagctcttgccgaagaaggcaaaatcacgattccaacttttaaacctgacaagattgaactaagtcctagtatggaggctccaaaaatcttcgaaagaatccagagccaaacagtgggccaaggatctgatgcacacttccgggtcagagtcgtggggaaaccagaccccgaatgtgaatggtacaaaaatggtgtcaaaattgaacggtctgaccggatctactggtactggcccgaagacaatgtttgtgaattggtcataagagatgtgactgctgaggactctgccagcatcatggtaaaagccatcaacatagctggagaaacctccagtcacgcattcttacttgtccaagccaagcaattgatcactttcacacaggaattacaagatgttgttgctaaggaaaaagacactatggcaacctttgaatgtgaaacttcagaaccatttgtcaaagtgaaatggtataaagatggtatggaggttcatgagggagataaatacaggatgcactctgacagaaaggttcacttcctctccatactgaccattgatacgtctgatgctgaagattacagctgtgtacttgtggaagatgaaaatgtcaaaacgactgctaaacttattgttgaaggtgcagttgttgagtttgtgaaagaacttcaggacatagaagttccagaatcatattcaggagaattagagtgcattgtatccccagaaaatatagaaggaaaatggtatcataatgatgtggagcttaaatccaatggcaaatatacaattacatctcgtcgtggacgtcagaacctcacggtcaaggatgtaaccaaggaggaccagggagaatacagctttgtcatcgacgggaaaaagacaacctgtaaattaaagatgaaaccccgccccattgctatcctacaaggacttagtgaccaaaaagtctgtgagggtgacattgttcagcttgaagttaaagtctccttggaaagtgtggaaggcgtctggatgaaagacggccaagaagtgcagcccagtgacagggttcacattgtgatagacaaacaatctcatatgctgctcattgaagacatgactaaggaagatgctggaaattactctttcaccattccagcccttggcctctccaccagtgggcgtgtctctgtctatagtgtggacgtgataacacctctaaaagatgttaatgtgattgaaggcaccaaggctgtgcttgaatgtaaggtgtcagtccctgatgtgacttctgttaagtggtacttaaatgatgaacaaatcaagcctgatgaccgtgtacaggccattgtgaaaggtactaaacagcgactagtcattaaccgaactcatgcttcagacgaaggaccttacaagctgatagttggcagagttgaaaccaactgtaatctctctgtagaaaaaattaaaattatcagaggtcttcgtgaccttacctgtacagaaactcaaaatgtggtgtttgaggttgagctgtcccactctggaattgatgtcctgtggaattttaaggacaaggaaatcaagcccagttctaaatataaaattgaagcacatggaaaaatatataaattgacagttctaaatatgatgaaagatgatgaaggaaaatacacattttacgcgggagaaaatatgacatctggaaaacttactgtggcaggtggggccatctccaagccactcacagatcagaccgtagctgaatcccaggaagctgtgtttgaatgtgaagttgccaacccagattccaaaggcgaatggttgagggatggcaaacacctaccactgactaacaacatcagaagtgagtctgatggccacaaaaggagacttatcattgctgccaccaaattagatgacattggagaatatacctacaaggtggccacctccaaaacatctgccaaactcaaagttgaagctgtcaaaattaagaagactctgaagaacctcacagtgacagaaacacaggatgctgttttcactgtcgagcttacacaccctaatgtcaaaggtgtccagtggatcaaaaatggagttgtgctggaatccaatgaaaagtatgctatctctgtcaaaggaacaatttactctctgaggattaaaaactgtgccatcgtggatgagtctgtttatggcttcaggcttggaaggcttggagccagtgccagactgcacgtggagactgtcaagatcattaaaaagccaaaggatgtgacagccttggaaaatgccactgttgcctttgaagttagtgtttcccatgacactgttccagtaaaatggttccataagagtgtggaaattaagccaagtgacaaacacagactggtctcagaaaggaaagtccacaagctgatgctgcagaacatctccccctcagatgctggggaatacacagctgtggtcgggcaattggaatgcaaagcaaaactgtttgtggagacattacatattacaaaaaccatgaaaaatatcgaggtgcctgagaccaaaactgcctcttttgagtgtgaggtgtcccacttcaatgtcccttccatgtggctgaagaatggtgtggaaattgagatgagtgaaaagttcaagatagttgtgcagggaaaactccatcagctgatcatcatgaacaccagcacagaggactcggcagaatacacatttgtctgtggcaatgaccaagtcagtgccaccctgacagtcaccccaatcatgattacttccatgctgaaagacatcaacgctgaagaaaaagacactattacttttgaggtgacagtgaactatgaaggcatctcttacaaatggttaaagaatggtgtggaaatcaaatcaactgacaagtgccagatgagaaccaaaaagctcacacactcactgaacatcaggaatgttcactttggggatgctgctgactacacctttgtggctggaaaagcaacatcaacagccacactttatgtggaagctcgtcatatagaatttaggaaacacattaaggacattaaggtactggagaagaagcgagccatgtttgaatgtgaagtttctgaacctgacatcactgtacagtggatgaaagatgaccaggaactgcagatcacagacagaataaagattcagaaggagaaatatgtccaccgccttctgatcccatccacccggatgtctgatgctgggaagtacacagtggtggcaggaggcaacgtgtcaactgcaaaactctttgtagaaggcagagatgttcgcatccgaagtattaaaaaggaggttcaggtcattgagaaacagcgtgctgttgttgaatttgaggtcaatgaagacgatgttgatgcccactggtataaagatggcattgaaatcaatttccaagttcaagaacgacacaaatatgtagtggaaagaagaatccaccgaatgtttatctctgagaccagacagagcgatgcaggagaatacacctttgtggcaggaaggaacaggagttctgtcactctctatgtcaatgctcctgaaccgccccaagttctgcaggagctccagcctgtcactgtgcagtctggcaagcctgcccgcttctgtgccgtgatatccggaagaccacagcccaaaatttcctggtacaaggaagagcagctgctttccactggcttcaagtgcaaatttcttcatgatgggcaagaatacacgcttttgctaattgaagccttcccagaggatgcggcagtctatacctgtgaagccaagaatgactatggtgttgccacaacatcagcttcactctcagtggaagttccagaagttgtgtctcctgatcaggaaatgcctgtttatccacctgccatcatcaccccgcttcaggacactgtcacttctgaagggcagccagcccgttttcaatgccgggtttctggaacagatctaaaagtgtcgtggtacagcaaagacaagaaaatcaagccatctcggttctttagaatgactcaatttgaagacacttatcaactggaaattgccgaagcttatccagaagatgaaggaacttacacgtttgttgctagtaatgctgtaggccaagtatcaagcacagccaacctgagtctggaagctcctgaatcaattttgcatgagaggattgaacaagagattgagatggaaatgaaagagttttctagttcttttctgtctgccgaggaagaaggacttcatagcgccgaacttcaattatctaaaataaatgaaacacttgaacttttgtctgaatctccagtttacccaactaaatttgattccgaaaaggaaggcactggcccaattttcatcaaagaagtgtcaaatgctgatataagcatgggggatgtggctacactgtctgtaactgtcattggcatccccaaacctaaaattcagtggttctttaatggagtgctattaaccccttctgctgactacaaatttgtttttgacggtgatgatcatagcctgatcattctgttcaccaaattggaggatgagggagagtatacatgtatggccagtaatgactatggaaagacaatatgtagtgcctatctaaaaattaattccaaaggagagggtcacaaagacactgaaacagaatcagcagtggcaaaatctctggaaaagctgggaggtccttgtcctcctcacttccttaaggagttaaaaccaattcgctgtgctcaagggcttcctgccatctttgagtacacagtggttggagagcctgcccctactgttacatggttcaaagaaaacaagcagctttgcaccagtgtttattacactatcattcataaccctaatggctctggaactttcattgtcaatgaccctcagagggaagacagtggcctctatatctgtaaagcagagaatatgttgggtgagtccacctgtgcagcagagctgcttgtgcttctggaagacacagacatgactgataccccctgcaaagcaaagtccacaccagaggctcctgaggattttccacagacacccttaaagggtcccgcagttgaagcacttgactcagagcaggaaattgcaacgtttgtaaaagacaccattttgaaagctgctttaattacagaagaaaaccagcaactatcttatgagcatattgctaaagccaatgaattgagcagtcagcttcctttgggagctcaggaattgcaatccattttggagcaagacaagctcactcctgaaagcaccagggaatttctttgcatcaatggcagtattcactttcagcctctcaaggaaccatctcccaacctacagctgcagattgtacagtcccagaaaaccttctccaaagaaggtattctaatgcctgaagagcctgagacacaggcagttctatcagataccgagaaaatcttcccaagtgccatgtccatagaacaaattaattcattaacagttgagcctctgaaaactttattagctgaacctgaagggaattatccacagtcttcaatagaacctccaatgcattcttatctaacctctgtggctgaggaagtactttcaccaaaagaaaagacagtatctgacaccaacagagagcaaagagtgactcttcaaaagcaagaggcacaaagtgcgctcatcttgagtcagagcttagctgagggacacgtggagagtctccagagtcctgatgtcatgatctctcaggtaaactatgagcccctagtcccttcagaacactcatgcacagaaggaggtaaaattttgatagaaagtgcaaatccactggaaaatgcagggcaagattctgcggtcagaattgaggaaggcaagtccttaagatttccactagcacttgaagaaaagcaggtactgctcaaagaagagcattctgacaacgtggtgatgcccccagaccaaatcattgagtctaaaagagagcccgtggcaataaagaaagtgcaggaggtacagggaagggaccttctttctaaggaaagcttgctttctggtattccagaagagcagagattaaacctgaaaattcaaatctgccgggctttgcaagcagccgtggccagcgagcagccaggtcttttctctgagtggctaagaaatattgaaaaggtggaggtcgaggctgtaaacatcacccaagagcccagacacatcatgtgcatgtaccttgttacttcggcaaagtctgtaacagaagaagtaaccatcattattgaagatgttgatcctcaaatggctaacctgaaaatggaacttagggatgctttgtgtgctattatatatgaggaaatagacatcctaacagctgagggtcctagaattcagcaaggagccaaaacaagtttgcaagaagaaatggattctttttcaggttcacagaaggttgaacccattactgaaccagaagttgaatctaaatatctgatctcaactgaagaggtcagttattttaacgtgcaaagtagggttaaatatttggatgccacacctgtcactaaaggggttgcttcagctgttgtctctgacgaaaaacaagatgagagtctgaaaccatcagaggaaaaagaggagtcttcctctgaaagtggtactgaggaggttgctacagtaaagatacaggaagctgagggtggcttaatcaaagaggatggccccatgatacatacacctttagtggacactgtttctgaggaaggtgatattgtacacctcacaacatccataacaaatgctaaagaggtgaattggtattttgagaataaactggtgccttcagatgaaaagttcaagtgtttacaagatcaaaatacatatacgctagtcatcgacaaagtaaataccgaagaccatcaaggagagtatgtctgtgaggccttgaatgacagcggaaaaacagcaacttcagccaaactcactgtagtaaaaagagctgccccagtgatcaagaggaaaatcgaacccctggaagtagcactgggccacctagccaaattcacctgtgagatccaaagtgctcccaatgtccggttccagtggtttaaagctggccgagaaatttatgagagtgacaagtgttctattcgatcttcaaagtatatctccagccttgaaatcctgagaacccaggtggttgactgcggcgagtatacatgcaaagcttccaatgagtatggcagtgtcagctgtacagccacactaactgtgacagaggcatatccaccaacctttctctccagacctaagtcccttacaacttttgtgggtaaggcagccaagttcatctgcacagtgacagggactcctgtgatagaaaccatttggcagaaagatggtgctgcactctcaccttcacctaactggaggatttccgacgcagaaaacaaacacattttagaactctcaaaccttaccattcaagatagaggagtttattcttgtaaggcttccaacaagtttggagcagacatctgccaagcagagttgatcatcattgataagccacatttcattaaagaattagagcctgtgcagtccgctatcaataagaaggtccaccttgagtgccaagtagatgaagacagaaaagtcacagttacgtggagcaaagatgggcaaaaactccccccagggaaagattataagatctgttttgaagataaaatagcaacacttgagattcctttggccaaactgaaagattcaggaacctatgtctgtacagcttcaaatgaggctggaagcagctcctgctcagccacagtcactgtcagagagccaccatccttcgtgaagaaggtggatccctcttatttaatgctcccaggtgaatcagcacgcctccattgcaagctgaaaggctcacctgtgatccaggttacttggtttaaaaataacaaagaactcagtgaaagtaacacagtccgaatgtattttgtcaattctgaggctatacttgatattacggatgtaaaagttgaagacagtgggagttactcatgtgaagcagtgaatgacgtcggcagtgatagctgcagtactgaaatagttatcaaagaacctccttctttcatcaaaactcttgagcctgcagacatagtgagaggaacaaatgctctacttcagtgtgaagtctcaggcactggaccatttgaaattagctggttcaaagacaagaaacaaattcgaagtagtaaaaaatacagattgttttctcagaagtctcttgtgtgtctggagatcttttcgtttaatagtgcagatgttggtgaatatgaatgtgttgttgctaatgaagtcggcaagtgtggctgcatggcaacccacttactcaaagaacctccaacctttgtaaagaaagtagatgatttgattgcactaggaggacaaaccgttaccctgcaagctgctgtgagagggtcagagcccatttctgtcacatggatgaaaggtcaagaggtcatcagagaagacggaaaaatcaaaatgagcttttccaatggtgttgcagtcttgataatccctgatgttcagattagttttggaggcaaatacacgtgcctggctgaaaatgaagctggaagccaaacatctgttggggaattaatagttaaagaacctgccaaaatcattgagcgagcagaactgatccaggtgacagcaggagatcccgccacactggagtacacagtggcaggcacgccagaactgaagcccaaatggtacaaagatgggagacccttggtcgccagtaaaaaataccgaataagttttaaaaacaatgttgcccagctcaaattttattcagctgagctgcacgacagtggccaatacacatttgagatttccaatgaagtgggcagcagctcctgtgagactacattcactgtattagatcgagacattgctccattttttaccaaacccttgcgcaacgtggatagtgttgttaatggtacctgcagactggactgcaaaattgcaggctccctccccatgagggtgtcctggtttaaggatggcaaagaaatagctgcttctgacagatacaggatagcatttgtggaaggcacagcctctttggagatcatcagagtagacatgaatgatgcagggaatttcacttgtcgagccacaaattccgtgggaagcaaagacagcagtggagccctgattgtgcaagaaccacccagttttgtaactaaacccggctcaaaggatgttctgcctggctcagcagtctgcctgaagagcactttccaaggatctactcctctcacaatcagatggtttaagggcaacaaagagctggtttctggtggaagctgctatattaccaaagaagctttagagagttccctggaactctatttagtaaaaacctctgattcgggcacgtacacatgtaaagtcagcaatgtcgctggaggggtggaatgcagtgcaaacttgtttgtaaaagaacctgccacatttgttgaaaagttagagccatcacagctgttaaagaagggagatgccacccagctagcctgcaaagtaactggtacccctccaattaaaataacatggtttgcaaatgatagagaaattaaggagagcagcaaacacagaatgtcttttgtggagtctactgcagttctaagactgacagatgttggcatcgaagacagtggtgaatatatgtgtgaggcccaaaatgaggctggcagtgaccactgcagtagcattgtaatagtcaaagagtcaccttattttaccaaggaatttaagccaattgaagtcttaaaggagtacgatgtcatgttgctggctgaggtggcaggcactcctccctttgagatcacttggttcaaagataacacaatcctgcgaagtggtagaaagtataagactttcattcaggatcatctggttagcctgcagatcctcaagtttgtagctgcagatgctggcgaataccagtgtcgggtgaccaatgaggtgggcagcagcatctgcagtgccagggtgactttaagagaacccccatccttcataaagaagatcgagagtaccagctccctccggggaggcacagctgccttccaggccactctgaagggctccttgccaattacggtgacttggctaaaagacagcgatgaaatcactgaagacgataatataagaatgacctttgagaacaatgtggccagtttgtacctcagtggcattgaagtcaagcatgatgggaaatatgtctgtcaggccaaaaatgatgcaggaatacaaagatgttctgcattactctcagtaaaagaacctgcaacaatcaccgaggaagctgtgtctatagatgtcacccaaggagacccagccactttgcaggttaaattttcagggactaaggagattacagccaaatggtttaaagatggccaagaactgaccctgggctcaaaatataaaatcagtgtcactgatacagtctcaatactgaagattatttctacagaaaagaaagatagtggagaatatactttcgaggtccaaaatgatgttgggaggagcagctgcaaggctagaattaatgtattagatcttatcatacctccttcattcaccaaaaagctgaagaaaatggacagcattaaaggttctttcattgatttagaatgtatagtggctgggtcacatcccataagcatccagtggttcaaagatgaccaagaaatatcagctagtgaaaagtacaaattctcttttcatgacaatactgccttcttggaaatcagccagctggaaggtacagacagtgggacatacacttgttctgccacaaataaggcagggcacaaccaatgcagtgggcatctgacagtcaaagaacccccttactttgtggaaaagccacagtcacaagatgtcaatcccaacacaagggtacagttaaaggctcttgtgggtggcactgcacccatgacaataaagtggtttaaagataacaaagagttacactcaggagcagcccgctcagtttggaaggatgacacctctaccagtctagagctctttgcagccaaagctaccgattctggaacctacatttgccaactaagcaatgatgttggcacagcaaccagcaaagccactctctttgtaaaagaacctcctcaattcattaagaagcccagtccagtcttagtgctgaggaatggacagtcaacaacatttgaatgccaaataacaggcactcctaaaatccgagtgtcttggtatctagacgggaatgaaataacagccattcagaaacatggcatttccttcattgatggtttagccactttccagatttctggtgccagggtagaaaatagtgggacttatgtgtgtgaagctcgaaatgacgcaggcacggcgagctgcagcattgaactcaaagtgaaagaaccccccacctttatcagagagctgaagcctgtggaggtagtaaaatatagtgacgtggagctggagtgtgaagttacgggaacacctccgtttgaagtcacttggctgaagaataacagggaaattcgaagcagcaaaaaatacacattgaccgacagagtgtctgtgtttaacctccatataaccaagtgtgacccttcagacactggggaataccagtgcattgtatccaatgaaggcggcagctgctcatgcagtactagagttgccctgaaagaaccaccatcattcattaagaagatagaaaataccactactgttttgaaaagttctgccacctttcagagtaccgtggcaggttctcctcctatttctataacctggctaaaggatgatcagattcttgatgaagatgataatgtctatatttcatttgtggacagtgtggccacacttcaaatcagaagtgtggataatggacacagtgggagatatacctgtcaagccaagaatgagtcaggagttgagaggtgttatgctttccttttagtacaagaaccagctcaaatcgtagagaaagctaaatcagttgatgttacggagaaagatcccatgaccttggaatgtgttgtggctggaacaccagaactcaaagtgaaatggcttaaagacgggaaacaaatagttcccagtagatacttttcaatgagttttgaaaataacgtggccagttttagaattcagtcagtaatgaagcaggacagcggtcagtacactttcaaggtggaaaatgacttcggaagcagtagctgtgatgcctacttaagagtgctagatcaaaatattcctccatcattcaccaaaaaattaaccaaaatggataaagttctgggctcttctattcatatggagtgcaaggtgtctggttcacttcccattagtgctcagtggtttaaggatggaaaagaaatatctacaagtgcaaaatacagacttgtgtgccatgagagatctgtgtctctggaagttaataatctggaattagaagatactgcaaattacacatgcaaagtgtcaaatgtagcaggagatgatgcatgcagtggcatcttaactgtgaaagaaccaccaagcttcctagtgaaacctgggcgacagcaagccatacctgattctacagtggaatttaaggcaatactaaaaggaacaccaccatttaaaataaaatggtttaaggatgatgtggaacttgtctcaggtcctaaatgtttcattggcttggaagggtcgactagcttcttaaatctctactcagtggatgcttctaagactggacagtatacttgccatgttaccaatgatgttggtagcgactcttgtactacgatgttgcttgtgacagaaccaccaaagtttgtaaagaaattagaagcctccaaaattgtgaaagcaggtgactcttcacgacttgaatgcaagatagctggatccccagaaatcagagttgtgtggttccgaaatgaacatgaacttccagccagtgataagtacagaatgactttcattgactcagtggccgtcatacagatgaacaatctcagtactgaggacagtggagatttcatttgtgaggctcagaatcccgctggcagcacaagctgcagtaccaaggttatagtaaaagagccacctgtttttagcagcttccctcctatagtagaaacccttaaaaatgctgaagtcagtcttgaatgtgaactttcgggaacaccaccgtttgaggtggtatggtacaaagacaagcggcaactcagaagcagcaagaaatacaagattgcatccaaaaacttccacacaagtattcacattctcaatgtggacacttcagacatcggtgaataccactgcaaagcacagaatgaagtgggaagtgatacttgtgtttgtactgtaaaattgaaagaaccaccaagatttgtctccaaactgaacagcctcactgttgtagccggagagcctgctgaattacaagcatccatagaaggcgcccagcctatttttgtccagtggcttaaagagaaggaagaagtgattagagaaagtgaaaacatcaggattacatttgtggaaaatgttgcaactctacagtttgcaaaagcagagccagctaatgctggaaagtatatctgccaaatcaagaatgatggtggaatgagggagaacatggccacactgatggtcttagagcccgcagtcattgttgagaaggcaggaccgatgacggtgactgtaggagaaacgtgcactctggagtgtaaggtggctggcactccggaactctctgttgaatggtacaaggatggaaagctgttgaccagcagccaaaaacacaaatttagcttctacaacaaaatctcttccttaaggattctctcagttgaaaggcaagatgcaggcacatacactttccaggttcaaaataatgttgggaaaagcagctgcacagctgtggttgatgtttcagaccgagcagttcctccctctttcacacgaagactgaaaaatactggtggggtgttaggtgcttcttgcatcttggaatgcaaagtagctggatcatcacctatttcagttgcctggtttcatgagaaaaccaagattgtcagtggagcaaagtaccaaaccacattttcagataatgtctgcacattgcagttgaattctctggattcctcagatatgggcaattacacatgcgtggctgctaatgtcgctgggtctgatgaatgtcgtgcagtgctaactgtacaagaaccaccctcttttgtgaaagaacctgaacctttggaagtactaccaggcaaaaatgtaaccttcacaagcgttattagaggaacccctccattcaaagtcaactggttcagaggtgccagagaactagtgaaaggagaccggtgcaacatctattttgaagacactgtggcagaactggaattatttaatattgacatatctcagagtggggaatacacctgtgtggtttctaacaacgctggccaagcatcttgcactacccgtctctttgtgaaagaaccagctgcatttttgaagagattaagtgatcattctgtagaaccagggaagtccataattctggagagcacctacactggaacacttccaatttctgtcacttggaaaaaggatggttttaacataactacctctgaaaaatgtaacatagtcacaacagagaaaacttgtatcctggaaattctgaatagcacaaaaagagatgcagggcagtattcctgcgagattgaaaatgaggcaggaagggatgtttgtggagctctggtatctacattagaaccgccttattttgttacggaactggaacctctggaggcagcagttggagattcggtttctttacaatgccaagttgctgggacaccagaaattacagtgtcttggtacaaaggagataccaaattacggccaactcctgaatacaggacctactttacaaacaatgtggccacacttgtttttaataaagtgaacatcaatgacagtggagagtacacatgcaaagcagaaaatagtataggaactgcttcttctaagactgtgttcagaattcaagagcgccaactcccaccttcttttgcaagacaattaaaggacattgaacaaactgtggggttacctgttacactcacttgtcgattaaatggctctgcacccatccaagtgtgctggtatagagatggagtacttttaagagacgatgaaaatctacagacttcatttgtagataatgtggcaactttaaaaattttgcaaactgacttgagtcactctggccagtactcttgctcagcttccaacccacttggaacagcatcttctagtgctagactcacagcaagagaacccaagaaatctcccttctttgacatcaagcctgtatctatagatgttattgctggagaaagtgctgattttgagtgtcatgttactggtgctcaaccgatgcgaatcacttggtcaaaagataacaaggagatccgtcctggaggaaactatacaatcacatgtgtgggaaacactcctcatttgagaattcttaaagtaggcaaaggagactctggtcaatatacttgccaagcaaccaatgatgttggcaaagacatgtgctcagctcagctcagtgtaaaagaacctccaaagtttgttaagaaattagaagcttcaaaagttgcaaagcagggagaatccattcaactggaatgtaaaataagtggctccccagaaatcaaagtttcatggttccgaaatgacagcgaacttcatgaaagttggaaatacaacatgtcattcattaattctgtggcattgcttacgatcaatgaagctagtgctgaagacagcggggactacatttgtgaggctcataatggtgttggtgacgccagctgcagcacagcgttgacagtgaaagcacctcctgttttcacccagaagccttctccagtaggagctcttaaaggttctgatgtgattctccaatgtgaaatttcgggaactcccccatttgaagtagtatgggttaaagatcgaaagcaggttagaaacagcaagaaatttaaaatcacttcaaaacattttgatacaagtcttcatatccttaatcttgaagcctccgatgtcggggaatatcactgcaaagctactaatgaggtgggaagtgacacgtgttcttgctctgtcaagttcaaagaacctccacgattcgtgaaaaagctaagtgacacctcaacccttattggggatgctgttgagttacgggccatagtggagggcttccagccaatttctgttgtctggctgaaagatagaggtgaagtcatcagagagagtgaaaataccaggatttcattcattgataacattgcaaccctccagctggggagtccagaagcatctaattctggaaaatatatatgccaaatcaaaaacgatgctggaatgagagaatgctctgcagtcttgactgtactagaaccagcaagaatcatagagaagcccgaacccatgactgtcactactggaaatccttttgcattagagtgtgtagtgactggaacaccagaactctcagccaagtggttcaaagatggaagagaattgtctgcagacagcaaacatcacattacattcatcaataaagtggcttcccttaaaatcccctgtgccgaaatgagtgacaaaggattatatagctttgaagtgaaaaacagtgttggcaaaagtaactgcactgtatccgtccatgtttctgatcggattgtgcctccttccttcatccgcaagctgaaagacgtgaatgccatcctgggggcctcagttgttttggagtgccgagtctctggctcagccccgatttcagttggctggtttcaggatggaaatgagattgttagtgggcccaaatgtcagtccagcttttcggaaaacgtctgtactttgaatctgagcttgttggagccctccgacacaggcatatacacgtgtgtggctgccaatgtagctggttccgatgagtgctcagcagtcctgactgtgcaagaaccaccatcttttgaacaaacccctgattctgtggaagttttgcctggaatgagcctcacattcaccagtgtcatcagaggcacccctcctttcaaggtcaagtggtttaaaggcagcagggaactggtgcctggggagtcatgcaacatctctctggaagattttgtcacagaactggagttgtttgaggtgcagccattagaaagtggagactattcttgcctcgttacaaatgatgctggcagtgcttcctgtaccacacatctttttgtgaaagaaccagccacctttgtgaaaagattggctgatttcagtgttgagacaggaagccccatagttctcgaggccacatacactggcacacctccaatctcagtgagctggataaaggacgagtatcttatttcacaatctgagagatgcagtattactatgacagaaaaatctaccatactggaaattcttgagagcacaatagaggattatgcacagtacagctgcctgatagaaaatgaggctggtcaagatatctgtgaagctctggtgtctgtcttagaaccaccgtactttattgaacctctggaacatgtggaagcagtcattggagaacctgcaactttacagtgtaaagtggatggaactccagaaattagaatttcttggtataaagaacacacaaagctacgatcagctcctgcatataaaatgcaattcaaaaataacgttgcttccttagtaatcaacaaagtggatcacagtgatgtgggagagtattcatgcaaggcagacaacagtgtgggggcagtcgcttcttcagctgtgcttgttatcaaagcgcgcaaacttccacctttctttgcaagaaaactgaaagacgttcatgagactctaggcttcccagttgcatttgaatgccgcatcaatggctcagaacctcttcaagtgtcttggtacaaggatggggttcttttgaaagatgatgctaatttgcagacatcttttgttcataatgtagcaactcttcagattttacaaactgaccagagccacatagggcagtataattgctctgcttctaatcctcttgggactgcttcatccagtgccaagctcattctctcagagcatgaagtgcctcctttctttgatctaaagcctgtatcagtagatcttgctcttggagaaagtggtacttttaaatgtcatgtaactgggactgcaccaatcaaaatcacttgggccaaagataaccgagagattcgccctggaggcaactacaagatgactttggtagaaaatactgccactctgacagttctcaaagtaggcaaaggcgatgccgggcagtacacctgctatgcaagcaacatcgctggaaaagactcttgttctgctcagctgggtgtacaagaaccacccaggttcattaagaagctagaaccttcaagaattgtgaaacaggatgaattcacaaggtatgaatgcaaaatcggtgggtctccagaaatcaaagttttatggtataaggacgagactgaaattcaagagagcagtaaattcagaatgtcattcgttgactcggtggctgtgctggaaatgcacaatctcagtgttgaagacagtggagactacacctgtgaggcccacaatgcagcaggcagtgccagcagcagcacatccttaaaagttaaagaaccacccattttccgcaaaaagcctcatcctatagagacactgaaaggagctgatgttcaccttgaatgtgagcttcagggcactcccccatttcacgtttcttggtataaagacaagagagaacttaggagcggcaagaagtacaagataatgtctgagaacttcctaaccagtatccacatcctgaatgtcgatgctgcagacattggggaatatcagtgtaaagccacaaatgatgtgggaagcgacacttgcgttggttccatcgctctcaaagcaccaccaagatttgtgaagaagctcagtgacatatctactgtcgttggtaaagaagttcagctgcagactaccattgaaggcgctgaacccatttcagtggtgtggttcaaagataagggagaaatcgttagagaaagtgacaacatatggatttcttattcagaaaacattgcaaccttacagttttcaagagtggaaccagccaatgctggaaaatacacttgtcagatcaaaaacgatgctgggatgcaagagtgcttcgccacgctatccgttctcgagcctgcaacaattgtagaaaagccagaatccataaaagttaccacgggagacacctgtaccttggagtgtacagtagctggcacccctgaactcagtactaagtggtttaaggatggaaaagagctaacaagtgacaacaaatacaaaataagcttcttcaacaaagtatccggccttaagatcatcaatgtagcaccgagtgacagtggggtatacagttttgaggtgcagaaccctgttggcaaagacagctgcacagcttcattgcaggtttcagaccgaaccgttcctccttcattcacaagaaaattgaaagagacaaatggtctatccggctcctcagttgtaatggagtgtaaagtctatgggtcacctccaatctctgtctcctggttccatgaaggaaatgagatcagtagtggaaggaaataccagaccaccctgacagataatacttgtgctttaactgtgaacatgctggaagaatcagacagtggtgactacacatgtatagctactaatatggctggttctgatgaatgtagtgctcctttgactgtgagagaaccaccatcttttgttcagaaacctgatcccatggatgttttaactgggaccaatgtaactttcacaagtatcgtaaaaggaacacctcctttcagtgttagctggttcaaaggtagcagtgaactagtaccaggtgacagatgcaacgtgtctttggaggattcagttgctgaactggagttgttcgatgtagatacatcacaaagtggagaatatacttgcatagttagcaatgaagctggcaaggcttcttgtacaacacatctctacataaaagccccagccaaatttgtgaagaggctgaatgattacagcatagagaaaggaaaacccctgatcctagagggtacattcactggaactcctcccatttcggttacctggaagaaaaatggcataaatgtaactccttctcagaggtgtaatataactacgactgaaaaatcggcaatcctggaaattccaagtagcacagtagaggatgcaggacaatacaactgctacattgaaaatgcctctggaaaagattcctgttcagcacaaatactcatactagaaccaccgtattttgtcaagcagttggagccggttaaggtgtctgttggagattctgcctctctacaatgccagcttgctggaacccctgaaattggggtatcctggtataaaggagatacaaaattgagacccactacgacttacaaaatgcattttaggaataatgttgctacactggttttcaaccaggttgatattaatgatagtggagaatatatctgcaaagctgaaaacagcgtgggagaagtttctgcatcaactttccttaccgttcaagagcaaaaacttccaccatcattttctcgacaattgagagatgttcaagaaacagttggactgccagttgtttttgattgtgccataagtggatcagaacctatctccgtgtcttggtataaagacggcaagccattgaaagacagcccaaatgtacaaacatcatttttagacaatacagccacactcaatatttttaaaactgaccggagccttgcaggccagtattcctgcacagctacaaaccctataggctctgcttcttccagtgccaggctcattctcacagaggggaagaacccacccttctttgacatccgtcttgcccctgtggatgctgtggtgggagaaagtgctgactttgagtgccacgtcacgggcacacaaccgataaaggtcagctgggccaaagacagcagagaaatacgaagtggcggaaagtaccagattagttatctggaaaacagcgcccacctgacagtcctcaaagtagacaaaggagattctggacaatatacctgctatgctgtgaatgaagtgggaaaagactcttgcacagctcagctgaatataaaagagcggctcatcccaccaagtttcactaaaagactctcagagacagtagaagaaacagaagggaattctttcaaacttgagggacgtgtggctggttcccaacctataactgttgcctggtacaaaaataatatagagatacaaccaacttctaactgtgaaataacattcaagaacaacacgttagtgctgcaagtcaggaaagcaggcatgaacgacgctggtttgtacacatgcaaagtgtccaatgatgcaggctctgctctgtgcacgtcttcaatcgtcatcaaagaacctaagaagccacctgtatttgatcagcaccttactccagtaacagtgagtgaaggagaatacgtgcagctcagctgccatgtccagggatctgagccaattaggatccagtggttgaaggctggcagggaaataaagccttcagacagatgcagcttcagctttgctagtgggacagctgtactggaactcagagatgtggctaaagcagattcgggagattatgtgtgtaaagcttcaaatgtggctggaagtgacactaccaaatcaaaagtgaccattaaagacaaaccagctgtggccccagcaaccaagaaagctgcggtagatggaagactcttttttgtgtcagaacctcagagtatcagagtcgtagaaaaaaccactgcgaccttcattgcaaaagttggaggtgacccaatcccaaatgttaaatggacaaaagggaagtggagacagctgaaccaaggaggtcgtgttttcatccaccaaaaaggcgatgaagcaaaactggagattagggacaccacaaaaactgattctgggttataccgatgcgtggcatttaacgaacatggtgaaattgaaagtaatgttaacttacaggtggatgaaaggaagaaacaagagaaaattgaaggcgatcttagagcaatgctgaaaaagactccaatcttaaagaaaggagctggagaagaagaggaaattgatatcatggaacttctcaaaaatgttgatcctaaagaatatgaaaaatatgcccgcatgtatggaatcactgacttccgaggtcttcttcaagcatttgaactgctcaagcaaagccaagaagaagagacacatagactggaaattgaggaaatagagaggtcagagagggacgaaaaggaatttgaggaacttgtatcatttattcagcaaagactgtcacagacagagcctgtcactctgatcaaggacattgaaaatcagacagttttgaaagataatgatgctgtctttgaaattgacattaaaattaattatccagaaatcaagctttcgtggtacaaaggaactgaaaaactggaacccagtgataaatttgaaataagcattgatggtgaccgacatacactcagagtcaaaaactgtcaacttaaagaccagggcaattatcgattggtttgtggtccacacatcgctagcgctaaactaactgtaattgagcctgcatgggaacggcatcttcaggatgtgactctgaaagaaggccagacttgcaccatgacatgccaattttctgtaccaaatgtaaaatctgaatggttcagaaatggcagaatccttaaaccccaaggtagacataaaacagaagtggaacacaaagtccataaattgaccattgcagatgttcgagcagaagaccagggtcagtacacctgcaaatatgaagaccttgaaacttcagcagaactcagaatcgaagctgaaccaattcagtttacaaagcgcatacagaacatcgtggtgagtgagcatcagtctgccacctttgagtgtgaagtgtcctttgatgatgccattgtaacatggtacaaaggaccaacagaactgacagagagccagaaatacaacttcaggaatgatggccgctgccattatatgaccatccacaatgtgaccccagacgatgaaggtgtctactcggtcatcgctcggctggagccaagaggtgaagcaagaagcacggcagagctgtacctaacgacgaaagaaatcaaacttgagctgaagcctcctgatattcctgactccagagttccaatcccaaccatgcctatcagagcagtgccaccagaagaaatccctcctgtggttgctcctcctatcccccttttgctaccaacacccgaagaaaagaaaccaccaccaaaacgtattgaagttaccaaaaaggctgtgaagaaagatgccaaaaaagttgttgcaaagcccaaagagatgacaccacgtgaagagattgtcaagaagcctccacctcctactaccttaattccagcaaaagctcctgaaatcattgatgtatcctctaaagctgaagaagtaaaaataatgactataaccagaaagaaagaggttcagaaagaaaaagaagctgtgtatgagaaaaagcaagcagtccacaaggagaagagagtcttcattgaatctttcgaagaaccttatgacgaactggaggtagaaccatacacagagccatttgaacaaccttattatgaagaaccagatgaagactatgaagagattaaggtagaagctaaaaaagaagttcacgaggaatgggaagaagattttgaagaagggcaagaatactatgaaagggaagaaggctatgacgaaggggaggaagagtgggaagaggcttaccaagaaagggaagtaattcaagttcaaaaggaggtctatgaagaatcacatgagagaaaagttccagccaaagtacctgaaaagaaagcaccaccacctcctaaagttataaagaagccagtaattgaaaaaattgaaaagacttctcgaagaatggaggaagaaaaagttcaagtcaccaaagtacctgaagtttcaaagaagattgttccacaaaaaccttcccggactccagtacaggaagaagttattgaagtgaaagtaccagctgtgcatacaaagaagatggttatttcagaagaaaagatgttctttgcttctcacacagaggaggaggtgtcagtcacagtccccgaggtacaaaaggaaattgttactgaagagaaaattcacgttgccatttccaaaagggttgaaccaccacctaaagtccctgagctacctgagaaaccagctccagaagaagtggcccctgttcctatccctaaaaaagtggagcccccagcaccaaaagttcctgaggttcccaagaaacccgtgccagaggagaaaaagccagttcctgtgcctaagaaggaacctgctgctcccccaaaagtcccagaggtgccaaagaaacctgtccctgaagaaaagattcccgttcctgttgcaaagaaaaaggaagctcccccagctaaagttcctgaagtacagaagggagttgtgacagaagaaaaaataaccattgtaactcaaagagaggaatctccaccaccagcagtgccagaaataccaaagaagaaagttcctgaagaaaggaaacctgttcctcggaaggaggaagaagttccaccaccaccaaaagtgccagctctgcctaagaaacccgtcccagaggagaaagttgcagtgccagttcctgtcgctaagaaagctcctcctccccgagctgaagtctctaagaaaactgttgtagaagaaaagagatttgttgctgaagaaaaactatccttcgcagttcctcaaagagtggaagtcacgcggcacgaagtatctgcagaggaggaatggagttactcagaagaggaggaaggtgtgtccatttcagtttatagagaagaagaaagagaggaggaggaagaagcagaggttacagaatatgaagtgatggaagagcctgaggaatatgttgtggaagaaaagctgcacattatttctaagagagtggaagctgagccagctgaagtgacagagaggcaggagaagaaaattgtactgaaaccaaaaattcctgctaaaatagaggagcctccaccggctaaagttcctgaagcacctaagaaaattgtgccagaaaagaaagttcctgctccagttcctaaaaaggaaaaggtgcccccacctaaagtgccagaagagccaaagaaaccagttccagaaaaaaaggttcctccaaaagtcattaagatggaagaacctctcccagccaaagtgactgagaggcacatgcaaattacccaggaagaaaaagttcttgttgctgtaactaaaaaagaggcgcctccaaaagcaagagtgccagaggaaccgaagagagctgtcccagaagaaaaagttctgaaactcaaacctaaaagagaggaggaaccaccagctaaagtgactgaattcagaaaaagagtggttaaagaagaaaaagtatcaattgaagctccaaaaagagaacctcaacccatcaaagaagtaactataatggaagagaaagaaagggcttataccctagaagaagaagctgtttcagtacaacgggaagaagaatatgaggaatatgaagaatatgattataaagaatttgaggagtatgaaccaacagaagaatatgaccaatatgaagaatacgaggagcgggagtatgaacgatatgaagagcatgaagaatacatcacagaaccagagaagcctatccctgtaaagcctgtcccagaagaaccagttcccacaaaaccaaaggccccaccggctaaagtgctgaagaaagctgtccctgaagaaaaagtaccagtgcccattcctaagaaactcaaacctccaccacccaaagtgcctgaagaaccaaagaaagtttttgaggaaaaaatacgtatttcaattaccaaacgtgaaaaagagcaggtgactgaacccgctgctaaagtgcccatgaagcccaagagggttgtcgcagaagaaaaagtacctgtccctagaaaagaagtagcaccacctgttagagtgccagaagtgcctaaagaacttgaaccagaagaggttgcctttgaagaggaagttgtaacccatgtagaagaat

SEQ ID NO: 191438 - DNA, 32767 bp, Homo sapiens
  Payload ID: 17810
  Gene Name: titin
  ENST ID: ENST00000589042
  CDS Start-End: 226-108201
gagcagtcgtgcattcccagcctcgcctcgggtgtagggattgcatagaaaagcaaaactacacagtcttgactgtgtagttttgtttttaggattagaggctcaccgattcatgtcggagatggtcagaaaaaccaactctccataggacgtcgtttcagaagcaaccttgggcttagtcccaccctttttaggcactcttgagaaatcagagtgcctagaaagatgacaactcaagcaccgacgtttacgcagccgttacaaagcgttgtggtactggagggtagtaccgcaacctttgaggctcacattagtggttttccagttcctgaggtgagctggtttagggatggccaggtgatttccacttccactctgcccggcgtgcagatctcctttagcgatggccgcgctaaactgacgatccccgccgtgactaaagccaacagtggacgatattccctgaaagccaccaatggatctggacaagcgactagtactgctgagcttctcgtgaaagctgagacagcaccacccaacttcgttcaacgactgcagagcatgaccgtgagacaaggaagccaagtgagactccaagtgagagtgactggaatccctacacctgtggtgaagttctaccgggatggagccgaaatccagagctcccttgatttccaaatttcacaagaaggcgacctctacagcttactgattgcagaagcataccctgaggactcagggacctattcagtaaatgccaccaatagcgttggaagagctacttcgactgctgaattactggttcaaggtgaagaagaagtacctgctaaaaagacaaagacaattgtttcgactgctcagatctcagaatcaagacaaacccgaattgaaaagaagattgaagcccactttgatgccagatcaattgcaacagttgagatggtcatagatggtgccgctgggcaacagctgccacataaaacacctcccaggattcctccgaagccaaagtcaagatccccaacaccaccgtctattgctgccaaagcacagctggctcggcagcagtccccatcgcccataagacactccccttccccggtcagacacgtgcgggcaccgaccccatctccggtcaggtccgtgtctccagcagcaagaatctccacatcccccatcaggtctgttaggtctccattgctcatgcgtaagactcaggcatccaccgtggccacaggtcctgaagtgcctcccccttggaagcaagagggctacgtggcctcctcatctgaggctgagatgagagagacaacgctgacaacctctactcagatcaggacagaagagagatgggaagggagatacggtgtccaggagcaagtgaccatcagtggtgctgcgggtgctgccgccagtgtgtcggccagtgctagctacgcagcagaggctgttgccactggtgctaaagaggtgaaacaagatgctgacaaaagtgcagctgttgcgactgttgttgctgccgttgatatggccagagtgagagaaccagtgatcagcgctgtagagcagactgctcagaggacaaccacgactgctgtgcacatccaacctgctcaagaacaggtaagaaaggaagcggagaagactgctgtaactaaggtagtagtggccgccgataaagccaaggaacaagaattaaaatcaagaaccaaagaagtaattaccacaaagcaagagcagatgcacgtaactcatgagcagataagaaaagaaactgaaaaaacatttgtaccaaaggtagtaatttccgcagctaaagccaaagaacaagaaactagaatttctgaagaaattactaagaaacagaaacaagtaactcaagaagcaataagacaggaaactgagataactgctgcatccatggtggtagttgccactgcaaagtccacaaaactagaaacagtcccgggagctcaagaagaaactaccacacaacaagatcaaatgcacctaagttatgaaaagataatgaaggaaactaggaaaacagttgtacctaaagtcatagttgccacacccaaagtcaaagaacaagatttagtatcaagaggtagagaaggcattactaccaaaagagaacaagtgcaaataactcaggagaagatgagaaaggaagccgagaaaactgccttgtctacaatagcagttgctactgctaaagccaaagaacaagaaacaatactgagaactagagaaactatggctactagacaagaacaaatccaagttacccatggaaaggtggacgttggaaaaaaggctgaagctgtagcaacagttgttgctgcagtagaccaggcccgagtcagagagcccagagagcctgggcatcttgaagaatcctatgctcagcagaccactttggagtacggatataaggaacgcatttccgccgcaaaggtagctgagcctccccaacgtccagcctcagaaccccacgttgtccctaaagcagtcaagcctagagtaatccaggctccttctgagactcatatcaaaactactgatcaaaagggaatgcacatatcatcacagatcaagaaaactacagatctaacaacggaaagattagtccatgtggataaacgcccccgcacagctagccctcactttactgtttcaaaaatttctgttcctaagacagaacatggatatgaggcatcaatagccggtagtgctattgccacattacaaaaagagttgtcagccacatcttctgctcagaagatcaccaaatcggtgaaggctcctactgtgaagcccagtgagactagagtaagggcagagcccacacccttgccacagttccccttcgctgacacaccagatacttacaagagtgaagctggcgttgaggtgaaaaaggaagtaggggtgagcatcactggcaccaccgtccgtgaagagcgctttgaagtactgcacggacgcgaagccaaggtaacagaaacagcaagagtaccagcacctgttgaaattcctgttactccaccaactttggtctcgggcttaaaaaatgtgactgtcatagaaggtgaatctgtcaccttggagtgccacatctctggatacccatccccgacagtgacatggtacagggaagactaccaaatcgaaagttccattgacttccagataaccttccagagtggaattgctcgtcttatgattcgcgaagcatttgcggaagacagcgggcgatttacttgcagtgctgtaaatgaggctggaaccgtcagcacatcctgctatctggctgtgcaggtgtcagaagaatttgaaaaggaaaccacagccgtgactgagaaatttactacagaagagaaacgctttgttgagtcaagagatgtggttatgactgatactagcctcacagaggaacaagcagggcctggagaacctgccgcgccttactttattacaaaaccagtggtccagaaactggtggaaggtgggagcgtggtgtttggatgccaagttggcggcaacccaaagccccatgtatactggaaaaaatctggtgttcctctaaccactggatacagatacaaagtgagttacaacaaacaaaccggtgaatgcaagctggtgatttctatgacttttgctgatgatgctggagaatacactattgttgttcgcaataagcatggagaaacttctgcatctgcttccttgcttgaagaagctgattatgagttactgatgaagtcccagcaagaaatgctttatcagacacaagtgactgcatttgttcaagaacctaaagttggagaaacagcacctggatttgtatactctgagtatgaaaaagagtatgaaaaagaacaagccttaattaggaagaaaatggccaaagatactgtagtggtcagaacttatgtagaagatcaggaattccatatttcttcctttgaagagagacttattaaagaaattgaatatagaataataaagactacattagaagaacttcttgaagaagatggagaagaaaagatggcagttgacatttctgaatctgaagctgttgaatcaggatttgattcaagaatcaagaattatagaattcttgaggggatgggtgtcacttttcattgcaagatgtctggatatccattaccaaagattgcttggtacaaagatggcaagcgcatcaaacatggagaaagataccaaatggactttctacaagatggcagagctagtctgcgtatacctgttgttcttccagaagatgaaggaatctacactgcatttgccagcaatattaaaggaaatgcaatttgctcagggaaattgtatgtggagcctgctgcaccacttggagctccgacttacattcccacactagagccagtgagcagaatcagatctctctctccacgttcagtgagcaggtctcctatacgcatgtctcctgcacggatgtcacctgcaaggatgtctcctgcacggatgtcccctgcaagaatgtcccctggacgtaggctggaggagacagatgagtcacaacttgagagactatataaaccagtctttgtgttaaaacctgtttctttcaaatgtttagaagggcaaactgccagatttgacttaaaggttgttggtagacctatgccagagacgttctggtttcatgatggccagcaaattgtcaatgactatacccataaagtagtcattaaagaagatggtactcaatcactaattattgtccctgccacacccagtgattctggggaatggactgtggttgcccaaaacagggcaggcagatcttcaatttcagtgattttaactgtggaagctgtggaacatcaggtaaaaccgatgtttgtagaaaaactgaaaaatgtcaatataaaggaaggttcccgacttgaaatgaaagtcagagctacgggtaaccccaaccctgacattgtatggttgaaaaacagtgacatcattgtgcctcataaatatcccaaaatcagaattgaaggaaccaagggagaagctgcccttaaaatcgattccactgtcagccaagattctgcctggtatactgcgactgctattaataaagctggcagagacactacaagatgcaaagtaaatgttgaagttgagtttgcagagcctgagccagagagaaagttaatcatcccacgggggacatatagagcaaaggagattgcagccccagaactggagcccctccatttgcgatatggccaagagcaatgggaagaaggtgatctctatgacaaagagaaacaacagaaaccatttttcaagaaaaaactcacttccttaagacttaagcgctttgggcctgcccactttgaatgcaggctaacacccattggtgacccaacgatggtggtggagtggctccatgatggaaagccacttgaagcagccaacaggctccgtatgatcaatgaatttgggtactgcagccttgattatggcgttgcatattctagagacagtggtatcattacttgcagagccactaacaaatatggaacagatcacacatctgctacccttattgttaaagatgagaaaagtcttgtggaagaatcccaattgcctgaggggaggaaaggcttacagagaattgaagaattagagagaatggctcatgaaggtgcacttacaggtgtaacaacagatcagaaagaaaagcaaaagccagacattgtcttgtacccagagccagttagagtacttgaaggggagactgcaaggttccgctgcagggtaacaggctaccctcagcccaaagtcaactggtacctcaatggacagctcatccgcaaaagcaaaaggttcagagttcgctatgatggtatccattacctggacatcgtggactgcaaatcatatgacacaggtgaagtgaaggtcaccgcggaaaatcctgaaggtgtgatagagcataaagtgaagcttgagattcaacagagggaagattttaggtctgtccttaggagagctcctgaaccaaggcctgagtttcacgtacatgaaccaggaaagcttcagtttgaagtacaaaaagtggatagacctgttgacaccactgaaaccaaagaagttgtgaagttgaaaagggctgaaagaattacccatgaaaaagtgcctgaagagtcggaagagctgcgcagtaaattcaagcgcagaacagaagagggctattatgaagccattaccgctgtggagctcaagtctcgaaagaaggatgaatcctatgaggaactcctcaggaagacaaaagatgaacttctccactggaccaaagagttaactgaagaggaaaagaaagctcttgccgaagaaggcaaaatcacgattccaacttttaaacctgacaagattgaactaagtcctagtatggaggctccaaaaatcttcgaaagaatccagagccaaacagtgggccaaggatctgatgcacacttccgggtcagagtcgtggggaaaccagaccccgaatgtgaatggtacaaaaatggtgtcaaaattgaacggtctgaccggatctactggtactggcccgaagacaatgtttgtgaattggtcataagagatgtgactgctgaggactctgccagcatcatggtaaaagccatcaacatagctggagaaacctccagtcacgcattcttacttgtccaagccaagcaattgatcactttcacacaggaattacaagatgttgttgctaaggaaaaagacactatggcaacctttgaatgtgaaacttcagaaccatttgtcaaagtgaaatggtataaagatggtatggaggttcatgagggagataaatacaggatgcactctgacagaaaggttcacttcctctccatactgaccattgatacgtctgatgctgaagattacagctgtgtacttgtggaagatgaaaatgtcaaaacgactgctaaacttattgttgaaggtgcagttgttgagtttgtgaaagaacttcaggacatagaagttccagaatcatattcaggagaattagagtgcattgtatccccagaaaatatagaaggaaaatggtatcataatgatgtggagcttaaatccaatggcaaatatacaattacatctcgtcgtggacgtcagaacctcacggtcaaggatgtaaccaaggaggaccagggagaatacagctttgtcatcgacgggaaaaagacaacctgtaaattaaagatgaaaccccgccccattgctatcctacaaggacttagtgaccaaaaagtctgtgagggtgacattgttcagcttgaagttaaagtctccttggaaagtgtggaaggcgtctggatgaaagacggccaagaagtgcagcccagtgacagggttcacattgtgatagacaaacaatctcatatgctgctcattgaagacatgactaaggaagatgctggaaattactctttcaccattccagcccttggcctctccaccagtgggcgtgtctctgtctatagtgtggacgtgataacacctctaaaagatgttaatgtgattgaaggcaccaaggctgtgcttgaatgtaaggtgtcagtccctgatgtgacttctgttaagtggtacttaaatgatgaacaaatcaagcctgatgaccgtgtacaggccattgtgaaaggtactaaacagcgactagtcattaaccgaactcatgcttcagacgaaggaccttacaagctgatagttggcagagttgaaaccaactgtaatctctctgtagaaaaaattaaaattatcagaggtcttcgtgaccttacctgtacagaaactcaaaatgtggtgtttgaggttgagctgtcccactctggaattgatgtcctgtggaattttaaggacaaggaaatcaagcccagttctaaatataaaattgaagcacatggaaaaatatataaattgacagttctaaatatgatgaaagatgatgaaggaaaatacacattttacgcgggagaaaatatgacatctggaaaacttactgtggcaggtggggccatctccaagccactcacagatcagaccgtagctgaatcccaggaagctgtgtttgaatgtgaagttgccaacccagattccaaaggcgaatggttgagggatggcaaacacctaccactgactaacaacatcagaagtgagtctgatggccacaaaaggagacttatcattgctgccaccaaattagatgacattggagaatatacctacaaggtggccacctccaaaacatctgccaaactcaaagttgaagctgtcaaaattaagaagactctgaagaacctcacagtgacagaaacacaggatgctgttttcactgtcgagcttacacaccctaatgtcaaaggtgtccagtggatcaaaaatggagttgtgctggaatccaatgaaaagtatgctatctctgtcaaaggaacaatttactctctgaggattaaaaactgtgccatcgtggatgagtctgtttatggcttcaggcttggaaggcttggagccagtgccagactgcacgtggagactgtcaagatcattaaaaagccaaaggatgtgacagccttggaaaatgccactgttgcctttgaagttagtgtttcccatgacactgttccagtaaaatggttccataagagtgtggaaattaagccaagtgacaaacacagactggtctcagaaaggaaagtccacaagctgatgctgcagaacatctccccctcagatgctggggaatacacagctgtggtcgggcaattggaatgcaaagcaaaactgtttgtggagacattacatattacaaaaaccatgaaaaatatcgaggtgcctgagaccaaaactgcctcttttgagtgtgaggtgtcccacttcaatgtcccttccatgtggctgaagaatggtgtggaaattgagatgagtgaaaagttcaagatagttgtgcagggaaaactccatcagctgatcatcatgaacaccagcacagaggactcggcagaatacacatttgtctgtggcaatgaccaagtcagtgccaccctgacagtcaccccaatcatgattacttccatgctgaaagacatcaacgctgaagaaaaagacactattacttttgaggtgacagtgaactatgaaggcatctcttacaaatggttaaagaatggtgtggaaatcaaatcaactgacaagtgccagatgagaaccaaaaagctcacacactcactgaacatcaggaatgttcactttggggatgctgctgactacacctttgtggctggaaaagcaacatcaacagccacactttatgtggaagctcgtcatatagaatttaggaaacacattaaggacattaaggtactggagaagaagcgagccatgtttgaatgtgaagtttctgaacctgacatcactgtacagtggatgaaagatgaccaggaactgcagatcacagacagaataaagattcagaaggagaaatatgtccaccgccttctgatcccatccacccggatgtctgatgctgggaagtacacagtggtggcaggaggcaacgtgtcaactgcaaaactctttgtagaaggcagagatgttcgcatccgaagtattaaaaaggaggttcaggtcattgagaaacagcgtgctgttgttgaatttgaggtcaatgaagacgatgttgatgcccactggtataaagatggcattgaaatcaatttccaagttcaagaacgacacaaatatgtagtggaaagaagaatccaccgaatgtttatctctgagaccagacagagcgatgcaggagaatacacctttgtggcaggaaggaacaggagttctgtcactctctatgtcaatgctcctgaaccgccccaagttctgcaggagctccagcctgtcactgtgcagtctggcaagcctgcccgcttctgtgccgtgatatccggaagaccacagcccaaaatttcctggtacaaggaagagcagctgctttccactggcttcaagtgcaaatttcttcatgatgggcaagaatacacgcttttgctaattgaagccttcccagaggatgcggcagtctatacctgtgaagccaagaatgactatggtgttgccacaacatcagcttcactctcagtggaagttccagaagttgtgtctcctgatcaggaaatgcctgtttatccacctgccatcatcaccccgcttcaggacactgtcacttctgaagggcagccagcccgttttcaatgccgggtttctggaacagatctaaaagtgtcgtggtacagcaaagacaagaaaatcaagccatctcggttctttagaatgactcaatttgaagacacttatcaactggaaattgccgaagcttatccagaagatgaaggaacttacacgtttgttgctagtaatgctgtaggccaagtatcaagcacagccaacctgagtctggaaggatttagcaaatttgaagaaaatacatcaaactcccaatggcatgtctctttatcagtttcatttaagaaggagccccttggccaaaagcccagcttcatccagcctctgtcaagcctcagggtgcacaacggggagacagtcagatttcatgcgagggtttctggcattcccaagccagaaatccaatggtttcataaccagcagctaattctaccaacaaaagatgtagttttccattttgaggagtccacaggcatggctttaatgcttatagttgatgcttactcagagcatgctgggcagtactcttgcaaagcagccaatagtgctggggaagccacttgtgcagctacactcacagtgactccaaaagtgcaagccctagataggcaaagttctgggaaagatgtaagagagtccaccaagtcccaggcagtggcagattcctctttcacaaaggaggagagcaaaatatctcaaaaggaaattaagtcatttcaaggatcatcatatgaatatgaagtgcaggtttttgaaagtgtatctcaaagttccatccacacagctgcatctgttcaagatacacagttgtgccatactgcatccctttcacaaattgcagaaagcactgagctatctaaggaatgtgctaaagagtccacgggtgaggcgcccaagattttcctgcatcttcaggacgtcactgtaaagtgcggtgacacggctcaattcctctgtgttttaaaagatgattctttcattgatgtaacctggactcacgaaggtgcaaagatagaggaatccgagagactgaaacaatcacaaaatggaaatattcagtttcttaccatatgtaatgttcagctggtagaccaaggactatacagctgcattgtacacaatgactgtggagagaggacaacgtcagcagtactaagtgtagaaggtgctcctgaatcaattttgcatgagaggattgaacaagagattgagatggaaatgaaagagttttctagttcttttctgtctgccgaggaagaaggacttcatagcgccgaacttcaattatctaaaataaatgaaacacttgaacttttgtctgaatctccagtttacccaactaaatttgattccgaaaaggaaggcactggcccaattttcatcaaagaagtgtcaaatgctgatataagcatgggggatgtggctacactgtctgtaactgtcattggcatccccaaacctaaaattcagtggttctttaatggagtgctattaaccccttctgctgactacaaatttgtttttgacggtgatgatcatagcctgatcattctgttcaccaaattggaggatgagggagagtatacatgtatggccagtaatgactatggaaagacaatatgtagtgcctatctaaaaattaattccaaaggagagggtcacaaagacactgaaacagaatcagcagtggcaaaatctctggaaaagctgggaggtccttgtcctcctcacttccttaaggagttaaaaccaattcgctgtgctcaagggcttcctgccatctttgagtacacagtggttggagagcctgcccctactgttacatggttcaaagaaaacaagcagctttgcaccagtgtttattacactatcattcataaccctaatggctctggaactttcattgtcaatgaccctcagagggaagacagtggcctctatatctgtaaagcagagaatatgttgggtgagtccacctgtgcagcagagctgcttgtgcttctggaagacacagacatgactgataccccctgcaaagcaaagtccacaccagaggctcctgaggattttccacagacacccttaaagggtcccgcagttgaagcacttgactcagagcaggaaattgcaacgtttgtaaaagacaccattttgaaagctgctttaattacagaagaaaaccagcaactatcttatgagcatattgctaaagccaatgaattgagcagtcagcttcctttgggagctcaggaattgcaatccattttggagcaagacaagctcactcctgaaagcaccagggaatttctttgcatcaatggcagtattcactttcagcctctcaaggaaccatctcccaacctacagctgcagattgtacagtcccagaaaaccttctccaaagaaggtattctaatgcctgaagagcctgagacacaggcagttctatcagataccgagaaaatcttcccaagtgccatgtccatagaacaaattaattcattaacagttgagcctctgaaaactttattagctgaacctgaagggaattatccacagtcttcaatagaacctccaatgcattcttatctaacctctgtggctgaggaagtactttcaccaaaagaaaagacagtatctgacaccaacagagagcaaagagtgactcttcaaaagcaagaggcacaaagtgcgctcatcttgagtcagagcttagctgagggacacgtggagagtctccagagtcctgatgtcatgatctctcaggtaaactatgagcccctagtcccttcagaacactcatgcacagaaggaggtaaaattttgatagaaagtgcaaatccactggaaaatgcagggcaagattctgcggtcagaattgaggaaggcaagtccttaagatttccactagcacttgaagaaaagcaggtactgctcaaagaagagcattctgacaacgtggtgatgcccccagaccaaatcattgagtctaaaagagagcccgtggcaataaagaaagtgcaggaggtacagggaagggaccttctttctaaggaaagcttgctttctggtattccagaagagcagagattaaacctgaaaattcaaatctgccgggctttgcaagcagccgtggccagcgagcagccaggtcttttctctgagtggctaagaaatattgaaaaggtggaggtcgaggctgtaaacatcacccaagagcccagacacatcatgtgcatgtaccttgttacttcggcaaagtctgtaacagaagaagtaaccatcattattgaagatgttgatcctcaaatggctaacctgaaaatggaacttagggatgctttgtgtgctattatatatgaggaaatagacatcctaacagctgagggtcctagaattcagcaaggagccaaaacaagtttgcaagaagaaatggattctttttcaggttcacagaaggttgaacccattactgaaccagaagttgaatctaaatatctgatctcaactgaagaggtcagttattttaacgtgcaaagtagggttaaatatttggatgccacacctgtcactaaaggggttgcttcagctgttgtctctgacgaaaaacaagatgagagtctgaaaccatcagaggaaaaagaggagtcttcctctgaaagtggtactgaggaggttgctacagtaaagatacaggaagctgagggtggcttaatcaaagaggatggccccatgatacatacacctttagtggacactgtttctgaggaaggtgatattgtacacctcacaacatccataacaaatgctaaagaggtgaattggtattttgagaataaactggtgccttcagatgaaaagttcaagtgtttacaagatcaaaatacatatacgctagtcatcgacaaagtaaataccgaagaccatcaaggagagtatgtctgtgaggccttgaatgacagcggaaaaacagcaacttcagccaaactcactgtagtaaaaagagctgccccagtgatcaagaggaaaatcgaacccctggaagtagcactgggccacctagccaaattcacctgtgagatccaaagtgctcccaatgtccggttccagtggtttaaagctggccgagaaatttatgagagtgacaagtgttctattcgatcttcaaagtatatctccagccttgaaatcctgagaacccaggtggttgactgcggcgagtatacatgcaaagcttccaatgagtatggcagtgtcagctgtacagccacactaactgtgacagaggcatatccaccaacctttctctccagacctaagtcccttacaacttttgtgggtaaggcagccaagttcatctgcacagtgacagggactcctgtgatagaaaccatttggcagaaagatggtgctgcactctcaccttcacctaactggaggatttccgacgcagaaaacaaacacattttagaactctcaaaccttaccattcaagatagaggagtttattcttgtaaggcttccaacaagtttggagcagacatctgccaagcagagttgatcatcattgataagccacatttcattaaagaattagagcctgtgcagtccgctatcaataagaaggtccaccttgagtgccaagtagatgaagacagaaaagtcacagttacgtggagcaaagatgggcaaaaactccccccagggaaagattataagatctgttttgaagataaaatagcaacacttgagattcctttggccaaactgaaagattcaggaacctatgtctgtacagcttcaaatgaggctggaagcagctcctgctcagccacagtcactgtcagagagccaccatccttcgtgaagaaggtggatccctcttatttaatgctcccaggtgaatcagcacgcctccattgcaagctgaaaggctcacctgtgatccaggttacttggtttaaaaataacaaagaactcagtgaaagtaacacagtccgaatgtattttgtcaattctgaggctatacttgatattacggatgtaaaagttgaagacagtgggagttactcatgtgaagcagtgaatgacgtcggcagtgatagctgcagtactgaaatagttatcaaagaacctccttctttcatcaaaactcttgagcctgcagacatagtgagaggaacaaatgctctacttcagtgtgaagtctcaggcactggaccatttgaaattagctggttcaaagacaagaaacaaattcgaagtagtaaaaaatacagattgttttctcagaagtctcttgtgtgtctggagatcttttcgtttaatagtgcagatgttggtgaatatgaatgtgttgttgctaatgaagtcggcaagtgtggctgcatggcaacccacttactcaaagaacctccaacctttgtaaagaaagtagatgatttgattgcactaggaggacaaaccgttaccctgcaagctgctgtgagagggtcagagcccatttctgtcacatggatgaaaggtcaagaggtcatcagagaagacggaaaaatcaaaatgagcttttccaatggtgttgcagtcttgataatccctgatgttcagattagttttggaggcaaatacacgtgcctggctgaaaatgaagctggaagccaaacatctgttggggaattaatagttaaagaacctgccaaaatcattgagcgagcagaactgatccaggtgacagcaggagatcccgccacactggagtacacagtggcaggcacgccagaactgaagcccaaatggtacaaagatgggagacccttggtcgccagtaaaaaataccgaataagttttaaaaacaatgttgcccagctcaaattttattcagctgagctgcacgacagtggccaatacacatttgagatttccaatgaagtgggcagcagctcctgtgagactacattcactgtattagatcgagacattgctccattttttaccaaacccttgcgcaacgtggatagtgttgttaatggtacctgcagactggactgcaaaattgcaggctccctccccatgagggtgtcctggtttaaggatggcaaagaaatagctgcttctgacagatacaggatagcatttgtggaaggcacagcctctttggagatcatcagagtagacatgaatgatgcagggaatttcacttgtcgagccacaaattccgtgggaagcaaagacagcagtggagccctgattgtgcaagaaccacccagttttgtaactaaacccggctcaaaggatgttctgcctggctcagcagtctgcctgaagagcactttccaaggatctactcctctcacaatcagatggtttaagggcaacaaagagctggtttctggtggaagctgctatattaccaaagaagctttagagagttccctggaactctatttagtaaaaacctctgattcgggcacgtacacatgtaaagtcagcaatgtcgctggaggggtggaatgcagtgcaaacttgtttgtaaaagaacctgccacatttgttgaaaagttagagccatcacagctgttaaagaagggagatgccacccagctagcctgcaaagtaactggtacccctccaattaaaataacatggtttgcaaatgatagagaaattaaggagagcagcaaacacagaatgtcttttgtggagtctactgcagttctaagactgacagatgttggcatcgaagacagtggtgaatatatgtgtgaggcccaaaatgaggctggcagtgaccactgcagtagcattgtaatagtcaaagagtcaccttattttaccaaggaatttaagccaattgaagtcttaaaggagtacgatgtcatgttgctggctgaggtggcaggcactcctccctttgagatcacttggttcaaagataacacaatcctgcgaagtggtagaaagtataagactttcattcaggatcatctggttagcctgcagatcctcaagtttgtagctgcagatgctggcgaataccagtgtcgggtgaccaatgaggtgggcagcagcatctgcagtgccagggtgactttaagagaacccccatccttcataaagaagatcgagagtaccagctccctccggggaggcacagctgccttccaggccactctgaagggctccttgccaattacggtgacttggctaaaagacagcgatgaaatcactgaagacgataatataagaatgacctttgagaacaatgtggccagtttgtacctcagtggcattgaagtcaagcatgatgggaaatatgtctgtcaggccaaaaatgatgcaggaatacaaagatgttctgcattactctcagtaaaagaacctgcaacaatcaccgaggaagctgtgtctatagatgtcacccaaggagacccagccactttgcaggttaaattttcagggactaaggagattacagccaaatggtttaaagatggccaagaactgaccctgggctcaaaatataaaatcagtgtcactgatacagtctcaatactgaagattatttctacagaaaagaaagatagtggagaatatactttcgaggtccaaaatgatgttgggaggagcagctgcaaggctagaattaatgtattagatcttatcatacctccttcattcaccaaaaagctgaagaaaatggacagcattaaaggttctttcattgatttagaatgtatagtggctgggtcacatcccataagcatccagtggttcaaagatgaccaagaaatatcagctagtgaaaagtacaaattctcttttcatgacaatactgccttcttggaaatcagccagctggaaggtacagacagtgggacatacacttgttctgccacaaataaggcagggcacaaccaatgcagtgggcatctgacagtcaaagaacccccttactttgtggaaaagccacagtcacaagatgtcaatcccaacacaagggtacagttaaaggctcttgtgggtggcactgcacccatgacaataaagtggtttaaagataacaaagagttacactcaggagcagcccgctcagtttggaaggatgacacctctaccagtctagagctctttgcagccaaagctaccgattctggaacctacatttgccaactaagcaatgatgttggcacagcaaccagcaaagccactctctttgtaaaagaacctcctcaattcattaagaagcccagtccagtcttagtgctgaggaatggacagtcaacaacatttgaatgccaaataacaggcactcctaaaatccgagtgtcttggtatctagacgggaatgaaataacagccattcagaaacatggcatttccttcattgatggtttagccactttccagatttctggtgccagggtagaaaatagtgggacttatgtgtgtgaagctcgaaatgacgcaggcacggcgagctgcagcattgaactcaaagtgaaagaaccccccacctttatcagagagctgaagcctgtggaggtagtaaaatatagtgacgtggagctggagtgtgaagttacgggaacacctccgtttgaagtcacttggctgaagaataacagggaaattcgaagcagcaaaaaatacacattgaccgacagagtgtctgtgtttaacctccatataaccaagtgtgacccttcagacactggggaataccagtgcattgtatccaatgaaggcggcagctgctcatgcagtactagagttgccctgaaagaaccaccatcattcattaagaagatagaaaataccactactgttttgaaaagttctgccacctttcagagtaccgtggcaggttctcctcctatttctataacctggctaaaggatgatcagattcttgatgaagatgataatgtctatatttcatttgtggacagtgtggccacacttcaaatcagaagtgtggataatggacacagtgggagatatacctgtcaagccaagaatgagtcaggagttgagaggtgttatgctttccttttagtacaagaaccagctcaaatcgtagagaaagctaaatcagttgatgttacggagaaagatcccatgaccttggaatgtgttgtggctggaacaccagaactcaaagtgaaatggcttaaagacgggaaacaaatagttcccagtagatacttttcaatgagttttgaaaataacgtggccagttttagaattcagtcagtaatgaagcaggacagcggtcagtacactttcaaggtggaaaatgacttcggaagcagtagctgtgatgcctacttaagagtgctagatcaaaatattcctccatcattcaccaaaaaattaaccaaaatggataaagttctgggctcttctattcatatggagtgcaaggtgtctggttcacttcccattagtgctcagtggtttaaggatggaaaagaaatatctacaagtgcaaaatacagacttgtgtgccatgagagatctgtgtctctggaagttaataatctggaattagaagatactgcaaattacacatgcaaagtgtcaaatgtagcaggagatgatgcatgcagtggcatcttaactgtgaaagaaccaccaagcttcctagtgaaacctgggcgacagcaagccatacctgattctacagtggaatttaaggcaatactaaaaggaacaccaccatttaaaataaaatggtttaaggatgatgtggaacttgtctcaggtcctaaatgtttcattggcttggaagggtcgactagcttcttaaatctctactcagtggatgcttctaagactggacagtatacttgccatgttaccaatgatgttggtagcgactcttgtactacgatgttgcttgtgacagaaccaccaaagtttgtaaagaaattagaagcctccaaaattgtgaaagcaggtgactcttcacgacttgaatgcaagatagctggatccccagaaatcagagttgtgtggttccgaaatgaacatgaacttccagccagtgataagtacagaatgactttcattgactcagtggccgtcatacagatgaacaatctcagtactgaggacagtggagatttcatttgtgaggctcagaatcccgctggcagcacaagctgcagtaccaaggttatagtaaaagagccacctgtttttagcagcttccctcctatagtagaaacccttaaaaatgctgaagtcagtcttgaatgtgaactttcgggaacaccaccgtttgaggtggtatggtacaaagacaagcggcaactcagaagcagcaagaaatacaagattgcatccaaaaacttccacacaagtattcacattctcaatgtggacacttcagacatcggtgaataccactgcaaagcacagaatgaagtgggaagtgatacttgtgtttgtactgtaaaattgaaagaaccaccaagatttgtctccaaactgaacagcctcactgttgtagccggagagcctgctgaattacaagcatccatagaaggcgcccagcctatttttgtccagtggcttaaagagaaggaagaagtgattagagaaagtgaaaacatcaggattacatttgtggaaaatgttgcaactctacagtttgcaaaagcagagccagctaatgctggaaagtatatctgccaaatcaagaatgatggtggaatgagggagaacatggccacactgatggtcttagagcccgcagtcattgttgagaaggcaggaccgatgacggtgactgtaggagaaacgtgcactctggagtgtaaggtggctggcactccggaactctctgttgaatggtacaaggatggaaagctgttgaccagcagccaaaaacacaaatttagcttctacaacaaaatctcttccttaaggattctctcagttgaaaggcaagatgcaggcacatacactttccaggttcaaaataatgttgggaaaagcagctgcacagctgtggttgatgtttcagaccgagcagttcctccctctttcacacgaagactgaaaaatactggtggggtgttaggtgcttcttgcatcttggaatgcaaagtagctggatcatcacctatttcagttgcctggtttcatgagaaaaccaagattgtcagtggagcaaagtaccaaaccacattttcagataatgtctgcacattgcagttgaattctctggattcctcagatatgggcaattacacatgcgtggctgctaatgtcgctgggtctgatgaatgtcgtgcagtgctaactgtacaagaaccaccctcttttgtgaaagaacctgaacctttggaagtactaccaggcaaaaatgtaaccttcacaagcgttattagaggaacccctccattcaaagtcaactggttcagaggtgccagagaactagtgaaaggagaccggtgcaacatctattttgaagacactgtggcagaactggaattatttaatattgacatatctcagagtggggaatacacctgtgtggtttctaacaacgctggccaagcatcttgcactacccgtctctttgtgaaagaaccagctgcatttttgaagagattaagtgatcattctgtagaaccagggaagtccataattctggagagcacctacactggaacacttccaatttctgtcacttggaaaaaggatggttttaacataactacctctgaaaaatgtaacatagtcacaacagagaaaacttgtatcctggaaattctgaatagcacaaaaagagatgcagggcagtattcctgcgagattgaaaatgaggcaggaagggatgtttgtggagctctggtatctacattagaaccgccttattttgttacggaactggaacctctggaggcagcagttggagattcggtttctttacaatgccaagttgctgggacaccagaaattacagtgtcttggtacaaaggagataccaaattacggccaactcctgaatacaggacctactttacaaacaatgtggccacacttgtttttaataaagtgaacatcaatgacagtggagagtacacatgcaaagcagaaaatagtataggaactgcttcttctaagactgtgttcagaattcaagagcgccaactcccaccttcttttgcaagacaattaaaggacattgaacaaactgtggggttacctgttacactcacttgtcgattaaatggctctgcacccatccaagtgtgctggtatagagatggagtacttttaagagacgatgaaaatctacagacttcatttgtagataatgtggcaactttaaaaattttgcaaactgacttgagtcactctggccagtactcttgctcagcttccaacccacttggaacagcatcttctagtgctagactcacagcaagagaacccaagaaatctcccttctttgacatcaagcctgtatctatagatgttattgctggagaaagtgctgattttgagtgtcatgttactggtgctcaaccgatgcgaatcacttggtcaaaagataacaaggagatccgtcctggaggaaactatacaatcacatgtgtgggaaacactcctcatttgagaattcttaaagtaggcaaaggagactctggtcaatatacttgccaagcaaccaatgatgttggcaaagacatgtgctcagctcagctcagtgtaaaagaacctccaaagtttgttaagaaattagaagcttcaaaagttgcaaagcagggagaatccattcaactggaatgtaaaataagtggctccccagaaatcaaagtttcatggttccgaaatgacagcgaacttcatgaaagttggaaatacaacatgtcattcattaattctgtggcattgcttacgatcaatgaagctagtgctgaagacagcggggactacatttgtgaggctcataatggtgttggtgacgccagctgcagcacagcgttgacagtgaaagcacctcctgttttcacccagaagccttctccagtaggagctcttaaaggttctgatgtgattctccaatgtgaaatttcgggaactcccccatttgaagtagtatgggttaaagatcgaaagcaggttagaaacagcaagaaatttaaaatcacttcaaaacattttgatacaagtcttcatatccttaatcttgaagcctccgatgtcggggaatatcactgcaaagctactaatgaggtgggaagtgacacgtgttcttgctctgtcaagttcaaagaacctccacgattcgtgaaaaagctaagtgacacctcaacccttattggggatgctgttgagttacgggccatagtggagggcttccagccaatttctgttgtctggctgaaagatagaggtgaagtcatcagagagagtgaaaataccaggatttcattcattgataacattgcaaccctccagctggggagtccagaagcatctaattctggaaaatatatatgccaaatcaaaaacgatgctggaatgagagaatgctctgcagtcttgactgtactagaaccagcaagaatcatagagaagcccgaacccatgactgtcactactggaaatccttttgcattagagtgtgtagtgactggaacaccagaactctcagccaagtggttcaaagatggaagagaattgtctgcagacagcaaacatcacattacattcatcaataaagtggcttcccttaaaatcccctgtgccgaaatgagtgacaaaggattatatagctttgaagtgaaaaacagtgttggcaaaagtaactgcactgtatccgtccatgtttctgatcggattgtgcctccttccttcatccgcaagctgaaagacgtgaatgccatcctgggggcctcagttgttttggagtgccgagtctctggctcagccccgatttcagttggctggtttcaggatggaaatgagattgttagtgggcccaaatgtcagtccagcttttcggaaaacgtctgtactttgaatctgagcttgttggagccctccgacacaggcatatacacgtgtgtggctgccaatgtagctggttccgatgagtgctcagcagtcctgactgtgcaagaaccaccatcttttgaacaaacccctgattctgtggaagttttgcctggaatgagcctcacattcaccagtgtcatcagaggcacccctcctttcaaggtcaagtggtttaaaggcagcagggaactggtgcctggggagtcatgcaacatctctctggaagattttgtcacagaactggagttgtttgaggtgcagccattagaaagtggagactattcttgcctcgttacaaatgatgctggcagtgcttcctgtaccacacatctttttgtgaaagaaccagccacctttgtgaaaagattggctgatttcagtgttgagacaggaagccccatagttctcgaggccacatacactggcacacctccaatctcagtgagctggataaaggacgagtatcttatttcacaatctgagagatgcagtattactatgacagaaaaatctaccatactggaaattcttgagagcacaatagaggattatgcacagtacagctgcctgatagaaaatgaggctggtcaagatatctgtgaagctctggtgtctgtcttagaaccaccgtactttattgaacctctggaacatgtggaagcagtcattggagaacctgcaactttacagtgtaaagtggatggaactccagaaattagaatttcttggtataaagaacacacaaagctacgatcagctcctgcatataaaatgcaattcaaaaataacgttgcttccttagtaatcaacaaagtggatcacagtgatgtgggagagtattcatgcaaggcagacaacagtgtgggggcagtcgcttcttcagctgtgcttgttatcaaagcgcgcaaacttccacctttctttgcaagaaaactgaaagacgttcatgagactctaggcttcccagttgcatttgaatgccgcatcaatggctcagaacctcttcaagtgtcttggtacaaggatggggttcttttgaaagatgatgctaatttgcagacatcttttgttcataatgtagcaactcttcagattttacaaactgaccagagccacatagggcagtataattgctctgcttctaatcctcttgggactgcttcatccagtgccaagctcattctctcagagcatgaagtgcctcctttctttgatctaaagcctgtatcagtagatcttgctcttggagaaagtggtacttttaaatgtcatgtaactgggactgcaccaatcaaaatcacttgggccaaagataaccgagagattcgccctggaggcaactacaagatgactttggtagaaaatactgccactctgacagttctcaaagtaggcaaaggcgatgccgggcagtacacctgctatgcaagcaacatcgctggaaaagactcttgttctgctcagctgggtgtacaagaaccacccaggttcattaagaagctagaaccttcaagaattgtgaaacaggatgaattcacaaggtatgaatgcaaaatcggtgggtctccagaaatcaaagttttatggtataaggacgagactgaaattcaagagagcagtaaattcagaatgtcattcgttgactcggtggctgtgctggaaatgcacaatctcagtgttgaagacagtggagactacacctgtgaggcccacaatgcagcaggcagtgccagcagcagcacatccttaaaagttaaagaaccacccattttccgcaaaaagcctcatcctatagagacactgaaaggagctgatgttcaccttgaatgtgagcttcagggcactcccccatttcacgtttcttggtataaagacaagagagaacttaggagcggcaagaagtacaagataatgtctgagaacttcctaaccagtatccacatcctgaatgtcgatgctgcagacattggggaatatcagtgtaaagccacaaatgatgtgggaagcgacacttgcgttggttccatcgctctcaaagcaccaccaagatttgtgaagaagctcagtgacatatctactgtcgttggtaaagaagttcagctgcagactaccattgaaggcgctgaacccatttcagtggtgtggttcaaagataagggagaaatcgttagagaaagtgacaacatatggatttcttattcagaaaacattgcaaccttacagttttcaagagtggaaccagccaatgctggaaaatacacttgtcagatcaaaaacgatgctgggatgcaagagtgcttcgccacgctatccgttctcgagcctgcaacaattgtagaaaagccagaatccataaaagttaccacgggagacacctgtaccttggagtgtacagtagctggcacccctgaactcagtactaagtggtttaaggatggaaaagagctaacaagtgacaacaaatacaaaataagcttcttcaacaaagtatccggccttaagatcatcaatgtagcaccgagtgacagtggggtatacagttttgaggtgcagaaccctgttggcaaagacagctgcacagcttcattgcaggtttcagaccgaaccgttcctccttcattcacaagaaaattgaaagagacaaatggtctatccggctcctcagttgtaatggagtgtaaagtctatgggtcacctccaatctctgtctcctggttccatgaaggaaatgagatcagtagtggaaggaaataccagaccaccctgacagataatacttgtgctttaactgtgaacatgctggaagaatcagacagtggtgactacacatgtatagctactaatatggctggttctgatgaatgtagtgctcctttgactgtgagagaaccaccatcttttgttcagaaacctgatcccatggatgttttaactgggaccaatgtaactttcacaagtatcgtaaaaggaacacctcctttcagtgttagctggttcaaaggtagcagtgaactagtaccaggtgacagatgcaacgtgtctttggaggattcagttgctgaactggagttgttcgatgtagatacatcacaaagtggagaatatacttgcatagttagcaatgaagctggcaaggcttcttgtacaacacatctctacataaaagccccagccaaatttgtgaagaggctgaatgattacagcatagagaaaggaaaacccctgatcctagagggtacattcactggaactcctcccatttcggttacctggaagaaaaatggcataaatgtaactccttctcagaggtgtaatataactacgactgaaaaatcggcaatcctggaaattccaagtagcacagtagaggatgcaggacaatacaactgctacattgaaaatgcctctggaaaagattcctgttcagcacaaatactcatactagaaccaccgtattttgtcaagcagttggagccggttaaggtgtctgttggagattctgcctctctacaatgccagcttgctggaacccctgaaattggggtatcctggtataaaggagatacaaaattgagacccactacgacttacaaaatgcattttaggaataatgttgctacactggttttcaaccaggttgatattaatgatagtggagaatatatctgcaaagctgaaaacagcgtgggagaagtttctgcatcaactttccttaccgttcaagagcaaaaacttccaccatcattttctcgacaattgagagatgttcaagaaacagttggactgccagttgtttttgattgtgccataagtggatcagaacctatctccgtgtcttggtataaagacggcaagccattgaaagacagcccaaatgtacaaacatcatttttagacaatacagccacactcaatatttttaaaactgaccggagccttgcaggccagtattcctgcacagctacaaaccctataggctctgcttcttccagtgccaggctcattctcacagaggggaagaacccacccttctttgacatccgtcttgcccctgtggatgctgtggtgggagaaagtgctgactttgagtgccacgtcacgggcacacaaccgataaaggtcagctgggccaaagacagcagagaaatacgaagtggcggaaagtaccagattagttatctggaaaacagcgcccacctgacagtcctcaaagtagacaaaggagattctggacaatatacctgctatgctgtgaatgaagtgggaaaagactcttgcacagctcagctgaatataaaagagcggctcatcccaccaagtttcactaaaagactctcagagacagtagaagaaacagaagggaattctttcaaacttgagggacgtgtggctggttcccaacctataactgttgcctggtacaaaaataatatagagatacaaccaacttctaactgtgaaataacattcaagaacaacacgttagtgctgcaagtcaggaaagcaggcatgaacgacgctggtttgtacacatgcaaagtgtccaatgatgcaggctctgctctgtgcacgtcttcaatcgtcatcaaagaacctaagaagccacctgtatttgatcagcaccttactccagtaacagtgagtgaaggagaatacgtgcagctcagctgccatgtccagggatctgagccaattaggatccagtggttgaaggctggcagggaaataaagccttcagacagatgcagcttcagctttgctagtgggacagctgtactggaactcagagatgtggctaaagcagattcgggagattatgtgtgtaaagcttcaaatgtggctggaagtgacactaccaaatcaaaagtgaccattaaagacaaaccagctgtggccccagcaaccaagaaagctgcggtagatggaagactcttttttgtgtcagaacctcagagtatcagagtcgtagaaaaaaccactgcgaccttcattgcaaaagttggaggtgacccaatcccaaatgttaaatggacaaaagggaagtggagacagctgaaccaaggaggtcgtgttttcatccaccaaaaaggcgatgaagcaaaactggagattagggacaccacaaaaactgattctgggttataccgatgcgtggcatttaacgaacatggtgaaattgaaagtaatgttaacttacaggtggatgaaaggaagaaacaagagaaaattgaaggcgatcttagagcaatgctgaaaaagactccaatcttaaagaaaggagctggagaagaagaggaaattgatatcatggaacttctcaaaaatgttgatcctaaagaatatgaaaaatatgcccgcatgtatggaatcactgacttccgaggtcttcttcaagcatttgaactgctcaagcaaagccaagaagaagagacacatagactggaaattgaggaaatagagaggtcagagagggacgaaaaggaatttgaggaacttgtatcatttattcagcaaagactgtcacagacagagcctgtcactctgatcaaggacattgaaaatcagacagttttgaaagataatgatgctgtctttgaaattgacattaaaattaattatccagaaatcaagctttcgtggtacaaaggaactgaaaaactggaacccagtgataaatttgaaataagcattgatggtgaccgacatacactcagagtcaaaaactgtcaacttaaagaccagggcaattatcgattggtttgtggtccacacatcgctagcgctaaactaactgtaattgagcctgcatgggaacggcatcttcaggatgtgactctgaaagaaggccagacttgcaccatgacatgccaattttctgtaccaaatgtaaaatctgaatggttcagaaatggcagaatccttaaaccccaaggtagacataaaacagaagtggaacacaaagtccataaattgaccattgcagatgttcgagcagaagaccagggtcagtacacctgcaaatatgaagaccttgaaacttcagcagaactcagaatcgaagctgaaccaattcagtttacaaagcgcatacagaacatcgtggtgagtgagcatcagtctgccacctttgagtgtgaagtgtcctttgatgatgccattgtaacatggtacaaaggaccaacagaactgacagagagccagaaatacaacttcaggaatgatggccgctgccattatatgaccatccacaatgtgaccccagacgatgaaggtgtctactcggtcatcgctcggctggagccaagaggtgaagcaagaagcacggcagagctgtacctaacgacgaaagaaatcaaacttgagctgaagcctcctgatattcctgactccagagttccaatcccaaccatgcctatcagagcagtgccaccagaagaaatccctcctgtggttgctcctcctatcccccttttgctaccaacacccgaagaaaagaaaccaccaccaaaacgtattgaagttaccaaaaaggctgtgaagaaagatgccaaaaaagttgttgcaaagcccaaagagatgacaccacgtgaagagattgtcaagaagcctccacctcctactaccttaattccagcaaaagctcctgaaatcattgatgtatcctctaaagctgaagaagtaaaaataatgactataaccagaaagaaagaggttcagaaagaaaaagaagctgtgtatgagaaaaagcaagcagtccacaaggagaagagagtcttcattgaatctttcgaagaaccttatgacgaactggaggtagaaccatacacagagccatttgaacaaccttattatgaagaaccagatgaagactatgaagagattaaggtagaagctaaaaaagaagttcacgaggaatgggaagaagattttgaagaagggcaagaatactatgaaagggaagaaggctatgacgaaggggaggaagagtgggaagaggcttaccaagaaagggaagtaattcaagttcaaaaggaggtctatgaagaatcacatgagagaaaagttccagccaaagtacctgaaaagaaagcaccaccacctcctaaagttataaagaagccagtaattgaaaaaattgaaaagacttctcgaagaatggaggaagaaaaagttcaagtcaccaaagtacctgaagtttcaaagaagattgttccacaaaaaccttcccggactccagtacaggaagaagttattgaagtgaaagtaccagctgtgcatacaaagaagatggttatttcagaagaaaagatgttctttgcttctcacacagaggaggaggtgtcagtcacagtccccgaggtacaaaaggaaattgttactgaagagaaaattcacgttgccatttccaaaagggttgaaccaccacctaaagtccctgagctacctgagaaaccagctccagaagaagtggcccctgttcctatccctaaaaaagtggagcccccagcaccaaaagttcctgaggttcccaagaaacccgtgccagaggagaaaaagccagttcctgtgcctaagaaggaacctgctgctcccccaaaagtcccagaggtgccaaagaaacctgtccctgaagaaaagattcccgttcctgttgcaaagaaaaaggaagctcccccagctaaagttcctgaagtacagaagggagttgtgacagaagaaaaaataaccattgtaactcaaagagaggaatctccaccaccagcagtgccagaaataccaaagaagaaagttcctgaagaaaggaaacctgttcctcggaaggaggaagaagttccaccaccaccaaaagtgccagctctgcctaagaaacccgtcccagaggagaaagttgcagtgccagttcctgtcgctaagaaagctcctcctccccgagctgaagtctctaagaaaactgttgtagaagaaaagagatttgttgctgaagaaaaactatccttcgcagttcctcaaagagtggaagtcacgcggcacgaagtatctgcagaggaggaatggagttactcagaagaggaggaaggtgtgtccatttcagtttatagagaagaagaaagagaggaggaggaagaagcagaggttacagaatatgaagtgatggaagagcctgaggaatatgttgtggaagaaaagctgcacattatttctaagagagtggaagctgagccagctgaagtgacagagaggcaggagaagaaaattgtactgaaaccaaaaattcctgctaaaatagaggagcctccaccggctaaagttcctgaagcacctaagaaaattgtgccagaaaagaaagttcctgctccagttcctaaaaaggaaaaggtgc

SEQ ID NO: 191439 - DNA, 32767 bp, Homo sapiens; identical to SEQ ID NO: 191437
  Payload ID: 17810
  Gene Name: titin
  Uniprot ID: Q8WZ42
  ENST ID: ENST00000615779
  CDS Start-End: 226-103278

SEQ ID NO: 191440 - DNA, 1548 bp, Homo sapiens
  Payload ID: 17810
  Gene Name: titin
  ENST ID: ENST00000634225
  CDS Start-End: 1-1063
gtcaactgcaaaactctttgtagaaggcagagatgttcgcatccgaagtattaaaaaggaggttcaggtcattgagaaacagcgtgctgttgttgaatttgaggtcaatgaagacgatgttgatgcccactggtataaagatggcattgaaatcaatttccaagttcaagaacgacacaaatatgtagtggaaagaagaatccaccgaatgtttatctctgagaccagacagagcgatgcaggagaatacacctttgtggcaggaaggaacaggagttctgtcactctctatgtcaatgctcctgaaccgccccaagttctgcaggagctccagcctgtcactgtgcagtctggcaagcctgcccgcttctgtgccgtgatatccggaagaccacagcccaaaatttcctggtacaaggaagagcagctgctttccactggcttcaagtgcaaatttcttcatgatgggcaagaatacacgcttttgctaattgaagccttcccagaggatgcggcagtctatacctgtgaagccaagaatgactatggtgttgccacaacatcagcttcactctcagtggaagttccagaagttgtgtctcctgatcaggaaatgcctgtttatccacctgccatcatcaccccgcttcaggacactgtcacttctgaagggcagccagcccgttttcaatgccgggtttctggaacagatctaaaagtgtcgtggtacagcaaagacaagaaaatcaagccatctcggttctttagaatgactcaatttgaagacacttatcaactggaaattgccgaagcttatccagaagatgaaggaacttacacgtttgttgctagtaatgctgtaggccaagtatcaagcacagccaacctgagtctggaagcaaaagaatcgcaagccagagcacttacaaaaattactctgggttctgacactaaaagtattaaaacactcagagagtcacaaattaaaacaacccgtgaagtaaaaagagaatcgtcaaagaaaacatcaagtttgtcattaacttcatgccaaaaaccgtaagaaactgagaacaagggaataaagtctactgacaggataccacgtggactgaagactgagagtgatacgagagccccagcctttcccaaggagctgccctagatatgactgtgtctaaaagctgtgcatattccttgtggaataaaaacagttttgataagtctttgttttgtttcttaatatgtaatttggacttcatgtagttcaaagtttgaaaggtgattcaaatcaaaggagtgtttactagcaggaaaaactgagaatagccctctgctaaagtagcaatttagaaaatgcatgttctttctaaatgtgatttcatctcttagcaagtgtttagtcaataggacattttttagaaaataatattccttcggtttgtagattgctttctgcatgcatgtaaaggcatggggaattatagaactaaaagtggaaatttcatgaagaacctaaaataaaaatgttttaaatctttctgtcaa

SEQ ID NO: 191441 - DNA, 2123 bp, Homo sapiens
  Payload ID: 17811
  Gene Name: titin-cap
  Uniprot ID: O15273
  ENST ID: ENST00000309889
  CDS Start-End: 1174-1677
atatgaagaaccggggacagtgctcagtaatcaatagtctgcagttctgcacccacgtgctcctgggtactctgccgtccccacagggtcctcagctcagcccctgtcactgcctctcctgccaccctttgtccactcggcagtgttctcactcctcatccccccacacccaccacctgtctgccagcctcttgcaccatgagttgctactcctggggtgctggactgtccccacagccatctgtctcccctgctccccatgaagaagagccagtcccctcccaggtagcacatcagagcgggcaggctccagagctcttctggtcctcttgcagtggccagaaagtggggaaaggggcccagagaggggcagggactgacccatggtcacacagcctatttatggctgatctggagccaggccttctgactatcacccatcagagcccctggattcccatttcacccaacacaggtgttggggtagaactgggggccctccacccctactagcctgactgtctcctgagacctgtctcctaagaccacttacctgaccactggccatggggaaggaaaacacctggccaaggctcatgccccaggttcccaggcatgaagttgactgtctccgcccctgctggtgtggtgagggtgactggggactaggcactaggcctttggtgcaggcgcctgaggacgtggttgcactctcccttctggggatatgcccttgagcccaggcagaggagagcacagccagggcaggacctggcagccctggtacagagcccagagggggcatcagttcctgctggtcctgctctgtttacagacaagctgctgtcctccctgcaaaggggagtgggtggggcagagggcaagtgccaggggggcacaaggctgggcatgtggctggcatgagacggtgtctgagtaatgtcaggcacctggaggcattgaccccaggaccttggaccccagacctctgaccggggggcagccagcgtccaggtaccccaacccctgccctgggtccggcgtccccccattagtgagtcttggctctacttatagcatctgacaccagaggggccgaaaatagcccctggagaagggggaggagggggctatttaaagggcctgggaggggagagagaatgaggagtgatcatggctacctcagagctgagctgcgaggtgtcggaggagaactgtgagcgccgggaggccttctgggcagaatggaaggatctgacactgtccacacggcccgaggagggctgctccctgcatgaggaggacacccagagacatgagacctaccaccagcaggggcagtgccaggtgctggtgcagcgctcgccctggctgatgatgcggatgggcatcctcggccgtgggctgcaggagtaccagctgccctaccagcgggtactgccgctgcccatcttcacccctgccaagatgggcgccaccaaggaggagcgtgaggacacccccatccagcttcaggagctgctggcgctggagacagccctgggtggccagtgtgtggaccgccaggaggtggctgagatcacaaagcagctgccccctgtggtgcctgtcagcaagcccggtgcacttcgtcgctccctgtcccgctccatgtcccaggaagcacagagaggctgagagggactgtgacttgggctccgctgtgcccgccctgggctgggcccttcctggctaggactgtggaggggagctgctggccatggctgctttgtagtttgcccagagttgggggctaggggaggggggagccagaggccaggatgcctgagccccctgagttcccaaagggagggtggcagagacagtgggcactaagggtggagagttgggggccagcacagctgaggaccctcagccccaggagaagggacaaaaggtactggtgagggcaagaggtgcctgggaggagtggccctgatccaggaaaatgtgaggggaatctggaacgctctaggcagaagaagctgggagggagggggaggtgaaaagggcagaggcaaggatggtggggcccccagcaccctctgttagtgccgcaataaatgctcaatcatgtgccagag

SEQ ID NO: 191442 - DNA, 583 bp, Homo sapiens
  Payload ID: 17811
  Gene Name: titin-cap
  ENST ID: ENST00000578283
  CDS Start-End: 12-443
gaggagtgatcatggctacctcagagctgagctgcgaggtgtcggaggagaactgtgagcgccgggaggccttctgggcagaatggaaggatctgacactgtccacacggcccgaggagggctgctccctgcatgaggaggacacccagagacatgagacctaccaccagcaggggcagtgccagctgccctaccagcgggtactgccgctgcccatcttcacccctgccaagatgggcgccaccaaggaggagcgtgaggacacccccatccagcttcaggagctgctggcgctggagacagccctgggtggccagtgtgtggaccgccaggaggtggctgagatcacaaagcagctgccccctgtggtgcctgtcagcaagcccggtgcacttcgtcgctccctgtcccgctccatgtcccaggaagcacagagaggctgagagggactgtgacttgggctccgctgtgcccgccctgggctgggcccttcctggctaggactgtggaggggagctgctggccatggctgctttgtagtttgcccagagttgggggctaggggaggggggagccagaggcc

SEQ ID NO: 191443 - DNA, 1017 bp, Homo sapiens
  Payload ID: 17812
  Gene Name: TLC domain containing 1
  Uniprot ID: Q96CP7
  ENST ID: ENST00000292090
  CDS Start-End: 112-855
ggctggcggccggcgggagaggcggccggcctggactggcccgagagggatcccggttcccagaacagacctaggaggcggcctcgagggcggacggcagggagggccagcatgccccgactgctgcaccccgccctgccgctgctcctgggcgccacgctgaccttccgggcgctccggcgcgcgctctgtcgcctgcccctacccgtgcacgtgcgcgccgaccccctgcgcacctggcgctggcacaacctgctcgtctccttcgctcactccattgtgtcggggatctgggcactgctgtgtgtatggcagactcctgacatgttagtggagattgagacggcgtggtcactttctggctatttgctcgtttgcttctctgcggggtatttcatccacgatacggtggacatcgtggctagcggacagacgcgagcctcttgggaataccttgtccatcacgtcatggccatgggtgccttcttctccggcatcttttggagcagctttgtcggtgggggtgtcttaacactactggtggaagtcagcaacatcttcctcaccattcgcatgatgatgaaaatcagtaatgcccaggatcatctcctctaccgggttaacaagtatgtgaacctggtcatgtactttctcttccgcctggcccctcaggcctacctcacccatttcttcttgcgttatgtgaaccagaggaccctgggcaccttcctgctgggtatcctgctcatgctggacgtgatgatcataatctacttttcccgcctcctccgctctgacttctgccctgagcatgtccccaagaagcaacacaaagacaagttcttgactgagtgaggggcacagagcctgggacaacaaaaacggacaaggccagaaacagcttcatatggacactgggacttagccccaagcctgggtgtcctctgaggccagcctctccaccttctgagcctgcgcccacactattgaaaacactaatgaaagtactcctctgaa

SEQ ID NO: 191444 - DNA, 784 bp, Homo sapiens
  Payload ID: 17812
  Gene Name: TLC domain containing 1
  Uniprot ID: Q96CP7
  ENST ID: ENST00000394933
  CDS Start-End: 125-727
ggcaaatcggaggtcttgcttgcccagcctccggggagccgggccgagggccgggactgtctgagggaggactgtgacagccgcccggccccaggagtttaagagccggcgggaagaggtggcgatgggttactcagcagttcccaagtgcccacctcgcgggcgcgggagggacagtgtatggcagactcctgacatgttagtggagattgagacggcgtggtcactttctggctatttgctcgtttgcttctctgcggggtatttcatccacgatacggtggacatcgtggctagcggacagacgcgagcctcttgggaataccttgtccatcacgtcatggccatgggtgccttcttctccggcatcttttggagcagctttgtcggtgggggtgtcttaacactactggtggaagtcagcaacatcttcctcaccattcgcatgatgatgaaaatcagtaatgcccaggatcatctcctctaccgggttaacaagtatgtgaacctggtcatgtactttctcttccgcctggcccctcaggcctacctcacccatttcttcttgcgttatgtgaaccagaggaccctgggcaccttcctgctgggtatcctgctcatgctggacgtgatgatcataatctacttttcccgcctcctccgctctgacttctgccctgagcatgtccccaagaagcaacacaaagacaagttcttgactgagtgaggggcacagagcctgggacaacaaaaacggacaaggccagaaacagcttcatatgga

SEQ ID NO: 191445 - DNA, 578 bp, Homo sapiens
  Payload ID: 17812
  Gene Name: TLC domain containing 1
  ENST ID: ENST00000580518
  CDS Start-End: 137-578
aaaaactcagtattcggccaggcgcggtggctcacgcctgtaattccagcactttggggaggccgaggcgggcggatcacctgaggtcaggagtttgagaccaacctggccaacatgtgtatggcagactcctgacatgttagtggagattgagacggcgtggtcactttctggctatttgctcgtttgcttctctgcggggtatttcatccacgatacggtggacatcgtggctagcggacagacgcgagcctcttgggaataccttgtccatcacgtcatggccatgggtgccttcttctccggcatcttttggagcagctttgtcggtgggggtgtcttaacactactggtggaagtcagcaacatcttcctcaccattcgcatgatgatgaaaatcagtaatgcccaggatcatctcctctaccgggttaacaagtatgtgaacctggtcatgtactttctcttccgcctggcccctcaggcctacctcacccatttcttcttgcgttatgtgaaccagaggaccctgggcaccttcctgctgggtatcctgctcatgctggacgtgatgatca

SEQ ID NO: 191446 - DNA, 408 bp, Homo sapiens
  Payload ID: 17812
  Gene Name: TLC domain containing 1
  ENST ID: ENST00000581236
  CDS Start-End: 1-161
tcggtgggggtgtcttaacactactggtggaagtcagcaacatcttcctcaccattcgcatgatgatgaaaatcagtaatgcccaggatcatctcctctaccgggttaacaaaggaccctgggcaccttcctgctgggtatcctgctcatgctggacgtgatgatcataatctacttttcccgcctcctccgctctgacttctgccctgagcatgtccccaagaagcaacacaaagacaagttcttgactgagtgaggggcacagagcctgggacaacaaaaacggacaaggccagaaacagcttcatatggacactgggacttagccccaagcctgggtgtcctctgaggccagcctctccaccttctgagcctgcgcccacactattgaaaacactaatgaaagta

SEQ ID NO: 191447 - DNA, 5971 bp, Homo sapiens
  Payload ID: 17813
  Gene Name: TLC domain containing 2
  Uniprot ID: A6NGC4
  ENST ID: ENST00000330676
  CDS Start-End: 197-991
cggctgctccaatcaccgcccaggcgagggactgggcgtggacgaacggggaaaagttcctgctgatcccaaaggcgcggcggggaggggagccggggccccagccctgccgggaaacgggttcccagtcccggccgagagcgcgggcgccgaggggaccgacccggactccccgcaaccccccaaccgccaggccatggcgcccacggggctcctggtggccggcgcctccttcctcgcgttccgggggctgcactgggggttgcggcggctgcccacgccggaatcggccgctcgggaccgctggcagtggtggaacctctgcgtctccctggcgcacagcctgctctcggggaccggggcgctgctcggcctgtcactgtaccctcagatggccgccgaccccatccatggccacccgcgctgggctctggtgctggtggctgtgtctgtgggttacttcctggcagacggagctgacctgctgtggaaccagaccttgggcaagacctgggatcttctctgtcatcatttggtggtggtgagctgcctcagcaccgctgttctgtctggccactacgtgggcttctccatggtgtctctgctcctggaactgaactctgcctgcttgcacctgcggaagctgctgttgctttctcgccaggccccatccctggccttcagcgtgaccagctgggcctccttggccaccttggccctcttccgcctggtcccgctggggtggatgagtctgtggctgttccggcagcaccaccaggttcctcttgctctggtcaccctgggtggaattgggctggtcactgtgggcatcatgagcatcatattggggatccgtattctggtcaatgatgtcctacagtctcgaccccatccacccagccctggccatgagaaaaccagggggaccaggacacgtcgtgacaatggacctgtcaccagcaacagttcgactctcagcctgaaagactagagagaagccatgggcccctcgctgggggaggtggggccaggacaaggagatgagggtcttccatgcacagtcccccatcagggtgagggccagacttgctcatcagaatctcagtttctcttccagctaactcacatcccttccccttcctcggatctaagaagaaatgctgatgttggatgggtgggaacctgggtttctgttcactgaaatccgtcatcagatgagcatcctttccagcaaataaactcaagaggtacagctagagctatcagtaaagggtggcaggaggcatgcagctggaagaaactgccagtggagacagaagctctttgctttaacccagggacagatgggggaaggtgaagtcccactaggatcagagagatctggtatggggcgggtggggacagagagaaaagagatctcacctataaccaaattctggcagtgggaggaaggtagaggaggtgctatctgtagcagcagagatggacgtgatagttgccaagagacagaacctgggccacagcaattgctgctgatgtttctggttctcaaagccacactcctgtttttctttttctttttctttttttttatgagacggaatcttactctgtcacccaggctggagtgtagtggcacgatttcggctcactgcaacctcagcctcctgggttcaagtgattgtcctgccttagcctcccgagtagctgtgacttcaggcatgcaccaccaagcccagctaatttttgtattttttggtggagaggaggtttcaccatgttgcccaggctggtctcgaactcctgacctcaagtaatccacctgcctcggcctcccagagtgctgggattacagacgtgagaacaggcgcacactcctgtttttctccttaaccctggtcctgctgtgtctagccttttatttttatttttatttttagtatcttttgacttttcttttttcttttctttttttttttttttttttgagacaagttcttgctctgttgcccaggatggagtgcagtggcttgatcttggctcactgcaatctctgcctcccaggctcaagcaattctcctgcctcccacctcagcctcccaagtagctgggactacaggtgcacgccactgcaccaggctaatttttgtatttttttgtagagaccaggttttgccatgttgcccaggctggtctcaaacttttgcactcaagtgatccacccacctcagcctcccaaagtgctgggattacagacgtgagccaccgtacccgaccccttttgacttttcaaagacaattcggattcttagaggaatgaacacagggctggtttgtcttcttaggacggcactgaagtctagaattacagaaggaaaggtgcccagtacagagttttcccaggcccaggctttcatggaagaacaagggcagaggtagactgtgtgagagaaggctgcaggaggataaaggaatagctggccctctggctgggcgcagcagctcacgcctgtaatcccagcactttgggaggccgaggcgggaggatcacctgaggtcaggagttcaagaccagcctggtcaacatggtgaaaccctgtctctactaaaaatacaaaattagccgggcatggtggtgcatgcctgtaatcccagctactcaggaggctgaggcaggagaatcgcttgaacccaggaggcagaggttgcagtgagccgaggtcgtgccactgcactccagcctgggcaaacagagtgagactcttgtctctaaagaaaaaaaaaaaaggaagagctgggacttttctgagatacattcataaagtcttcttcctccctgctgcttctgctgcgtttttttctgttgaacaagaccccttccttcccagaacatcgaggtgacgggaagtgcccagcagattaagtctgctgttccactaaacaatggactgagagaggcaacccttagccatccacagaaaagctacatgagcaaaagcaagagacaggaagattgtcttcaaaaaaaaacaaaacaaaacaaaaaccttgctaagaagcggaggtacagaaagatacgaagaatgacagagacagacatacatagattgagtgatagatagaaagagagaaggattattcacatagaggtgacagaggcaaagaaggatggagggcaaaagagacaggccctagcagaaatatggagaaaggctgtcatagatcctgagagacaccaaagtcacagaactgataaaagggttataaacaaaaaggaccagaaaaatagaaatgaaggccgacaagaagagaccccaaggctgaaaggcacagagagtctagacagtgaaatagagtgagtgacaaggagaaacacccaggctcaggagtgatggaggaaatactggcagatagagagatcagaagagcaagaggagaggtgggaacagagaagagcggggacgagtccggggagctgagaagcagaaggcggaggaggcagtcagtgggaagattcactgacagaagagaccaggagatatggggacttggaggcaggcagaaagacaaaggacaaacagctgcagcgcaaaccctaaagacaggctgacagtaaccggtcggcagagactggtaggaagataaggacaagtcagaatcaggggtgtcaactgagatgcaaatataggcaaaggagctgacaaagagaatcacagagagaaaaaaaaggaggagagcacagaacaatttaaatatccaggctgggcatggtgggtcacgcctgtaatcccagcattttgggaggccgaggcaggcggatcacgaggtcaggagatgaccatcctggctaacatggtgaaacaccatctctactaaaaatacaaaaaattggccgggcgtggtggcaggcgcccgtaatcccggctactgaggaggctgaggcaggagaatcgtttgaacctgggaggccgaggttgttataatgagccgagatagtgccactgcagtccagcaggggtgacagagtgagactccgtctcaaaaaaaaaaattgaatatccaaagaacaaagaagaggcaggaacccagaaatgaaaagaggaggaaaaatacaggtgtgaaaaaaaaatgagagggattgtgagaagtctccatcatagagtcataaaaacaggcgcaaaggatgaaaatacatcgagactgaggaaaacacagttggaaggagctaaacacaagcagaaaataagagcagagcatttaaatgtaattagataaaaacccaagaggcaaaggtatagatagtgagctagagaaacaatgcagaattttgtcagagtctgtacttctagaagtcatgtttgctggctgggcatggtggctcacgcctgtaatcccagcactttgggaggccgaggtaggaggagtggttgagctcaggagttcaagaccagtctgggcaacatattgagacctcctctctacaaaaaaaaaaaattttcttttttctttcttttcttctttttttttttttttttttgagacagtttcattcttgctgcccaggctggaatgcagtggcacaatcttggctcactgcaacctccacctcctggactcaagtgattctcctgcctcagcctccctagtagctgggattacaggtacccaccaccacactcggctaatttttgtgtttttagtagagacaggatttcaccatattggccaggctggtctcaaactcctgacctcaggtgatccgcccaccttgggctcccaaactactgggattatatgcgtgagccaacacacccggccaaaaaaaaatttttaattaaaaaaaaaagtcatatctgcaaaactcaatttgccatcttaactgaatgccttgattaacaaaaatgttgtctgccttgagtttttaaagaaaaagaaatatgacaaactcatgtgaggaatctattccttaaatatctgttgaggttgatatgaattgattctaagtcatacaccttttctttggccactggtatacattcatgatggtttgagtgagtgtcccttttggtaatacttgatagtgtctatgaggccgggcgtggtggctcacgcctgtaatcccagcactttgggggaccgaggcaggtgaaatcccatctctactaaaaataaaaaaaattagccgggcgtggtggcgggcgcctgtagtcccagctactcaggaggctgaggcaggagaatggcatgaacccgggaggcggagcttgcagtgagccaagatcgtgccactgcactccagcctgggtgacagagcaagactccgtcttaaaaaataaataaataaataaatagacagatagatagatagatagtgtctatgaaggctgcccaagaacttgaccattagggaaacatggctgtttctgtggattaactagtcaagcccatacaggaagagtgaggtcagctcccaggtggggcaggatgtagtggacgcttggaagaatttgggaccacacacgaattgctaccatggtgagccagtgaaacttgaggaaggcaggactggattgtgattacaactgagtaagtaggcagagaattggagtgtgggcaacataaagatgatgtgaatcaaagaagaatggtcaattaagaccctaaaaaaaggacgttcaaaaatgcagaggttaaaaaaaaaaaaagcagagattgccagatgctccatttggtaggagtctgcttagcacagtggtgcttcgccagactttaccgtggcccagggaaatggtcctcaagacggactccatgtctaccaagctacttgctaatgatttctttgtcctccaggacagggaaggggcttttctggatgggatacattgatattttatggccttgaaacactatcctgattataaattaataaattgctatgcaaataattgcattagttgcatcaatctcttat

SEQ ID NO: 191448 - DNA, 5971 bp, Homo sapiens; identical to SEQ ID NO: 191447
  Payload ID: 17813
  Gene Name: TLC domain containing 2
  Uniprot ID: A6NGC4
  ENST ID: ENST00000611774
  CDS Start-End: 197-991

SEQ ID NO: 191449 - DNA, 4935 bp, Homo sapiens
  Payload ID: 17814
  Gene Name: TLR4 interactor with leucine-rich repeats
  Uniprot ID: Q7L0X0
  ENST ID: ENST00000539664
  CDS Start-End: 247-2682
cagaaatgcaacaagtagtacccggggtctgcagagcgccccgcgccgcctgacttggccgggcgaagcccgcctgcagagacccgggccggcctccggacaaaggacggaggaggggctggacggcgctgcgaagtccgaaagaggccatttagcgactctggccaggctaaggggaatgcagaggagacacagagccggcgggccaagaggacgatccggccgctgcacgcagggcgggaggcgatggaggctgcccgcgccttgcgcctcctgctcgtggtgtgcggctgcctcgcgctcccgccgctggccgagcccgtgtgcccggagcgctgcgactgccagcatccccagcatctcctgtgcaccaacagggggctccgcgtagtgcccaagaccagctcgctgccgagcccccacgacgtgctcacctacagcctcggcggcaacttcataaccaacatcacggccttcgacttccaccgtctggggcagctcagacggctggacctgcagtacaaccagatccgctctctgcaccccaagaccttcgagaagctctcgcggctggaagagctgtacctggggaacaacctcttgcaggcgctcgccccgggcacgctggccccgctgcgcaagctgcgcatcctctacgccaacgggaacgagatcagccgcctaagccgcggctccttcgagggcctggagagtctagtcaagctgcggctggacgggaacgccctgggggcgctgccggacgcggtcttcgctcccttgggcaacctgctctacctacatctggagtccaaccggatccgctttctgggcaagaacgccttcgcccagctaggcaagctgcgcttcctcaacctctctgccaacgagctacagccctccctgcgccacgcggccaccttcgcaccgctgcgctccctctcctccctcatcctctcggccaacaacctgcagcacctcgggccgcgcatcttccagcacctgccacgtctcggcctgctctcgctcaggggcaaccagctcacgcacctcgcgcctgaggccttttggggcttggaggccctgcgcgagctgcgcctggagggtaatcggctgagccagctgccaactgcgctgctggagcctctgcacagcctggaggcgctggacctgagcggcaatgagctgtccgccctgcacccggccaccttcggccacctgggccggctgcgcgagctcagcctgcgcaacaacgcgctcagcgccctatccggggacatcttcgccgccagcccagccctttatcggctggatctagacggcaacggctggacctgcgactgccggctgcgaggcctgaagcgctggatgggcgactggcactcgcagggccggctcctcactgtcttcgtgcagtgtcgccaccccccggccctgcgaggcaaatacctggattacctggatgaccagcagctgcaaaatggatcctgcgcggatccctcgccctcagcttccctgaccgctgaccgcaggcggcagcccctacccacggccgcaggggaggagatgacgccacctgcaggtctcgcggaggagctgccgccgcagccgcagctccagcagcaggggcgatttctagctggggtggcctgggatggggccgccagggagctggtaggcaaccgcagcgccctaaggctgagtcggcggggcccgggcctccagcagcccagcccctccgtcgctgccgccgcgggcccggctccacagtccctagacctgcacaagaagccccagcggggccgtccgactcgggcagatcccgccctcgcggagcccaccccaacggcctctcctggctctgcgccatcgcccgccggcgacccctggcagcgcgcgacgaagcatcgtctgggcacggagcaccaggagcgtgccgcccagtccgacggtggggccgggctgccgccgctggtgtccgacccatgcgacttcaacaagttcattctgtgcaacctgacggtggaggcggtgggcgcagacagcgcctcggtgcgctgggccgtgcgcgagcaccgcagtccccggccgctgggcggcgcgcgcttccgcctgctctttgaccgctttggccagcagcccaagttccaccgcttcgtctacctgcctgagagcagcgactcggccacgctgcgcgagctgcgcggggacaccccctacctggtgtgcgtggagggcgtgcttgggggccgtgtctgccctgtggctccccgggaccactgcgcggggctggtcaccctaccggaggccgggagccggggcggcgtcgactaccagctgctgaccttggccctgctgacggtcaacgcgctgctggtgctcctggccttggcggcctgggcgtctcgctggctgcgtaggaaactgcgggctaggcggaagggcggggccccggtccacgttcggcacatgtactccacccgacggcccctgcgctccatgggcaccggcgtgtccgccgacttctcgggattccagtcgcaccggccacgcaccaccgtgtgcgcgctcagtgaggcggacctcatcgaattcccctgcgaccgcttcatggacagtgcgggcggcggcgcgggcggcagcctgagacgggaggaccgtctcctgcagcgatttgccgactaggtccagggcatatagagaccatctcattggccctaaggagccgcctctccgtgaggcccaccagcccacctcaggggaagtgccgttttgtgcacttgccagagaggccggtggggacagagggccaattcgggcaccatcccccaattcccaatactcgagaagtaaatggatggtacttggtggtcagagccagagtaggggacaaatggatggtgggatgctgaggtcggaggcttcgcttggaggctttgacacagctatgcgaatggcttttgtagcactgcaatgcagaagccaggctttgggggtagaaagggggtgcttgtgcccccaacatggccagaaatatttgggtgcatgctttttgtttgctcagtgtcaaacagagaagttttgtttctatttaaggaaggaacttattaccattacaaaggaggcttggccagggactccactggtttggtgatctctgccaagaagggggatgtaaacaggtggtaaagtttaacatacccgccaaggaactcgtttatgttggctgatagagcattcaggataccttaaagtttaataagagacgcatttttttttttcaaaaatgtgaaaagctctgacatttaacgaactgaccaatagactcaaggactgttttagttggactgggccattttattatgttccttttaatattaacagtacaagagcgcttgctgacttcgaggataactaagattacatactttctcaggagaaggctgcatgcaagacttctctgtcagggttgctcctgtggcttttttaattttatttttttaaacctatatatggaaaaggaaatttcaatgccagatttgataaaagaatgtgatgtatatgtagctgatgacccactggggaacaccagtgttccagttcacttaccacatctgtgacagtgtgtttagattggaataaatgtgatgcattacttcttatgtttttatcagtgacatggttgactgtgccctaattctcttgagttgcagttaagcaatgaaggttatttcctaatagggaagcaaaaggtgattgtcaattgatagtttaatgtttgaccacattagtgtctttatatgaaatagtagaggggaagaaattatagaaaacaaatgtgaaaaaaatacaccagtgggtatctgttctactaaaaccagaagattgttatgagtacttaaacctcactgtgaaataatgatatattttgcaattaatccctccccaactgagtgtcttactgtgttattaaatcttatcttttagttaatagttgcagtatttcttttaaatgtttttgttttaaacttaggggtaggatcctttatttgttcagttgtttccaactatttgggatactttcattccctgctatttatgaagtacatgtttatcactaagtgtagtggtttggtttacattaataattttatgtgtggtctaaaaatgcagtcactaagagaatgtacactgtggttatggtcacagtggttatggatttattggcagtggagtaccatggaggtcactgcaatggtgctaaggctgacagtggaatcttctgtttagggccttaagcccctgagggtcctggtgactcagggaatccatcacagccccgggtctttcaccccagttcactccttttatgtttggcctagattgacccatgcctgccctcttctcaacagctgagtagggaaccagccatctgaatgagctgatcgttgtttatgttcaaatgagtaaatgtccagaccacttaaaactacagctgcttttctggcagtctcgtctgcggggccaaaacttaataaaccacaggaaatagactgtcattcttagtttgctgccagggcttattttagattgagagcatactggtacatgagagcagtagtgttgtttgctcttattttcaaccagggagctatctggcaccttttgtgctcctggcttttttcaatcatagcactattgcatctcctagctatttcttttgcccagcagggtaatattgagtcccattgcaagtatggacaaggcctctggttctcctcaccacccaccttttcagccatagaacatcactgaaaatgcctaatgcctggatctgtgttctactttagtttcactgggaagtctttcagtgggagatgaataaatgttatacattgttatgtccagttatgtcaataaacccactaatagagataa

SEQ ID NO: 191450 - DNA, 1250 bp, Homo sapiens
  Payload ID: 17815
  Gene Name: TM2 domain containing 1
  Uniprot ID: Q9BX74
  ENST ID: ENST00000294613
  CDS Start-End: 304-927
agcgggtgaagcacctgattgcctaaaccactcgtttccttcctccagcactcaaagattaaccttagctccttccaagggttcgtgggggaaaattcgcctcgagggactgggtacatgcatattttaaaagggtctcccaatgtgattccacgggctcacgggcagaagaacacgcgaagagacggaactggcctctatcctatgcgaggtccctttaagaacctcgccctgttgcccttctccctcccgctcctgggcggaggcggaagcggaagtggcgagaaagtgtcggtctccaagatggcggccgcctggccgtctggtccgtctgctccggaggccgtgacggccagactcgttggtgtcctgtggttcgtctcagtcactacaggaccctggggggctgttgccacctccgccgggggcgaggagtcgcttaagtgcgaggacctcaaagtgggacaatatatttgtaaagatccaaaaataaatgacgctacgcaagaaccagttaactgtacaaactacacagctcatgtttcctgttttccagcacccaacataacttgtaaggattccagtggcaatgaaacacattttactgggaacgaagttggttttttcaagcccatatcttgccgaaatgtaaatggctattcctacaaagtggcagtcgcattgtctctttttcttggatggttgggagcagatcgattttaccttggataccctgctttgggtttgttaaagttttgcactgtagggttttgtggaattgggagcctaattgatttcattcttatttcaatgcagattgttggaccttcagatggaagtagttacattatagattactatggaaccagacttacaagactgagtattactaatgaaacatttagaaaaacgcaattatatccataaatattttttaaaagaaacagatttgagcctccttgattttaatagagaacttctagtgtatggatttaaagatttctctttttcattcatataccattttatgagttctgtataattttttgtggtttttgttttgttgagttaaagtatattattgtgagatttatttaataggacttcctttgaaagctgtataatagtgtttctcgggcttctgtctctatgagagatagcttattactctgatactctttaatcttttacaaaggcaagttgccacttgtcatttttgtttctgaaaaataaaagtataacttattcac

SEQ ID NO: 191451 - DNA, 1248 bp, Homo sapiens
  Payload ID: 17815
  Gene Name: TM2 domain containing 1
  ENST ID: ENST00000371180
  CDS Start-End: 118-927
agcgggtgaagcacctgattgcctaaaccactcgtttccttcctccagcactcaaagattaaccttagctccttccaagggttcgtgggggaaaattcgcctcgagggactgggtacatgcatattttaaaagggtctcccaatgtgattccacgggctcacgggcagaagaacacgcgaagagacggaactggcctctatcctatgcgaggtccctttaagaacctcgccctgttgcccttctccctcccgctcctgggcggaggcggaagcggaagtggcgagaaagtgtcggtctccaagatggcggccgcctggccgtctggtccgtctgctccggaggccgtgacggccagactcgttggtgtcctgtggttcgtctcagtcactacaggaccctggggggctgttgccacctccgccgggggcgaggagtcgcttaagtgcgaggacctcaaagtgggacaatatatttgtaaagatccaaaaataaatgacgctacgcaagaaccagttaactgtacaaactacacagctcatgtttcctgttttccagcacccaacataacttgtaaggattccagtggcaatgaaacacattttactgggaacgaagttggttttttcaagcccatatcttgccgaaatgtaaatggctattcctacaaagtggcagtcgcattgtctctttttcttggatggttgggagcagatcgattttaccttggataccctgctttgggtttgttaaagttttgcactgtagggttttgtggaattgggagcctaattgatttcattcttatttcaatgcagattgttggaccttcagatggaagtagttacattatagattactatggaaccagacttacaagactgagtattactaatgaaacatttagaaaaacgcaattatatccataaatattttttaaaagaaacagatttgagcctccttgattttaatagagaacttctagtgtatggatttaaagatttctctttttcattcatataccattttatgagttctgtataattttttgtggtttttgttttgttgagttaaagtatattattgtgagatttatttaataggacttcctttgaaagctgtataatagtgtttctcgggcttctgtctctatgagagatagcttattactctgatactctttaatcttttacaaaggcaagttgccacttgtcatttttgtttctgaaaaataaaagtataacttattc

SEQ ID NO: 191452 - DNA, 637 bp, Homo sapiens
  Payload ID: 17815
  Gene Name: TM2 domain containing 1
  ENST ID: ENST00000468586
  CDS Start-End: 1-160
actcgttggtgtcctgtggttcgtctcagtcactacaggaccctggggggctgttgccacctccgccgggggcgaggagtcgcttaagtgcgaggacctcaaagtgggacaatatcctctgtggagaacacccccccatggaggcgagatccaaaaataaatgacgctacgcaagaaccagttaactgtacaaactacacagctcatgtttcctgttttccagcacccaacataacttgtaaggattccagtggcaatgaaacacattttactgggaacgaagttggttttttcaagcccatatcttgccgaaatgtaaatggctattcctacaaagtggcagtcgcattgtctctttttcttggatggttgggagcagatcgattttaccttggataccctgctttgggtttgttaaagttttgcactgtagggttttgtggaattgggagcctaattgatttcattcttatttcaatgcaggctggagtgcagtggcgtgatcataactcattgcagcctcgaattcctgggttcaaacaatcttcctgcctcagcctcccatccagtatgggatattttaaaagattgttggaccttcagatggaagtagttacattatagattactatggaac

SEQ ID NO: 191453 - DNA, 3218 bp, Homo sapiens
  Payload ID: 17815
  Gene Name: TM2 domain containing 1
  ENST ID: ENST00000371177
  CDS Start-End: 14-574
gtcggtctccaagatggcggccgcctggccgtctggtccgtctgctccggaggccgtgacggccagactcgttggtgtcctgtggttcgtctcagtcactacaggaccctggggggctgttgccacctccgccgggggcgaggagtcgcttaagtgcgaggacctcaaagtgggacaatatatttgtaaagatccaaaaataaatgacgctacgcaagaaccagttaactgtacaaactacacagctcatgtttcctgttttccagcacccaacataacttgtaaggattccagtggcaatgaaacacattttactgggaacgaagttggttttttcaagcccatatcttgccgaaatgtaaatggctattcctacaaagtggcagtcgcattgtctctttttcttggatggttgggagcagatcgattttaccttggataccctgctttgggtaaggaaactgtcaccagagaggttaagggatttactgagtctagaggctttcctttattctgtgacatatttgttgttatcatctttgttttatggataggaaaattgtcacgagattaagagatttacccaaggacactcagctagtgacctcaatttgaacccaaattttctggctccagagatcatgctttatttactgtagtactctgcttctatattagcccttcactgagcaaatttaaagtttttgaatgctctgcctactagctagcaaagctaaccttatttcttccatgttgctacccacaaaagatgaaagagaagtcttcactgtggggttgatggtagatatatttctgacagctatactaaaactcagtgttgtaagttcctaagtaaaagtcatgaagtactatatatacttgtttagttaattaaacatatattcaacatttaaataactaagtgatatggaaataatgatgaaggtcacagtgtatattggttaaaaataaaataaatatgttagtaggccaatttatggtacagcgctgtaacagaaccataaccgtgctgtgagagtacagaaaagggactgatgcagttgacttaaggaagttcttagatatggtgacatttgagctagggtttgaaggatgaaaagattacagaggttgaaggcattgcagagaacagcatgtgtaaagcatatagtgtacactgggagattaggggacaatttagctgatcgtgtaggaagaacaatgcaggaggtgacactgcctacagaggtagtctatggtccgattataaaatgctttgagtatcttgctatggagttgggtcctttagatatcaaaagttatccttttaggtatcagaagcaatagaatattttttctttttctttcttttttttttgtgtgacagagtctcactctgttgcccaggctggagtgcagtggtgcgatcacggctcactgcaacctcgacctcctgggctcaaggtatgctccgtcctcagctctgccccaagcagctgggactacaggcatgtaccaccatgcctgacttatttcggtatttttctgtagagatgggattttgccgtgttgcacaggctgctctagaactcctgggctcaagctgtcctctcacctcagcctcccaaagtgctgggattacagggatgagccacagtgcctggccaatttaaaatttttaagtattttaaataaattgtaatttctattaagaattcaaggttaaggaatttaggcatttttattttaaatgatcactgcctcaaaaaaaattcttaactacgtaatacaatgttgactgcaatgaaagtagttatagacaaaatctaaaattcaattttttgctgggtgcggtggtgtgtgcccatagacttagctactcaacaggctgaggttgggggattgcttgaggccaggagtttgaggccagcagagacaacatagtgacatagtgagatcccatttctacaaaaaagaaaaaaaaaaatcccattttacaactaaccttacttagtctttcttcatggttatgaaaagcagtggtcctacttatattagctttttttttttccttcatagtgctaattataaatctgttagcctcggggatttgtttattcattcatttcagtcttcctctggaatatacattcttttttttttttttttaggcggagtttcactcttgttgcccaggatagagtgcaatggtgcgatcttggctcaccgcaacctctgcctcctgggttcaagtgattctcctgcctcagcctcccaagtagctggattacaggcatgcgccaccatgcccagctaattttgtatttttagtagagacagggtttctccatgttggtcaggctggtctcgaactcctaacctcaggtgatctgtctgcctcggcctcccaaagtgttgggattacaggcgtgagccactgcgcctggcctggaatgtacattcttaaaggcagaggccttatctgtcttaggcaagttggtatcctgaacagaacctgacagtaagactctgataaatatttgtcatatgaatatcaaaaaaaactagaaacaggctaaatgttcagtagggaggaactgtctaaaaaaattaaggtacagtgcgtaacacaacagaatactatgcagccatttaaaacaatcacatagaaatatgtttattgggaaagtaatgtaataacacccataacagagtaagatgataaatttaagaaaatctagatactttgctacagaacactttcttagggatgcttcacaaaaatgaacatgagaggtttctgctaagataaaatattggataagggaataatatctttgtttggaactggtaaatattacctactcctggagtaatacatttaaggaaactagagaacagatcagagataatatttaaaagtttaaggaactaacaaatttatagtgacagaaagcagataagtgcttgctggggaaagacgggggcaaggagagacaagaagtagaaattacaaaggggcatgaggaaactattgggtgtgacagatatgttctttttttattatagtgattgtttcacaggtgtttacaagtgtcaaatttatcaaattgtacattttaaatatgtacagtgtatgtcattgcatgtcatttaggtcattgtatgtcattttaatgtatgtcatttataactcaataaagctgttttaaaaaatc

SEQ ID NO: 191454 - DNA, 577 bp, Homo sapiens
  Payload ID: 17815
  Gene Name: TM2 domain containing 1
  ENST ID: ENST00000496465
  CDS Start-End: 25-255
ggcgagaaagtgtcggtctccaagatggcggccgcctggccgtctggtccgtctgctccggaggccgtgacggccagactcgttggtgtcctgtggttcgtctcagtcactacaggaccctggggggctgttgccacctccgccgggggcgaggagtcgcttaagtgcgaggacctcaaagtgggacaatatcctctgtggagaacacccccccatggaggcgaggtagagttggggtcgcagatccaaaaataaatgacgctacgcaagaaccagttaactgtacaaactacacagctcatgtttcctgttttccagcacccaacataacttgtaaggattccagtggcaatgaaacacattttactgggaacgaagttggttttttcaagcccatatcttgccgaaatgtaaatggctattcctacaaagtggcagtcgcattgtctctttttcttggatggttgggagcagatcgattttaccttggataccctgctttgggtttgttaaagttttgcactgtagggttttgtggaattgggagcctaattgatttcattcttatttcaatgca

SEQ ID NO: 191455 - DNA, 969 bp, Homo sapiens
  Payload ID: 17815
  Gene Name: TM2 domain containing 1
  Uniprot ID: Q9BX74
  ENST ID: ENST00000606498
  CDS Start-End: 22-645
gagaaagtgtcggtctccaagatggcggccgcctggccgtctggtccgtctgctccggaggccgtgacggccagactcgttggtgtcctgtggttcgtctcagtcactacaggaccctggggggctgttgccacctccgccgggggcgaggagtcgcttaagtgcgaggacctcaaagtgggacaatatatttgtaaagatccaaaaataaatgacgctacgcaagaaccagttaactgtacaaactacacagctcatgtttcctgttttccagcacccaacataacttgtaaggattccagtggcaatgaaacacattttactgggaacgaagttggttttttcaagcccatatcttgccgaaatgtaaatggctattcctacaaagtggcagtcgcattgtctctttttcttggatggttgggagcagatcgattttaccttggataccctgctttgggtttgttaaagttttgcactgtagggttttgtggaattgggagcctaattgatttcattcttatttcaatgcagattgttggaccttcagatggaagtagttacattatagattactatggaaccagacttacaagactgagtattactaatgaaacatttagaaaaacgcaattatatccataaatattttttaaaagaaacagatttgagcctccttgattttaatagagaacttctagtgtatggatttaaagatttctctttttcattcatataccattttatgagttctgtataattttttgtggtttttgttttgttgagttaaagtatattattgtgagatttatttaataggacttcctttgaaagctgtataatagtgtttctcgggcttctgtctctatgagagatagcttattactctgatactctttaatcttttacaaaggcaagttgccacttgtcatttttgtttctgaaaaataaaagtataacttattcaca

SEQ ID NO: 191456 - DNA, 544 bp, Homo sapiens
  Payload ID: 17815
  Gene Name: TM2 domain containing 1
  ENST ID: ENST00000494926
  CDS Start-End: 1-233
ggttcgtctcagtcactacaggaccctggggggctgttgccacctccgccgggggcgaggagtcgcttaagtgcgaggacctcaaagtgggacaatatcctctgtggagaacacccccccatggaggcgagggtcttactctgtcgccctggctggagtacagtggcacgatctcagctcactgcagcctccgcctcccgggttcagtcaattctcctgcctcagcctcctgagtagctgggactacaggcatgcgccaccacacccggtttcctgttttccagcacccaacataacttgtaaggattccagtggcaatgaaacacattttactgggaacgaagttggttttttcaagcccatatcttgccgaaatgtaaatggctattcctacaaagtggcagtcgcattgtctctttttcttggatggttgggagcagatcgattttaccttggataccctgctttgggtttgttaaagttttgcactgtagggttttgtggaattgggagcctaattgatttcattcttatttcaatgcag

SEQ ID NO: 191457 - DNA, 921 bp, Homo sapiens
  Payload ID: 17815
  Gene Name: TM2 domain containing 1
  ENST ID: ENST00000488206
  CDS Start-End: 1-314
ccgcctggccgtctggtccgtctgctccggaggccgtgacggccagactcgttggtgtcctgtggttcgtctcagtcactacaggaccctggggggctgttgccacctccgccgggggcgaggagtcgcttaagtgcgaggacctcaaagtgggacaatatcctctgtggagaacacccccccatggaggcgaggtagagttggggtcgcagggtcttactctgtcgccctggctggagtacagtggcacgatctcagctcactgcagcctccgcctcccgggttcagtcaattctcctgcctcagcctcctgagtagctgggactacaggcatgcgccaccacacccggatccaaaaataaatgacgctacgcaagaaccagttaactgtacaaactacacagctcatgtttcctgttttccagcacccaacataacttgtaaggattccagtggcaatgaaacacattttactgggaacgaagttggttttttcaagcccatatcttgccgaaatgtaaatggctattcctacaaagtggcagtcgcattgtctctttttcttggatggttgggagcagatcgattttaccttggataccctgctttgggtttgttaaagttttgcactgtagggttttgtggaattgggagcctaattgatttcattcttatttcaatgcagattgttggaccttcagatggaagtagttacattatagattactatggaaccagacttacaagactgagtattactaatgaaacatttagaaaaacgcaattatatccataaatattttttaaaagaaacagatttgagcctccttgattttaatagagaacttctagtgtatggatttaaagatttctctttttcattcatataccattttatgagttctgtataattttttgtgg

SEQ ID NO: 191458 - DNA, 1631 bp, Homo sapiens
  Payload ID: 17816
  Gene Name: TM2 domain containing 2
  Uniprot ID: Q9BX73
  ENST ID: ENST00000397070
  CDS Start-End: 589-1104
agttcttgggtctgtgctgctggcctggggttgtggttgaggccgggtctccgctcctgtgcccgggaagatggtgctaggtggttgcccggttagttacttacttctgtgcggccaggcggctttgctgctggggaatttacttctgctgcattgtgtgtctcggagccactcgcaaaatgcgaccgctgagcctgagctcacatccgctggcgccgcccagccggagggccccgggggtgctgcgagctgggaatatggcgacccccactctccggtcatcctctgctcttacctaatcacgccattttttaacatctctttttgatcaaacaagaaaaggcatttgggaaatgcaaagaggactgagaatactttggcttaaattttgcccccagaatcttgttgtttgcctactgaagagatgaaaccatggcagaagtagaatccttatagaaacaggaccagaaacacctcccttctccaacaaaaggttcattttggtggctgtccgtttgacctgctgtgcttcagtttaattggcttggaaaggggtcagcagggtgaaaccgaaccccagaaaacttgatgaagaaatgtcttttgcccgttttgattacgtgcatgcaaacagcgatttgcaaagaccgtatgatgatgatcatgatcttactggtgaattacagacctgatgaatttatagaatgtgaagacccagtggatcatgttggaaatgcaactgcatcccaggaacttggttatggttgtctcaagttcggcggtcaggcctacagcgacgtggaacacacttcagtccagtgccatgccttagatggaattgagtgtgccagtcctaggacctttctacgagaaaataaaccttgtataaagtataccggacactacttcataaccactttactctactccttcttcctgggatgttttggtgtggatcgattctgtttgggacacactggcactgcagtagggaagctgttgacgcttggaggacttgggatttggtggtttgttgaccttattttgctaattactggagggctgatgccaagtgatggcagcaactggtgcactgtttactaagaagagctgccatcatggcccagggaggcgggtgaaagctccgtcttctgaattcatctctacaggctcaaaactcctctttgatatcagacctgatgttattttccttcttttggagggcatttgtttggttaagaaggcttctttggactttggaatttcaacccagattttaccttgcagacggaatgacaagcaaaaagtgttgtggggaatcaaatttgttcctttcctcatgcacaaaacataaaggatagtggcgagtttacaagctgtggatgggtttccatagtcttcctttctgtacattgctatatcttcagtcctttggagcaagtggacctaacaagttgagcaaaatgaatatttggatccatgttcctcttgtgaccctgagtcttcatgcaaggagatctgaagctgaacaatgaaaatcttcagcagaaatagaaatggccgtggattgtaatacacactgaaattctgactttctgaatttaaatgtagaataaattttaccaacttgg

SEQ ID NO: 191459 - DNA, 3295 bp, Homo sapiens
  Payload ID: 17816
  Gene Name: TM2 domain containing 2
  Uniprot ID: Q9BX73
  ENST ID: ENST00000456845
  CDS Start-End: 256-771
ggggttgtggttgaggccgggtctccgctcctgtgcccgggaagatggtgctaggtggttgcccgaatcttgttgtttgcctactgaagagatgaaaccatggcagaagtagaatccttatagaaacaggaccagaaacacctcccttctccaacaaaaggttcattttggtggctgtccgtttgacctgctgtgcttcagtttaattggcttggaaaggggtcagcagggtgaaaccgaaccccagaaaacttgatgaagaaatgtcttttgcccgttttgattacgtgcatgcaaacagcgatttgcaaagaccgtatgatgatgatcatgatcttactggtgaattacagacctgatgaatttatagaatgtgaagacccagtggatcatgttggaaatgcaactgcatcccaggaacttggttatggttgtctcaagttcggcggtcaggcctacagcgacgtggaacacacttcagtccagtgccatgccttagatggaattgagtgtgccagtcctaggacctttctacgagaaaataaaccttgtataaagtataccggacactacttcataaccactttactctactccttcttcctgggatgttttggtgtggatcgattctgtttgggacacactggcactgcagtagggaagctgttgacgcttggaggacttgggatttggtggtttgttgaccttattttgctaattactggagggctgatgccaagtgatggcagcaactggtgcactgtttactaagaagagctgccatcatggcccagggaggcgggtgaaagctccgtcttctgaattcatctctacaggctcaaaactcctctttgatatcagacctgatgttattttccttcttttggagggcatttgtttggttaagaaggcttctttggactttggaatttcaacccagattttaccttgcagacggaatgacaagcaaaaagtgttgtggggaatcaaatttgttcctttcctcatgcacaaaacataaaggatagtggcgagtttacaagctgtggatgggtttccatagtcttcctttctgtacattgctatatcttcagtcctttggagcaagtggacctaacaagttgagcaaaatgaatatttggatccatgttcctcttgtgaccctgagtcttcatgcaaggagatctgaagctgaacaatgaaaatcttcagcagaaatagaaatggccgtggattgtaatacacactgaaattctgactttctgaatttaaatgtagaataaattttaccaacttggagtactgtatgagtattttcagtagggggaataaactcaaaattatatttgttttgcagaaacctagtcatttgaaatgagccatcctattaagccctcttttgtctccattatgttccagaggcagtatatgcagtgcaataattttttcattccacttatgttttgaaagccagcggcatcagatgtgtgagttgagctattcctcctggcagaattgtccaatctaaaaatcagcgtttaccagcccatgctaataaaattaagatttcatacaagtttctgtaaaactattcttcatgattagctctccctgtgggctgcagcagtcagaaagagataacagccacacctctgcattccccggtcaccaggaataaaaggaaatgttccagattgtaagtggttttaaaaactcagttctcatcgtttgcaatctaagttgaaagaactattaaatataaaatcaaaggtgggcaatgtggccaagtcaatggaagaggctttactcagaataacttacaaattctagaaacaaggtagaactcactcagtttacctaataataattgaatttaagaccaaatatcacagttgaaataacttccctggatacattctatcattttgtagctttcctaagaatttcttgctttatcattcctgattaatcactgtttttacattattaaaggtggcaattttctgtaaaaaatttaaaacagatgatcctattctgtcttgaaagttctgtaccacactgaccttaaccttgcttataacataacaattggtaaacttttaattcataatctttataccctaagatagtatttattaaatttttatgggtcatgaagaaactagaccctctccccagaaaaatctacatacacagaatttacatagaacttgggttcatctacacaatttatgcatgaaataaaattgtactggtaccctataaatttatacaaataaaagagtttaagggagttcaaggatgccatatgtatattttaaaaaaatttctaagggaagtctaaaaaacataaattataatattacccaaaataagatgctacttttcacctaaccaagtcctgcctcatttcacactttaacctcctaagtatattcataaccctaccaaaagttgttttctttaaaaaataagaaactttagggccagcgcaatggtgcaagcctgtaatccctgcactttgggaggccgaggcaggtgaatcctttaaggtcaggagttcgagaccagcctggccaacatggtgagacacactcccccacccccgcccagtctctagtaaaaatgcaaaaattagccgggcgtggtggcgtgcacctgtaatcccagctactcgggaggctgaggtaagagaatcacttgaactgaggaggcagagattgcagtgagccgagatcctgccactgcacttcagcctgggcaacagagtgagactctgaccaaaaaagaaattttgcagctccaaggcttgaagtcatttatgttgccaggggtaagagcttggttgaagggctaaaagactagaaactactgaagatgcccttcttactgtcagtaaagctgctggagacaaaagaagttgttctcgctgctagagtggtaatttgagaatcatcagtattcctatgtgacaatccaaaattactggttttcatttgacttgtaaatgacacccatcatccatctgcccacaaacctggccaaatgtgatacaacctgaaaacctgatggactaaaggagtactatttaacaattgattgcctttgcactttattcaggttgtttcttaaattttggtagacagatccatttgtatatgtgtgtgttatatctagtttatggctatagagaaggtttaaaatactacagtgtccttccctcaaggttaaattagaagctgcctgccttttagttgtttcttgcctttaataaaatgttatcagttcccccaga

SEQ ID NO: 191460 - DNA, 3263 bp, Homo sapiens
  Payload ID: 17816
  Gene Name: TM2 domain containing 2
  Uniprot ID: Q9BX73
  ENST ID: ENST00000456397
  CDS Start-End: 95-739
ctacgcggaaaggcctgaccacgcagttcttgggtctgtgctgctggcctggggttgtggttgaggccgggtctccgctcctgtgcccgggaagatggtgctaggtggttgcccggttagttacttacttctgtgcggccaggcggctttgctgctggggaatttacttctgctgcattgtgtgtctcggagccactcgcaaaatgcgaccgctgagcctgagctcacatccgctggcgccgcccagccggagggccccgggggtgctgcgagctgggaatatggcgacccccactctccggtcatcctctgctcttacctacctgatgaatttatagaatgtgaagacccagtggatcatgttggaaatgcaactgcatcccaggaacttggttatggttgtctcaagttcggcggtcaggcctacagcgacgtggaacacacttcagtccagtgccatgccttagatggaattgagtgtgccagtcctaggacctttctacgagaaaataaaccttgtataaagtataccggacactacttcataaccactttactctactccttcttcctgggatgttttggtgtggatcgattctgtttgggacacactggcactgcagtagggaagctgttgacgcttggaggacttgggatttggtggtttgttgaccttattttgctaattactggagggctgatgccaagtgatggcagcaactggtgcactgtttactaagaagagctgccatcatggcccagggaggcgggtgaaagctccgtcttctgaattcatctctacaggctcaaaactcctctttgatatcagacctgatgttattttccttcttttggagggcatttgtttggttaagaaggcttctttggactttggaatttcaacccagattttaccttgcagacggaatgacaagcaaaaagtgttgtggggaatcaaatttgttcctttcctcatgcacaaaacataaaggatagtggcgagtttacaagctgtggatgggtttccatagtcttcctttctgtacattgctatatcttcagtcctttggagcaagtggacctaacaagttgagcaaaatgaatatttggatccatgttcctcttgtgaccctgagtcttcatgcaaggagatctgaagctgaacaatgaaaatcttcagcagaaatagaaatggccgtggattgtaatacacactgaaattctgactttctgaatttaaatgtagaataaattttaccaacttggagtactgtatgagtattttcagtagggggaataaactcaaaattatatttgttttgcagaaacctagtcatttgaaatgagccatcctattaagccctcttttgtctccattatgttccagaggcagtatatgcagtgcaataattttttcattccacttatgttttgaaagccagcggcatcagatgtgtgagttgagctattcctcctggcagaattgtccaatctaaaaatcagcgtttaccagcccatgctaataaaattaagatttcatacaagtttctgtaaaactattcttcatgattagctctccctgtgggctgcagcagtcagaaagagataacagccacacctctgcattccccggtcaccaggaataaaaggaaatgttccagattgtaagtggttttaaaaactcagttctcatcgtttgcaatctaagttgaaagaactattaaatataaaatcaaaggtgggcaatgtggccaagtcaatggaagaggctttactcagaataacttacaaattctagaaacaaggtagaactcactcagtttacctaataataattgaatttaagaccaaatatcacagttgaaataacttccctggatacattctatcattttgtagctttcctaagaatttcttgctttatcattcctgattaatcactgtttttacattattaaaggtggcaattttctgtaaaaaatttaaaacagatgatcctattctgtcttgaaagttctgtaccacactgaccttaaccttgcttataacataacaattggtaaacttttaattcataatctttataccctaagatagtatttattaaatttttatgggtcatgaagaaactagaccctctccccagaaaaatctacatacacagaatttacatagaacttgggttcatctacacaatttatgcatgaaataaaattgtactggtaccctataaatttatacaaataaaagagtttaagggagttcaaggatgccatatgtatattttaaaaaaatttctaagggaagtctaaaaaacataaattataatattacccaaaataagatgctacttttcacctaaccaagtcctgcctcatttcacactttaacctcctaagtatattcataaccctaccaaaagttgttttctttaaaaaataagaaactttagggccagcgcaatggtgcaagcctgtaatccctgcactttgggaggccgaggcaggtgaatcctttaaggtcaggagttcgagaccagcctggccaacatggtgagacacactcccccacccccgcccagtctctagtaaaaatgcaaaaattagccgggcgtggtggcgtgcacctgtaatcccagctactcgggaggctgaggtaagagaatcacttgaactgaggaggcagagattgcagtgagccgagatcctgccactgcacttcagcctgggcaacagagtgagactctgaccaaaaaagaaattttgcagctccaaggcttgaagtcatttatgttgccaggggtaagagcttggttgaagggctaaaagactagaaactactgaagatgcccttcttactgtcagtaaagctgctggagacaaaagaagttgttctcgctgctagagtggtaatttgagaatcatcagtattcctatgtgacaatccaaaattactggttttcatttgacttgtaaatgacacccatcatccatctgcccacaaacctggccaaatgtgatacaacctgaaaacctgatggactaaaggagtactatttaacaattgattgcctttgcactttattcaggttgtttcttaaattttggtagacagatccatttgtatatgtgtgtgttatatctagtttatggctatagagaaggtttaaaatactacagtgtccttccctcaaggttaaattagaagctgcctgccttttagttgtttcttgcctttaataaaatgttatcagttcccccaga

SEQ ID NO: 191461 - DNA, 549 bp, Homo sapiens
  Payload ID: 17816
  Gene Name: TM2 domain containing 2
  ENST ID: ENST00000520152
  CDS Start-End: 415-549
aaaccggcggtggcaaccagcactagtcggcccgccagtcatatccgccccgccccgtcggctgccgggcacgcccacctaggggggtcgacggatccgattggagaacgcattcggcgcaaaagaaggaggagcatgagacccagaagaggaatcgagaagcagaagcagagggcggagtagccccgcccgtctgctcgaccttttctagttggttggcggagaatcttgttgtttgcctactgaagagatgaaaccatggcagaagtagaatccttatagaaacaggaccagaaacacctcccttctccaacaaaaggttcattttggtggctgtccgtttgacctgctgtgcttcagtttaattggcttggaaaggggtcagcagggtgaaaccgaaccccagaaaacttgatgaagaaatgtcttttgcccgttttgattacgtgcatgcaaacagcgatttgcaaagaccgtatgatgatgatcatgatcttactggtgaattacagacctgatgaatttatagaatgtgaagacccagtggat

SEQ ID NO: 191462 - DNA, 885 bp, Homo sapiens
  Payload ID: 17816
  Gene Name: TM2 domain containing 2
  ENST ID: ENST00000522142
  CDS Start-End: 524-885
ggatttctaaaccggcggtggcaaccagcactagtcggcccgccagtcatatccgccccgccccgtcggctgccgggcacgcccacctaggggggtcgacggatccgattggagaacgcattcggcgcaaaagaaggaggagcatgagacccagaagaggaatcgagaagcagaagcagagggcggagtagccccgcccgtctgctcgaccttttctagttggttggcggagaatcacgccattttttaacatctctttttgatcaaacaagaaaaggcatttgggaaatgcaaagaggactgagaatactttggcttaaattttgcccccagaatcttgttgtttgcctactgaagagatgaaaccatggcagaagtagaatccttatagaaacaggaccagaaacacctcccttctccaacaaaaggttcattttggtggctgtccgtttgacctgctgtgcttcagtttaattggcttggaaaggggtcagcagggtgaaaccgaaccccagaaaacttgatgaagaaatgtcttttgcccgttttgattacgtgcatgcaaacagcgatttgcaaagaccgtatgatgatgatcatgatcttactggtgaattacagacctgatgaatttatagaatgtgaagacccagtggatcatgttggaaatgcaactgcatcccaggaacttggttatggttgtctcaagttcggcggtcaggcctacagcgacgtggaacacacttcagtccagtgccatgccttagatggaattgagtgtgccagtcctaggacctttctacgagaaaataaaccttgtataaagtataccggacactacttcataaccactttactctactccttcttcctgggatgttttgg

SEQ ID NO: 191463 - DNA, 570 bp, Homo sapiens
  Payload ID: 17816
  Gene Name: TM2 domain containing 2
  ENST ID: ENST00000517872
  CDS Start-End: 383-570
agttcttgggtctgtgctgctggcctggggttgtggttgaggccgggtctccgctcctgtgcccgggaagatggtgctaggtggttgcccgaatcacgccattttttaacatctctttttgatcaaacaagaaaaggcatttgggaaatgcaaagaggactgagaatactttggcttaaattttgcccccagaatcttgttgtttgcctactgaagagatgaaaccatggcagaagtagaatccttatagaaacaggaccagaaacacctcccttctccaacaaaaggttcattttggtggctgtccgtttgacctgctgtgcttcagtttaattggcttggaaaggggtcagcagggtgaaaccgaaccccagaaaacttgatgaagaaatgtcttttgcccgttttgattacgtgcatgcaaacagcgatttgcaaagaccgtatgatgatgatcatgatcttactggtgaattacagacctgatgaatttatagaatgtgaagacccagtggatcatgttggaaatgcaactgcatcccaggaacttggttatggttgtctcaaggt

SEQ ID NO: 191464 - DNA, 1329 bp, Homo sapiens
  Payload ID: 17817
  Gene Name: TM2 domain containing 3
  Uniprot ID: Q9BRN9
  ENST ID: ENST00000347970
  CDS Start-End: 31-696
ccggcccggaagtgcgcaggcgctggcaagatggcgggaggggtgctcccgctgaggggcctccgcgccttgtgtcgcgtgctgctcttcctctcgcagttctgcattctgtcgggcggtgaaagtactgaaatcccaccttatgtgatgaagtgtccgagcaatggtttgtgtagcaggcttcctgcagactgtatagactgcacaacaaatttctcctgtacctatgggaagcctgtcacttttgactgtgcagtgaaaccatctgttacctgtgttgatcaagacttcaaatcccaaaagaacttcatcattaacatgacttgcagattttgctggcagcttcctgaaacagattacgagtgtaccaactccaccagctgcatgacggtgtcctgtcctcggcagcgctaccctgccaactgcacggtgcgggaccacgtccactgcttgggtaaccgtacttttcccaaaatgctatattgcaattggactggaggctataagtggtctacggctctggctctaagcatcaccctcggtgggtttggagcagaccgtttctacctgggccagtggcgggaaggcctcggcaagctcttcagcttcggtggcctgggaatatggacgctgatagacgtcctgctcattggagttggctatgttggaccagcagatggctctttgtacatttagctgtggtgtgtgcttcagaaaggagcagggcttagaaaaagcccttttgtccgtaggagttgatgtggtgtgagtgatatatttctatgtttttaatgtacagcatctgtactttgtttgccttgataaaggtaagataaatgaaacgctgaactatgctaatctggaatttgtttttatttgcctgaaatatatttttttctgtgaaaaaattaaaacgtacttaagccaggagaatgaattatacagtgattgaaaatccatttaattcctatgacttttgttttgtattgcccaagtcaaactacatcacttgtatctccagcccaaatgtagtctgccttgaaaagtctttcagctgtgactgcaggaagtgggagtgtttttattgttagctaattgctgtgactgcaggaagtgggagtgtttctgttgttggctaattgaagttattaggctcagcttcagtcatgtgtaagttttgcagtgtaatacatatgtagtctggtctgtatatatgaaaatttgaattaaactgcagaatgtttatgtctagttatggtttaaattttcttagtagtatataaaaggtaagagtactgaaaaattaataaaattgcaagttaagaaata

SEQ ID NO: 191465 - DNA, 1381 bp, Homo sapiens
  Payload ID: 17817
  Gene Name: TM2 domain containing 3
  Uniprot ID: Q9BRN9
  ENST ID: ENST00000333202
  CDS Start-End: 7-750
ggcaagatggcgggaggggtgctcccgctgaggggcctccgcgccttgtgtcgcgtgctgctcttcctctcgcagttctgcattctgtcgggcggtgagcaatcgcaggcgctggctcagtcaataaaggatccgggcccaacacgcacattcacagtagttcccagggcagcagaaagtactgaaatcccaccttatgtgatgaagtgtccgagcaatggtttgtgtagcaggcttcctgcagactgtatagactgcacaacaaatttctcctgtacctatgggaagcctgtcacttttgactgtgcagtgaaaccatctgttacctgtgttgatcaagacttcaaatcccaaaagaacttcatcattaacatgacttgcagattttgctggcagcttcctgaaacagattacgagtgtaccaactccaccagctgcatgacggtgtcctgtcctcggcagcgctaccctgccaactgcacggtgcgggaccacgtccactgcttgggtaaccgtacttttcccaaaatgctatattgcaattggactggaggctataagtggtctacggctctggctctaagcatcaccctcggtgggtttggagcagaccgtttctacctgggccagtggcgggaaggcctcggcaagctcttcagcttcggtggcctgggaatatggacgctgatagacgtcctgctcattggagttggctatgttggaccagcagatggctctttgtacatttagctgtggtgtgtgcttcagaaaggagcagggcttagaaaaagcccttttgtccgtaggagttgatgtggtgtgagtgatatatttctatgtttttaatgtacagcatctgtactttgtttgccttgataaaggtaagataaatgaaacgctgaactatgctaatctggaatttgtttttatttgcctgaaatatatttttttctgtgaaaaaattaaaacgtacttaagccaggagaatgaattatacagtgattgaaaatccatttaattcctatgacttttgttttgtattgcccaagtcaaactacatcacttgtatctccagcccaaatgtagtctgccttgaaaagtctttcagctgtgactgcaggaagtgggagtgtttttattgttagctaattgctgtgactgcaggaagtgggagtgtttctgttgttggctaattgaagttattaggctcagcttcagtcatgtgtaagttttgcagtgtaatacatatgtagtctggtctgtatatatgaaaatttgaattaaactgcagaatgtttatgtctagttatggtttaaattttcttagtagtatataaaaggtaagagtactgaaaaattaataaaattgcaagttaagaaa

SEQ ID NO: 191466 - DNA, 1267 bp, Homo sapiens
  Payload ID: 17817
  Gene Name: TM2 domain containing 3
  ENST ID: ENST00000428002
  CDS Start-End: 16-567
gcaggcgctggcaagatggcgggaggggtgctcccgctgaggggcctccgcgccttgtgtcgcgtgctgctcttcctctcgcagttctgcattctgtcgggcggtgaaagtactgaaatcccaccttatgtgatgaagtgtccgagcaatggtttgtgtagcaggcttcctgcagactgtatagactgcacaacaaatttctcctgtacctatgggaagcctgtcacttttgactgtgcagtgaaaccatctgttacctgtgttgatcaagacttcaaatcccaaaagaacttcatcattaacatgacttgcagattttgctggcagcttcctgaaacagattacgagtgtaccaactccaccagctgcatgacggtgtcctgtcctcggcagcgctaccctgccaactgcacggtgcgggaccacgtccactgcttgggtaaccgtacttttcccaaaatgctatattgcaattggactggaggctataagtggtctacggctctggctctaagtctgcaggcccaggtggggcttcatgttcagctcactgttggacttcattgacatcaccctgaaaaaggtggatttttgaggagcgtgagaagaagagcatgagaagtgctgaattacactgtgttgttgcagatgagcgtccctaaccacagcagtccttgaagaagaaagatggtctgataggaactgcttattcaggaacacattgcaaaatctgtgggtgtccttcgggatctgagggcctcactcctacaactgcaaggaattgaattcttctaacagtgtgatgaggttggaagaagactccaagatccagaaaggaacacagtcccaccaacacctgtgttgtaacctggtgacaccctgaaacagagaatccagctaagcgatgcccaaaatattcatccacaacgtgttgttttaagcttccaagtttctagtaatttgttataaagcaatagaaaagtaatatatcctttccgaggctcatcttcattccaaacgttccacatttccttctgttatcatttattttctgtcggaattacttcctccagcaaaaaaatttttaaggcagttctgctggtaacaaattttcttagattttcttcatctgagaatatctttatttcaccctcatacttgaaagttagttttgccaaacatagaattctgggtgacagtttttctttttctttcagcacttgaaaagtcttatgacacgtccttctggccttcatgatttctgctg

SEQ ID NO: 191467 - DNA, 1734 bp, Homo sapiens
  Payload ID: 17817
  Gene Name: TM2 domain containing 3
  ENST ID: ENST00000561373
  CDS Start-End: 558-1106
tgtggcttatcgaagtaccagtgtgaaataatgacattttaaagttgatgccctgaggatgtcagtggcttcatttctgaattagtgaattcagatgaaaagaacacgggattggaaatggagagatttgggttctagttccagttttgccacagacttcctctgtgattttgcaaaaccctactgtaagttttttttcaacttacaaaatgatagtcttttttttaagcccttaatgtatacccagaattttctatacattatttgtatatgagcacctttagttttcacggccacgtgggaggcaggaatgaagtaatgttttacaagtgtggtgctcaccaggtcccacagctggccgtgggcagaattctgctttaattgcaggtgtctctgactccagtcccatgcttcttcccttccagtgcagtgtctacttgctaatgatcacgtctcttaaccttagaagattgttctctgttattcgaatcagtattataggagaataagcttctctcttgcctctcacagaaagtactgaaatcccaccttatgtgatgaagtgtccgagcaatggtttgtgtagcaggcttcctgcagactgtatagactgcacaacaaatttctcctgtacctatgggaagcctgtcacttttgactgtgcagtgaaaccatctgttacctgtgttgatcaagacttcaaatcccaaaagaacttcatcattaacatgacttgcagattttgctggcagcttcctgaaacagattacgagtgtaccaactccaccagctgcatgacggtgtcctgtcctcggcagcgctaccctgccaactgcacggtgcgggaccacgtccactgcttgggtaaccgtacttttcccaaaatgctatattgcaattggactggaggctataagtggtctacggctctggctctaagcatcaccctcggtgggtttggagcagaccgtttctacctgggccagtggcgggaaggcctcggcaagctcttcagcttcggtggcctgggaatatggacgctgatagacgtcctgctcattggagttggctatgttggaccagcagatggctctttgtacatttagctgtggtgtgtgcttcagaaaggagcagggcttagaaaaagcccttttgtccgtaggagttgatgtggtgtgagtgatatatttctatgtttttaatgtacagcatctgtactttgtttgccttgataaaggtaagataaatgaaacgctgaactatgctaatctggaatttgtttttatttgcctgaaatatatttttttctgtgaaaaaattaaaacgtacttaagccaggagaatgaattatacagtgattgaaaatccatttaattcctatgacttttgttttgtattgcccaagtcaaactacatcacttgtatctccagcccaaatgtagtctgccttgaaaagtctttcagctgtgactgcaggaagtgggagtgtttttattgttagctaattgctgtgactgcaggaagtgggagtgtttctgttgttggctaattgaagttattaggctcagcttcagtcatgtgtaagttttgcagtgtaatacatatgtagtctggtctgtatatatgaaaatttgaattaaactgcagaatgtttatgtctagttatggtttaaattttcttagtagtatataaaaggtaagagtactgaaaaattaataaaattgcaagttaag

SEQ ID NO: 191468 - DNA, 1868 bp, Homo sapiens
  Payload ID: 17817
  Gene Name: TM2 domain containing 3
  ENST ID: ENST00000560013
  CDS Start-End: 31-159
ccggcccggaagtgcgcaggcgctggcaagatggcgggaggggtgctcccgctgaggggcctccgcgccttgtgtcgcgtgctgctcttcctctcgcagttctgcattctgtcgggcggtggtgagtcaaaggctgggttcagcgccgggtggggctgagtggcagcagggccccgggagctgcgaggaggccgggcccacgggcggacgctgacgcggggaggaggccgagtgccgggctccgggccgcttgtcgctgcatctggagtctggcgccctggccgcccggcccgaggccgcccctccgctccggcgacaccgagcccgccatcgcggctgcggagccctggcacggagatggagcgcttgggggctgggccggggaggcggaactggagcgcgatgtcatccttcggtccctcgttgccggctgacctgaactgatgtctactctgttgacgtttcgtccctaagctttgtgttttctggctgaccagccgtgaggttttcatgagcagcttattggcctggtgtagacccgccgtgttaaccacacaaaataaggttttcttgtcccgggataacgtgtttctctaattgtacgatccttaaatttagagcaatcgcaggcgctggctcagtcaataaaggatccgggcccaacacgcacattcacagtagttcccagggcagcagaaagtactgaaatcccaccttatgtgatgaagtgtccgagcaatggtttgtgtagcaggcttcctgcagactgtatagactgcacaacaaatttctcctgtacctatgggaagcctgtcacttttgactgtgcagtgaaaccatctgttacctgtgttgatcaagacttcaaatcccaaaagaacttcatcattaacatgacttgcagattttgctggcagcttcctgaaacagattacgagtgtaccaactccaccagctgcatgacggtgtcctgtcctcggcagcgctaccctgccaactgcacggtgcgggaccacgtccactgcttgggtaaccgtacttttcccaaaatgctatattgcaattggactggaggctataagtggtctacggctctggctctaagcatcaccctcggtgggtttggagcagaccgtttctacctgggccagtggcgggaaggcctcggcaagctcttcagcttcggtggcctgggaatatggacgctgatagacgtcctgctcattggagttggctatgttggaccagcagatggctctttgtacatttagctgtggtgtgtgcttcagaaaggagcagggcttagaaaaagcccttttgtccgtaggagttgatgtggtgtgagtgatatatttctatgtttttaatgtacagcatctgtactttgtttgccttgataaaggtaagataaatgaaacgctgaactatgctaatctggaatttgtttttatttgcctgaaatatatttttttctgtgaaaaaattaaaacgtacttaagccaggagaatgaattatacagtgattgaaaatccatttaattcctatgacttttgttttgtattgcccaagtcaaactacatcacttgtatctccagcccaaatgtagtctgccttgaaaagtctttcagctgtgactgcaggaagtgggagtgtttttattgttagctaattgctgtgactgcaggaagtgggagtgtttctgttgttggctaattgaagttattaggctcagcttcagtcatgtgtaagttttgcagtgtaatacatatgtagtctggtctgtatatatgaaaatttgaattaaactgcagaatgtttatgtctagttatggtttaaattttcttagtagtatataaaaggtaagag

SEQ ID NO: 191469 - DNA, 864 bp, Homo sapiens
  Payload ID: 17817
  Gene Name: TM2 domain containing 3
  ENST ID: ENST00000558129
  CDS Start-End: 1-485
aaagtactgaaatcccaccttatgtgatgaagtgtccgagcaatggtttgtgtagcaggcttcctgcagactgtatagactgcacaacaaatttctcctgtacctatgggaagcctgtcacttttgactgtgcagtgaaaccatctgttacctgtgttgatcaagacttcaaatcccaaaagaacttcatcattaacatgacttgcagattttgctggcagcttcctgaaacagattacgagtgtaccaactccaccagctgcatgacggtgtcctgtcctcggcagcgctaccctgccaactgcacggtgcgggaccacgtccactgcttgggtaaccgtacttttcccaaaatgctatattgcaattggactggaggctataagtggtctacggctctggctctaagagttggactcttcatcgacactgtgaccacaccactgcactccagcctgagccacagagcgagacactgtctctaaaaaataaaagaaaaagaaaacacaataacaagtattgatgagaatgtggagaaattggaaccttcatatattgctggtggggatgtaaagtgatgtagctgcccaggaaaacagtctggcaatttgtgaaaatgttaaacatagagttaccatgtgacttggggaatcttctaggtatacacccaagagaagtggagatatgttgtgaaagttgtcagcaccaaaatggggtcacttaggtcaaaccctagcaaaatgaatccgggaggccctgaaggaggagtactcacgcacatgtacctatgataagaactattacaaggactccctggaaaccataaacactccatgttaagctgctgctgtgaagacatctccc

SEQ ID NO: 191470 - DNA, 1353 bp, Homo sapiens
  Payload ID: 17817
  Gene Name: TM2 domain containing 3
  ENST ID: ENST00000559107
  CDS Start-End: 24-653
ggaagtgcgcaggcgctggcaagatggcgggaggggtgctcccgctgaggggcctccgcgccttgtgtcgcgtgctgctcttcctctcgcagttctgcattctgtcgggcggtgagcaatcgcaggcgctggctcagtcaataaaggatccgggcccaacacgcacattcacagtagttcccagggcagcagaaagtactgaaatcccaccttatgtgatgaagtgtccgagcaatggtttgtgtagcaggcttcctgcagactgtatagactgcacaacaaatttctcctgtacctatgggaagcctgtcacttttgactgtgcagtgaaaccatctgttacctgtgttgatcaagacttcaaatcccaaaagaacttcatcattaacatgacttgcagattttgctggcagcttcctgaaacagattacgagtgtaccaactccaccagctgcatgacggtgtcctgtcctcggcagcgctaccctgccaactgcacggtgcgggaccacgtccactgcttgggtaaccgtacttttcccaaaatgctatattgcaattggactggaggctataagtggtctacggctctggctctaagtctgcaggcccaggtggggcttcatgttcagctcactgttggacttcattgacatcaccctgaaaaaggtggatttttgaggagcgtgagaagaagagcatgagaagtgctgaattacactgtgttgttgcagatgagcgtccctaaccacagcagtccttgaagaagaaagatggtctgataggaactgcttattcaggaacacattgcaaaatctgtgggtgtccttcgggatctgagggcctcactcctacaactgcaaggaattgaattcttctaacagtgtgatgaggttggaagaagactccaagatccagaaaggaacacagtcccaccaacacctgtgttgtaacctggtgacaccctgaaacagagaatccagctaagcgatgcccaaaatattcatccacaacgtgttgttttaagcttccaagtttctagtaatttgttataaagcaatagaaaagtaatatatcctttccgaggctcatcttcattccaaacgttccacatttccttctgttatcatttattttctgtcggaattacttcctccagcaaaaaaatttttaaggcagttctgctggtaacaaattttcttagattttcttcatctgagaatatctttatttcaccctcatacttgaaagttagttttgccaaacatagaattctgggtgacagtttttctttttctttcagcacttgaaaagtcttatgacacgtccttctggccttcatgatttctgctg

SEQ ID NO: 191471 - DNA, 878 bp, Homo sapiens
  Payload ID: 17817
  Gene Name: TM2 domain containing 3
  ENST ID: ENST00000558677
  CDS Start-End: 1-65
cgcagttctgcattctgtcgggcggtggtgagtcaaaggctgggttcagcgccgggtggggctgagtggcagcagggccccgggagctgcgaggaggccgggcccacgggcggacgctgacgcggggaggaggccgagtgccgggctccgggccgcttgtcgctgcatctggagtctggcgccctggccgcccggcccgaggccgcccctccgctccggcgacaccgagcccgccatcgcggctgcggagccctggcacggagatggagcgcttgggggctgggccggggaggcggaactggagcgcgatgtcatccttcggtccctcgttgccggctgacctgaactgatgtctactctgttgacgtttcgtccctaagctttgtgttttctggctgaccagccgtgaggttttcatgagcagcttattggcctggtgtagacccgccgtgttaaccacacaaaataagaaagtactgaaatcccaccttatgtgatgaagtgtccgagcaatggtttgtgtagcaggcttcctgcagactgtatagactgcacaacaaatttctcctgtacctatgggaagcctgtcacttttgactgtgcagtgaaaccatctgttacctgtgttgatcaagacttcaaatcccaaaagaacttcatcattaacatgacttgcagattttgctggcagcttcctgaaacagattacgagtgtaccaactccaccagctgcatgacggtgtcctgtcctcggcagcgctaccctgccaactgcacggtgcgggaccacgtccactgcttgggtaaccgtacttttcccaaaatgctatattgcaattggactggaggctataagtggtctacggctctggctctaa

SEQ ID NO: 191472 - DNA, 964 bp, Homo sapiens
  Payload ID: 17818
  Gene Name: TM4SF19-TCTEX1D2 readthrough (NMD candidate)
  ENST ID: ENST00000442633
  CDS Start-End: 112-741
gacaaccttcaggtccagccctggagctggaggagtggagccccactctgaagacgcagcctttctccaggttctgtctctcccattctgattcttgacaccagatgcaggatggtgtcctctccctgcacgcaggcaagctcacggacttgctcccgtatcctgggactgagccttgggactgcagccctgtttgctgctggggccaacgtggcactcctccttcctaactgggatgtcacctacctgttgaggggcctccttggcaggcatgccatgctgggaactgggctctggggaggaggcctcatggtactcactgcagctatcctcatctccttgatgggctggagatacggctgcttcagtaagagtgggctctgtcgaagcgtgcttactgctctgttgtcaggtggcctggctttacttggagccctgatttgctttgtcacttctggagttgctctgaaagatggtcctttttgcatgtttgatgtttcatccttcaatcagacacaagcttggaaatatggttacccattcaaagacctgcatagtaggaattatctgtatgaccgttcgctctggaactccgtctgcctggagccctctgcagctgttgtctggcacgtgtccctcttctccgcccttctgtgcatcagcctgctccagcttctcctggtggtcgttcatgtcatcaacagcctcctgggccttttctgcagcctctgcgagaagtgacaggcagaaccttcacttgcaagcatgggtgttttcatcatcggctgtcttgaatcctttctacaaggagtgggttcaggccctctgtggttaaagactgtatccatgctgtgctcaaggaggaactggcaaatgctgaatattctccagaagaaatgcctcagcttacaaaacatttatcagaaaacattaaagataaattaaaaggtaatcatggtgataa

SEQ ID NO: 191473 - DNA, 3491 bp, Homo sapiens
  Payload ID: 17819
  Gene Name: TMED7-TICAM2 readthrough
  ENST ID: ENST00000282382
  CDS Start-End: 370-1584
cggaggcagagccaacgcctcgcgggcttccacgtacgcactccaacgcgtgttcccggagaagaacgcatccgggtcacgggagccggtgtctcaggctccgccccttcaccccccgaaaggctaatccccacttccgaccctctcaggccttttccgcttctcttttacctccccaggtccgcccgtctgcgcccctcacaggaagccggagggtcgctctgatcccgaatctcccacaggcgtgaacctgctctgctgtgtatctttgcggggtggcctgcgctgaggcctgccgcgcgcggtgagtccgcgcagacctgaccctgcgtctcgcagctcggttgaggccgccgccgccttctcgggatgccgcggccggggtccgcgcagcgctgggcggccgtcgcgggccgttgggggtgcaggctgctcgcactgctgctactggtgcctggacccggcggcgcctctgagatcaccttcgagcttcctgacaacgccaagcagtgcttctacgaggacatcgctcagggcaccaagtgcaccctggagttccaggtgattactggtggtcactatgatgtagattgtcgattagaagatcctgatggtaaagtgttatacaaagagatgaagaaacagtatgatagttttaccttcacagcctccaaaaatgggacatacaaattttgcttcagcaatgaattttctactttcacacataaaactgtatattttgattttcaagttggagaagacccacctttgtttcctagtgagaaccgagtcagtgctcttacccagatggaatctgcctgtgtttcaattcacgaagctctgaagtctgtcatcgattatcagactcatttccgtttaagagaagctcaaggccgaagccgagcagaggatctaaatacaagagtggcctattggcacagtgtggatacaagtccaggatatcatgagtcagattccaagaagtctgaagatctatccttgtgtaatgttgctgagcacagcaatacaacagaggggccaacaggaaagcaggagggagctcagagcgtggaagagatgtttgaagaagaagctgaagaagaggtgttcctcaaatttgtgatattgcatgcagaagatgacacagatgaagccctcagagtccagaatctgctacaagatgactttggtatcaaacccggaataatctttgctgagatgccatgtggcagacagcatttacagaatttagatgatgctgtaaatgggtctgcatggacaatcttattactgactgaaaactttttaagagatacttggtgtaatttccagttctatacgtccctaatgaactccgttaacaggcagcataaatacaactctgttatacccatgcggcccctgaacaatccccttccccgagaaaggactccctttgccctccaaaccatcaatgccttagaggaagaaagtcgtggatttcctacacaagtagaaagaatttttcaggagtctgtgtataagacacaacaaactatatggaaagagacaagaaatatggtacaaagacaatttattgcctgagatgaaacatataacatgtggctggctcttgttttgtaaaccaaatgattaatcttcacttgagaaagcagtttctaggaaatgtttaaataaaagagagtcttcaccttaaagaaacctatggagcacaagaaagataaatttctgcaggacagcctataaaattgtggtactttttgatgtttcagtaaacttgacattgtcagagtttcaaggacttttctttcacaattttcctagttcatggatatgaaaaaggaattctcaatccatattccttgtattgaaccttgaacaaaaacttgtatgacagacatttttaaaaatgtgacaacacttttattctctgaattttgatctcaaaggacacagaaaaaaaatggccccaggagatctgatcacacttcctcctgaggcacctctcatggatgttgcaataagcattcgggtactatcacccagaaatatgaattgccagaatagaacatttagcatgttaagcgttgatgcatataaaatcagaaatagatgtgagaatggtggaactttttaaaagaacccagtcaaatgtattttctgctgaaatctgcatatttggaggcatttcccaccaccgattcacagcccatttgatagtgtggtagttagggacttcgtggagtggtgttcagacgtcccctggggcttaaatctcttcatattagtcatcatttgtaactatggctttatttgcagagcttctaaaaggcgtataactgtgtgagtggccagatattcactttttaaatcaaaaacctctcttatggaagctttaaaagtttccgtcacacacaattctcttctcaggaagtatttctcatttaggtcttcaaagtagcctgactgtgtgcatgtgtgtgtgtgataggttatttataaagactttggatagaaggagatgtattttattacctcctattctagagccccatgctcctaacaagccagagaggccccaaacaggattgtttctttcctccacagcccttctgcccatctgagattgagggagcatcgtccacttgagatcagggatggggtggagaatgggtcatgtcatgtaatgagaaaagccctcttcgggatcatgagacttggttctagtccaatttctgccactgaggatgaatgtaactgtgggcaaactatttaccctcctttatctgtgaaatgaaagggttgaattgatggatctctaaaggcttttgtcctctatgaggatgtgaaaaactagggaccacaaaagggaacaagcaaaaaagtttggattcgataaagtgatatgtaatagttgcagaaggctttatatatgcttataatgaaaagatattttttgtatattgacagcataatttatttttaatgctgtcattacacttaaagtcacaggaaaaaaatatacatgcttactcaggctttcttaaaaataaatttttatagagatccttgagtaaagacattttgcttaatttcttttttcttattccccacttgtatatcccctaccagtaccgggatctgcacacatctttttgcagttacctcttcatagccatgaaccaaaacgttctatgaggagcatgcaagtaagtcaagcctcctattctgttagtacttattagaggaggagatggttttcattgcatagtgacattttcttagccttaacgttctgatagtagcttactactcacttctctttttcagttttcataataagtattcatttttttgccataatgcttcctgtaaagccaattttatatactaataaaacatgaactgcccactcttcatgcctgccaaacttggggcaattgatgctaaatggtatttttaaaataaatgtttttattctttactcttga

SEQ ID NO: 191474 - DNA, 3453 bp, Homo sapiens
  Payload ID: 17819
  Gene Name: TMED7-TICAM2 readthrough
  ENST ID: ENST00000333314
  CDS Start-End: 223-789
aggccttttccgcttctcttttacctccccaggtccgcccgtctgcgcccctcacaggaagccggagggtcgctctgatcccgaatctcccacaggcgtgaacctgctctgctgtgtatctttgcggggtggcctgcgctgaggcctgccgcgcgcggtgagtccgcgcagacctgaccctgcgtctcgcagctcggttgaggccgccgccgccttctcgggatgccgcggccggggtccgcgcagcgctgggcggccgtcgcgggccgttgggggtgcaggctgctcgcactgctgctactggtgcctggacccggcggcgcctctgagatcaccttcgagcttcctgacaacgccaagcagtgcttctacgaggacatcgctcagggcaccaagtgcaccctggagttccaggtgattactggtggtcactatgatgtagattgtcgattagaagatcctgatggtaaagtgttatacaaagagatgaagaaacagtatgatagttttaccttcacagcctccaaaaatgggacatacaaattttgcttcagcaatgaattttctactttcacacataaaactgtatattttgattttcaagttggagaagacccacctttgtttcctagtgagaaccgagtcagtgctcttacccagatggaatctgcctgtgtttcaattcacgaagctctgaagtctgtcatcgattatcagactcatttccgtttaagagaagctcaaggccgaagccgagcagaggatctaaatacaagagtggcctattgattgaaaagaaatgctgagaaatacataaagttttcctcttctgccttggatatttataatgggtatcgggaagtctaaaataaattcctgccctctttctctctcttggggtaaaaggcacagtgtggatacaagtccaggatatcatgagtcagattccaagaagtctgaagatctatccttgtgtaatgttgctgagcacagcaatacaacagaggggccaacaggaaagcaggagggagctcagagcgtggaagagatgtttgaagaagaagctgaagaagaggtgttcctcaaatttgtgatattgcatgcagaagatgacacagatgaagccctcagagtccagaatctgctacaagatgactttggtatcaaacccggaataatctttgctgagatgccatgtggcagacagcatttacagaatttagatgatgctgtaaatgggtctgcatggacaatcttattactgactgaaaactttttaagagatacttggtgtaatttccagttctatacgtccctaatgaactccgttaacaggcagcataaatacaactctgttatacccatgcggcccctgaacaatccccttccccgagaaaggactccctttgccctccaaaccatcaatgccttagaggaagaaagtcgtggatttcctacacaagtagaaagaatttttcaggagtctgtgtataagacacaacaaactatatggaaagagacaagaaatatggtacaaagacaatttattgcctgagatgaaacatataacatgtggctggctcttgttttgtaaaccaaatgattaatcttcacttgagaaagcagtttctaggaaatgtttaaataaaagagagtcttcaccttaaagaaacctatggagcacaagaaagataaatttctgcaggacagcctataaaattgtggtactttttgatgtttcagtaaacttgacattgtcagagtttcaaggacttttctttcacaattttcctagttcatggatatgaaaaaggaattctcaatccatattccttgtattgaaccttgaacaaaaacttgtatgacagacatttttaaaaatgtgacaacacttttattctctgaattttgatctcaaaggacacagaaaaaaaatggccccaggagatctgatcacacttcctcctgaggcacctctcatggatgttgcaataagcattcgggtactatcacccagaaatatgaattgccagaatagaacatttagcatgttaagcgttgatgcatataaaatcagaaatagatgtgagaatggtggaactttttaaaagaacccagtcaaatgtattttctgctgaaatctgcatatttggaggcatttcccaccaccgattcacagcccatttgatagtgtggtagttagggacttcgtggagtggtgttcagacgtcccctggggcttaaatctcttcatattagtcatcatttgtaactatggctttatttgcagagcttctaaaaggcgtataactgtgtgagtggccagatattcactttttaaatcaaaaacctctcttatggaagctttaaaagtttccgtcacacacaattctcttctcaggaagtatttctcatttaggtcttcaaagtagcctgactgtgtgcatgtgtgtgtgtgataggttatttataaagactttggatagaaggagatgtattttattacctcctattctagagccccatgctcctaacaagccagagaggccccaaacaggattgtttctttcctccacagcccttctgcccatctgagattgagggagcatcgtccacttgagatcagggatggggtggagaatgggtcatgtcatgtaatgagaaaagccctcttcgggatcatgagacttggttctagtccaatttctgccactgaggatgaatgtaactgtgggcaaactatttaccctcctttatctgtgaaatgaaagggttgaattgatggatctctaaaggcttttgtcctctatgaggatgtgaaaaactagggaccacaaaagggaacaagcaaaaaagtttggattcgataaagtgatatgtaatagttgcagaaggctttatatatgcttataatgaaaagatattttttgtatattgacagcataatttatttttaatgctgtcattacacttaaagtcacaggaaaaaaatatacatgcttactcaggctttcttaaaaataaatttttatagagatccttgagtaaagacattttgcttaatttcttttttcttattccccacttgtatatcccctaccagtaccgggatctgcacacatctttttgcagttacctcttcatagccatgaaccaaaacgttctatgaggagcatgcaagtaagtcaagcctcctattctgttagtacttattagaggaggagatggttttcattgcatagtgacattttcttagccttaacgttctgatagtagcttactactcacttctctttttcagttttcataataagtattcatttttttgccataatgcttcctgtaaagccaattttatatactaataaaacatgaactgcccactcttcatgcctgccaaacttggggcaattgatgctaaatggtatttttaaaataaatgtttttattctt

SEQ ID NO: 191475 - DNA, 755 bp, Homo sapiens
  Payload ID: 17820
  Gene Name: TMEM110-MUSTN1 readthrough
  ENST ID: ENST00000514466
  CDS Start-End: 1-446
gggtagtggacaatttcctcatgagaaaggggaagacgaaagctaagctagaagaaaggggagccaaccaggactcgaggaatgggagcaaggtccgctaccggagggccgcatcccacgaggagtctgagtctgagatcctgatctcagcggatgatgagatggaggagtccgacgtggaggaggacctccgcagactgacccccctcaagcctgtgaagaaaaagaagcaccgctttgggctacccctgctgcctgccagagaggcgccttcagagacccagcgcttacacaatacccaccatgtcccaggctggtgctcaggaagcccctatcaagaagaagcgcccccctgtgaaggacgaggacctgaagggggcccgaggaaacctgaccaagaaccaggaaatcaagtccaagacctaccaggtcatgcgagagtgtgagcaagctggctcggccgccccgtcggtgttcagccgcacccgcacaggtaccgagactgtctttgagaagcccaaagccggacccaccaagagtgtcttcggctgagaagtgtgcgccactccccttgctgcccgaatgctcggaaacaggagcctttcccaggaactcttttttatgccagaacgcttcctctcccctgctgtctctggggctgccaccctcccccacagtccaggcccttcagccaagggctctgcaccagcaccttggaagcaccaataaagaggatgcccacgtggccccagcaa

SEQ ID NO: 191476 - DNA, 1405 bp, Homo sapiens
  Payload ID: 17820
  Gene Name: TMEM110-MUSTN1 readthrough
  ENST ID: ENST00000504329
  CDS Start-End: 113-1231
ggaggtaccggctcaggcttgggatcccggctgcgggtttggcggcgctgcgccggcaggcagcgaggccgggcgggccctgggccctcgcgcccctcccgcgaggcctgtcatgcagggccccgccgggaacgcgagccggggactgccaggcgggccgccctccacagtcgcgtccggggcgggccgctgcgagagcggcgcgctcatgcacagcttcggcatcttcctgcaggggctgctcggcgtcgtggccttcagcacgttaatgctcaaacgcttcagagaaccaaagcatgaaagacgtccgtggaggatatggtttttagacacttccaaacaagccataggaatgctgttcatccactttgcaaatgtatacctagcagatctcactgaagaggacccttgttcactgtacctcatcaacttcctcctggacgccactgtgggcatgctgctcatctacgtgggggtgcgcgccgtcagcgtcctggtagagtggcagcagtgggagtccctgcgcttcggcgaatatggagaccctctgcagtgtggagcctgggtcgggcagtgcgctctttacatcgtgatcatgatttttgaaaagtctgtcgtcttcatcgtcctcctaatacttcagtggaaaaaggtggccctgttgaatcccattgaaaacccagacttgaagctggccatcgtcatgctgatcgtccccttctttgtcaacgctttgatgttttgggtagtggacaatttcctcatgagaaaggggaagacgaaagctaagctagaagaaaggggagccaaccaggactcgaggaatgggagcaaggtccgctaccggagggccgcatcccacgaggagtctgagtctgagatcctgatctcagcggatgatgagatggaggagtccgacgtggaggaggacctccgcagactgacccccctcaagcctgtgaagaaaaagaagcaccgctttgggctacccgctggtgctcaggaagcccctatcaagaagaagcgcccccctgtgaaggacgaggacctgaagggggcccgaggaaacctgaccaagaaccaggaaatcaagtccaagacctaccaggtcatgcgagagtgtgagcaagctggctcggccgccccgtcggtgttcagccgcacccgcacaggtaccgagactgtctttgagaagcccaaagccggacccaccaagagtgtcttcggctgagaagtgtgcgccactccccttgctgcccgaatgctcggaaacaggagcctttcccaggaactcttttttatgccagaacgcttcctctcccctgctgtctctggggctgccaccctcccccacagtccaggcccttcagccaagggctctgcaccagcaccttggaagcaccaa

SEQ ID NO: 191477 - DNA, 2757 bp, Homo sapiens
  Payload ID: 17821
  Gene Name: TMEM189-UBE2V1 readthrough
  ENST ID: ENST00000341698
  CDS Start-End: 1-1113
atggcgggcgccgagaactggccgggccagcagctggagctggacgaggacgaggcgtcttgttgccgctggggcgcgcagcacgccggggcccgcgagctggctgcgctctactcgccaggcaagcgcctccaggagtggtgctctgtgatcctgtgcttcagcctcatcgcccacaacctggtccatctcctgctgctggcccgctgggaggacacacccctcgtcatactcggtgttgttgcaggggctctcattgctgacttcttgtctggcctggtacactggggtgctgacacatggggctctgtggagctgcccattgtggggaaggctttcatccgacccttccgggagcaccacattgacccgacagctatcacacggcacgacttcatcgagaccaacggggacaactgcctggtgacactgctgccgctgctaaacatggcctacaagttccgcacccacagccctgaagccctggagcagctatacccctgggagtgcttcgtcttctgcctgatcatcttcggcaccttcaccaaccagatccacaagtggtcgcacacgtactttgggctgccacgctgggtcaccctcctgcaggactggcatgtcatcctgccacgtaaacaccatcgcatccaccacgtctcaccccacgagacctacttctgcatcaccacaggagtaaaagtccctcgcaatttccgactgttggaagaactcgaagaaggccagaaaggagtaggagatggcacagttagctggggtctagaagatgacgaagacatgacacttacaagatggacagggatgataattgggcctccaagaacaatttatgaaaaccgaatatacagccttaaaatagaatgtggacctaaatacccagaagcacccccctttgtaagatttgtaacaaaaattaatatgaatggagtaaatagttctaatggagtggtggacccaagagccatatcagtgctagcaaaatggcagaattcatatagcatcaaagttgtcctgcaagagcttcggcgcctaatgatgtctaaagaaaatatgaaactccctcagccgcccgaaggacagtgttacagcaattaatcaaaaagaaaaaccacaggcccttccccttccccccaattcgatttaatcagtcttcattttccacagtagtaaattttctagatacgtcttgtagacctcaaagtaccggaaaggaagctcccattcaaaggaaatttatcttaagatactgtaaatgatactaattttttgtccatttgaaatatataagttgtgctataacaaatcatcctgtcaagtgtaaccactgtccacgtagttgaacttctgggatcaagaaagtctatttaaattgattcccatcataactggtggggcacatctaactcaactgtgaaaagacacatcacacaatcaccttgctgctgattacacggcctggggtctctgccttctccccttaccctcccgcctcccaccctccctgcaacaacagccctctagcctggggggcttgttagagtagatgtgaaggtttcaggtcgcagcctgtgggactactgctaggtgtgtggggtgtttcgcctgcacccctggtttctttaagtcttaagtgatgccccttccaaaccatcatcctgtccccacgctcctccactcccgcccttggccgaagcatagattgtaacccctccactcccctctgagattggccttcggtgaggaattcagggctttccccatatcttctctcccccacctttatcgaggggtgctgctttttctccctcctcctcaagttcctttttgcaccgtcaccacccaacaccttccatgacacttccttgctttggccagaagccatcaggtaaggttggaaagagcctctgacctcccttgtttagttttggaaccatactcactcactctccaccagcctgggaaatgaatattgggtcctcagccctgccaccctctgctgtcatcagctgatgcattgtttttagctcaggttttgataaggtgaaaagaatagtcaccagggttactcagacctgccagctctcggagtccttggtggttgaacttggagaaagaccgcatgaagatacttgtaagcacacatgatccctctgaattgttttactttcctgtaactgcttttgcttttaaaaattgaagaagttttaaacagggctttcatttggtcatccttgcaatccattggggtctagtttggaatctgacaactggaacaaaaagaaccttgaatccggtgcatgccttggttttggtgctgctgctgcttcccaagatcctcagcagggattaagaaggaacccggtgtgcacagcagatccccgaaattggtgggcttgacctcctggcaaattgctgcgtctttccacttgctgttcaggaccactaaatgctgaaatgtggatgcataccgaaataaaagcaattcattgtgtactaaaggttttttttttttttttaatttagtatttgtgtaaaaccaccttttgaagcagcaactatcaagtctgaaaagcaattgatgtttccattaatctttttctggggggaaaaccttagttctaaggatttaacatcctgtaagtgaagtttaacataacagtattccataagcagcctttttattgtcagaccattgcctgattttaatataataaaaaaaaagtgtgcgttaatatttaa

SEQ ID NO: 191478 - DNA, 2557 bp, Homo sapiens
  Payload ID: 17822
  Gene Name: TMEM256-PLSCR3
  ENST ID: ENST00000573331
  CDS Start-End: 14-220
ctgttctacagctatggccgggccagctgcagctttccgccgcttgggcgccttgtccggagctgcggccttaggcttcgcttcctacggggcgcacggcgcccaattcccagatgcctacgggaaggagctgtttgacaaggccaacaaacaccacttcttacacagcctggccctgttaggggtgccccattgcagaaagccactctgggcggcctgagcacgctcactgacaccgtttggcggcctgtcacccgcgtggctggggcacctgcagaaactgctgtcgctgcgaggtgcccgtgtgggtcaccgctgtgccagggagagaagacggcgaggtcgcccctgggaggcagaaggcgagccaggagccagtcctggaagccaatgagcgctcctactctctgggcatctgcagtccgagcggaaggggcgggaacgtcggcgacgccgaggagcaaagcccacgatcggcttcccggggcagcggacggctgccttcctcccggcgcaaacgcaccgcccaggagggggcgggctcggcgggtcggggggcggggccggggtccgagctcgggcccgcctccgcctccgccagctcctgtgagctgccgagtgctaggcacccgggctcttctgggggctccaggtgagcgggggcacagaggggtcagggagaccgcccttggggtggggctgtcggtctgaccgcgggtccatctgtcctgccgtcggcccacagcctcctccgcaggatgggagaacaaagggagggggcggttctggggcccccgagggaatccagggtcccaggtacccggtcccgcccactgacacttgggtttctccccgagtcagaggcgccgcccaagagaccctgggccggcgccgggcgcagctgcctctccgtctttgtgtctgtctctgtgtctgtctggctatctccgagtttgcctccgcttccagaactaagccacccagacaccatcatctcgaaaaccccagcccttctcccatggcaggctacttgccccccaaaggctacgccccttcgcccccacctccctaccctgtcacccctgggtacccggagccggcgctacatcctgggcccgggcaggcgccagtgcccgcccaggtacctgccccagctcccggcttcgccctcttcccctcgcctggccccgtggccttggggtctgctgcccccttcttgccactgccaggggtgccttctggcctcgaattcctggtgcagattgatcagattttgattcaccagaaggctgagcgagtggaaacgttcctaggctgggagacctgtaatcggtatgaactgcgctctggggccgggcagcccctgggtcaggcggccgaggagagcaactgctgcgcccgtctgtgctgtggcgcccgccggccgctgcgtgtccgcctggccgaccccggggaccgtgaggtgctgcgtttgctccgcccgctgcactgtggctgcagctgctgcccctgtggcctccaggagatggaagtacaggctccaccaggcaccaccattggccacgtgctacagacctggcatcccttcctccccaagttctccatccaggatgccgatcgccagacagtcttgcgagtggtggggccctgctggacctgtggctgtggcacagacaccaactttgaggtgaagactcgggatgaatcccgcagtgtgggccgcatcagcaagcagtgggggggcctggtccgagaagccctcacagatgcagatgactttggcctacagttcccgctggacctggatgtgagggtgaaggctgtgctgctgggagccacattcctcattgactacatgttctttgagaagcgaggaggcgctgggccctctgccgtcaccagttagaggccaccatggtgtgaggagaccatcacctcgaccagaactccagatggtcacctgccctggcccctcctctgggcagcccctttcctccatgtacactgcaggggacagaaggggggccccatccctaccctactccctggccgcctgcccctgtggttcccaaggaggggtatgtatgagagccgctctcctgctacctcccaccactgtcccagcagtccctcggcacacaggcatatcagctttcacactttccccatgcactctctcccacccccttccagggcctctgctccaaaggaggcctctggaacccaggactctggggttttacaagagggctggggtgtggaagggcaagctgcaccaaagacggtggatatagccaccgcccccccgccgctgcctagcatctgcttggccaattagttcagcctcagaccatggcactttgagggggtctctacctccccatcaacagctgcagggggaccccagtgccaacttcctctcccactagggccctgccttcagctggtgcttgctgcgattcctgtgccttatgtaactgcccttccttcccttgccctaggaaaaaggctgcatctttatatgttacattcatataaactttgtaactttttggac

SEQ ID NO: 191479 - DNA, 1526 bp, Homo sapiens
  Payload ID: 17822
  Gene Name: TMEM256-PLSCR3
  ENST ID: ENST00000570600
  CDS Start-End: 14-139
ctgttctacagctatggccgggccagctgcagctttccgccgcttgggcgccttgtccggagctgcggccttaggcttcgcttcctacggggcgcacggcgcccaattcccagatgcctacgggaaggaggcggcctgagcacgctcactgacaccgtttggcggcctgtcacccgcgtggctggggcacctgcagaaactgctgtcgctgcgaggtgcccgtgtgggtcaccgctgtgccagggagagaagacggcgaggtcgcccctgggaggcagaaggcgagccaggagccagtcctggaagccaatgaaggcgccgcccaagagaccctgggccggcgccgggcgcagctgcctctccgtctttgtgtctgtctctgtgtctgtctggctatctccgagtttgcctccgcttccagaactaagccacccagacaccatcatctcgaaaaccccagcccttctcccatggcaggctacttgccccccaaaggctacgccccttcgcccccacctccctaccctgtcacccctgggtacccggagccggcgctacatcctgggcccgggcaggcgccagtgcccgcccaggtacctgccccagctcccggcttcgccctcttcccctcgcctggccccgtggccttggggtctgctgcccccttcttgccactgccaggggtgccttctggcctcgaattcctggtgcagattgatcagattttgattcaccagaaggctgagcgagtggaaacgttcctaggctgggagacctgtaatcggtatgaactgcgctctggggccgggcagcccctgggtcaggcggccgaggagagcaactgctgcgcccgtctgtgctgtggcgcccgccggccgctgcgtgtccgcctggccgaccccggggaccgtgaggtgctgcgtttgctccgcccgctgcactgtggctgcagctgctgcccctgtggcctccaggagatggaagtacaggctccaccaggcaccaccattggccacgtgctacagacctggcatcccttcctccccaagttctccatccaggatgccgatcgccagacagtcttgcgagtggtggggccctgctggacctgtggctgtggcacagacaccaactttgaggtgaagactcgggatgaatcccgcagtgtgggccgcatcagcaagcagtgggggggcctggtccgagaagccctcacagatgcagatgactttggcctacagttcccgctggacctggatgtgagggtgaaggctgtgctgctgggagccacattcctcattgactacatgttctttgagaagcgaggaggcgctgggccctctgccgtcaccagttagaggccaccatggtgtgaggagaccatcacctcgaccagaactccagatggtcacctgccctggcccctcctctgggcagcccctttcctccatgtacactgcaggggacagaaggggggccccatccctaccctactccctggccgcctgcccctgtggttcccaagg

SEQ ID NO: 191480 - DNA, 562 bp, Homo sapiens
  Payload ID: 17822
  Gene Name: TMEM256-PLSCR3
  ENST ID: ENST00000570569
  CDS Start-End: 14-220
ctgttctacagctatggccgggccagctgcagctttccgccgcttgggcgccttgtccggagctgcggccttaggcttcgcttcctacggggcgcacggcgcccaattcccagatgcctacgggaaggagctgtttgacaaggccaacaaacaccacttcttacacagcctggccctgttaggggtgccccattgcagaaagccactctgggcggcctgagcacgctcactgacaccgtttggcggcctgtcacccgcgtggctggggcacctgcagaaactgctgtcgctgcgaggtgcccgtgtgggtcaccgctgtgccagggagagaagacggcgaggtcgcccctgggaggcagaaggcgagccaggagccagtcctggaagccaatgatcagaggcgccgcccaagagaccctgggccggcgccgggcgcagctgcctctccgtctttgtgtctgtctctgtgtctgtctggctatctccgagtttgcctccgcttccagaactaagccacccagacaccatcatctcgaaaaccccagcccttctcccatggcag

SEQ ID NO: 191481 - DNA, 951 bp, Homo sapiens
  Payload ID: 17822
  Gene Name: TMEM256-PLSCR3
  ENST ID: ENST00000571125
  CDS Start-End: 1-87
tttgacaaggccaacaaacaccacttcttacacagcctggccctgttaggggtgccccattgcagaaagccactctgggcggcctgagcacgctcactgacaccgtttggcggcctgtcacccgcgtggctggggcacctgcagaaactgctgtcgctgcgaggtgcccgtgtgggtcaccgctgtgccagggagagaagacggcgaggtcgcccctgggaggcagaaggcgagccaggagccagtcctggaagccaatgaaggcgccgcccaagagaccctgggccggcgccgggcgcagctgcctctccgtctttgtgtctgtctctgtgtctgtctggctatctccgagtttgcctccgcttccagaactaagccacccagacaccatcatctcgaaaaccccagcccttctcccatggcaggctacttgccccccaaaggctacgccccttcgcccccacctccctaccctgtcacccctgggtacccggagccggcgctacatcctgggcccgggcaggcgccagtgcccgcccaggtacctgccccagctcccggcttcgccctcttcccctcgcctggccccgtggccttggggtctgctgcccccttcttgccactgccaggggtgccttctggcctcgaattcctggtgcagattgatcagattttgattcaccagaaggctgagcgagtggaaaatggaagtacaggctccaccaggcaccaccattggccacgtgctacagacctggcatcccttcctccccaagttctccatccaggatgccgatcgccagacagtcttgcgagtggtggggccctgctggacctgtggctgtggcacagacaccaactttgaggtgaagactcgggatgaatcccgcagtgtgggccgcatcagcaagcagtgggggggcctggtccgagaagccctcacagatgcag

SEQ ID NO: 191482 - DNA, 1689 bp, Homo sapiens
  Payload ID: 17823
  Gene Name: TMEM256-PLSCR3 readthrough (NMD candidate)
  Uniprot ID: Q9NRY6
  ENST ID: ENST00000324822
  CDS Start-End: 144-1031
cggggccggggtccgagctcgggcccgcctccgcctccgccagctcctgtgagctgccgagtgctaggcacccgggctcttctgggggctccagaactaagccacccagacaccatcatctcgaaaaccccagcccttctcccatggcaggctacttgccccccaaaggctacgccccttcgcccccacctccctaccctgtcacccctgggtacccggagccggcgctacatcctgggcccgggcaggcgccagtgcccgcccaggtacctgccccagctcccggcttcgccctcttcccctcgcctggccccgtggccttggggtctgctgcccccttcttgccactgccaggggtgccttctggcctcgaattcctggtgcagattgatcagattttgattcaccagaaggctgagcgagtggaaacgttcctaggctgggagacctgtaatcggtatgaactgcgctctggggccgggcagcccctgggtcaggcggccgaggagagcaactgctgcgcccgtctgtgctgtggcgcccgccggccgctgcgtgtccgcctggccgaccccggggaccgtgaggtgctgcgtttgctccgcccgctgcactgtggctgcagctgctgcccctgtggcctccaggagatggaagtacaggctccaccaggcaccaccattggccacgtgctacagacctggcatcccttcctccccaagttctccatccaggatgccgatcgccagacagtcttgcgagtggtggggccctgctggacctgtggctgtggcacagacaccaactttgaggtgaagactcgggatgaatcccgcagtgtgggccgcatcagcaagcagtgggggggcctggtccgagaagccctcacagatgcagatgactttggcctacagttcccgctggacctggatgtgagggtgaaggctgtgctgctgggagccacattcctcattgactacatgttctttgagaagcgaggaggcgctgggccctctgccgtcaccagttagaggccaccatggtgtgaggagaccatcacctcgaccagaactccagatggtcacctgccctggcccctcctctgggcagcccctttcctccatgtacactgcaggggacagaaggggggccccatccctaccctactccctggccgcctgcccctgtggttcccaaggaggggtatgtatgagagccgctctcctgctacctcccaccactgtcccagcagtccctcggcacacaggcatatcagctttcacactttccccatgcactctctcccacccccttccagggcctctgctccaaaggaggcctctggaacccaggactctggggttttacaagagggctggggtgtggaagggcaagctgcaccaaagacggtggatatagccaccgcccccccgccgctgcctagcatctgcttggccaattagttcagcctcagaccatggcactttgagggggtctctacctccccatcaacagctgcagggggaccccagtgccaacttcctctcccactagggccctgccttcagctggtgcttgctgcgattcctgtgccttatgtaactgcccttccttcccttgccctaggaaaaaggctgcatctttatatgttacattcatataaactttgtaactttttggacattgaaa

SEQ ID NO: 191483 - DNA, 2067 bp, Homo sapiens
  Payload ID: 17823
  Gene Name: TMEM256-PLSCR3 readthrough (NMD candidate)
  Uniprot ID: Q9NRY6
  ENST ID: ENST00000535512
  CDS Start-End: 525-1412
gggccagcgcggcccgggccgccctcgcctcccacccagggcgctgagcacgcacgccgccggcctggcggcgttcgcggggcccgggaccagccgccgccttctccaggcgctcctactctctgggcatctgcagtccgagcggaaggggcgggaacgtcggcgacgccgaggagcaaagcccacgatcggcttcccggggcagcggacggctgccttcctcccggcgcaaacgcaccgcccaggagggggcgggctcggcgggtcggggggcggggccggggtccgagctcgggcccgcctccgcctccgccagctcctgtgagctgccgagtgctaggcacccgggctcttctgggggctccagaggcgccgcccaagagaccctgggccggcgccgggcgcagctgcctctccgtctttgtgtctgtctctgtgtctgtctggctatctccgagtttgcctccgcttccagaactaagccacccagacaccatcatctcgaaaaccccagcccttctcccatggcaggctacttgccccccaaaggctacgccccttcgcccccacctccctaccctgtcacccctgggtacccggagccggcgctacatcctgggcccgggcaggcgccagtgcccgcccaggtacctgccccagctcccggcttcgccctcttcccctcgcctggccccgtggccttggggtctgctgcccccttcttgccactgccaggggtgccttctggcctcgaattcctggtgcagattgatcagattttgattcaccagaaggctgagcgagtggaaacgttcctaggctgggagacctgtaatcggtatgaactgcgctctggggccgggcagcccctgggtcaggcggccgaggagagcaactgctgcgcccgtctgtgctgtggcgcccgccggccgctgcgtgtccgcctggccgaccccggggaccgtgaggtgctgcgtttgctccgcccgctgcactgtggctgcagctgctgcccctgtggcctccaggagatggaagtacaggctccaccaggcaccaccattggccacgtgctacagacctggcatcccttcctccccaagttctccatccaggatgccgatcgccagacagtcttgcgagtggtggggccctgctggacctgtggctgtggcacagacaccaactttgaggtgaagactcgggatgaatcccgcagtgtgggccgcatcagcaagcagtgggggggcctggtccgagaagccctcacagatgcagatgactttggcctacagttcccgctggacctggatgtgagggtgaaggctgtgctgctgggagccacattcctcattgactacatgttctttgagaagcgaggaggcgctgggccctctgccgtcaccagttagaggccaccatggtgtgaggagaccatcacctcgaccagaactccagatggtcacctgccctggcccctcctctgggcagcccctttcctccatgtacactgcaggggacagaaggggggccccatccctaccctactccctggccgcctgcccctgtggttcccaaggaggggtatgtatgagagccgctctcctgctacctcccaccactgtcccagcagtccctcggcacacaggcatatcagctttcacactttccccatgcactctctcccacccccttccagggcctctgctccaaaggaggcctctggaacccaggactctggggttttacaagagggctggggtgtggaagggcaagctgcaccaaagacggtggatatagccaccgcccccccgccgctgcctagcatctgcttggccaattagttcagcctcagaccatggcactttgagggggtctctacctccccatcaacagctgcagggggaccccagtgccaacttcctctcccactagggccctgccttcagctggtgcttgctgcgattcctgtgccttatgtaactgcccttccttcccttgccctaggaaaaaggctgcatctttatatgttacattcatataaactttgtaactttttggacattg

SEQ ID NO: 191484 - DNA, 724 bp, Homo sapiens
  Payload ID: 17823
  Gene Name: TMEM256-PLSCR3 readthrough (NMD candidate)
  ENST ID: ENST00000571078
  CDS Start-End: 215-724
gagtcagaggcgccgcccaagagaccctgggccggcgccgggcgcagctgcctctccgtctttgtgtctgtctctgtgtctgtctggctatctccgagtttgcctccgcttccagaactaagccacccagacaccatcatctcgaaaaccccagcccttctcccatggcagattgatcagattttgattcaccagaaggctgagcgagtggaaaatggaagtacaggctccaccaggcaccaccattggccacgtgctacagacctggcatcccttcctccccaagttctccatccaggatgccgatcgccagacagtcttgcgagtggtggggccctgctggacctgtggctgtggcacagacaccaactttgaggtgaagactcgggatgaatcccgcagtgtgggccgcatcagcaagcagtgggggggcctggtccgagaagccctcacagatgcagatgactttggcctacagttcccgctggacctggatgtgagggtgaaggctgtgctgctgggagccacattcctcattgtgagttggctgcccctgcccccacctcctgcctgtcctttgctgtcatttgaagctttatgcatttcctggcctcttgctaggggaaagtcaggaataggtgttgtgggggttgaggttctagagctggcctgtgacagccaagctgggctggcccagccggatctcccattgacagtggcctcc

SEQ ID NO: 191485 - DNA, 581 bp, Homo sapiens
  Payload ID: 17823
  Gene Name: TMEM256-PLSCR3 readthrough (NMD candidate)
  ENST ID: ENST00000573213
  CDS Start-End: 227-581
cgcctccgcctccgccagctcctgtgagctgccgagtgctaggcacccgggctcttctgggggctccagaggcgccgcccaagagaccctgggccggcgccgggcgcagctgcctctccgtctttgtgtctgtctctgtgtctgtctggctatctccgagtttgcctccgcttccagaactaagccacccagacaccatcatctcgaaaaccccagcccttctcccatggcaggctacttgccccccaaaggctacgccccttcgcccccacctccctaccctgtcacccctgggtacccggagccggcgctacatcctgggcccgggcaggcgccagtgcccgcccaggtacctgccccagctcccggcttcgccctcttcccctcgcctggccccgtggccttggggtctgctgcccccttcttgccactgccaggggtgccttctggcctcgaattcctggtgcagattgatcagattttgattcaccagaaggctgagcgagtggaaaatggaagtacaggctccaccaggcaccaccattggccacgtgctacagacctggcatcccttcctcccc

SEQ ID NO: 191486 - DNA, 2032 bp, Homo sapiens
  Payload ID: 17823
  Gene Name: TMEM256-PLSCR3 readthrough (NMD candidate)
  Uniprot ID: Q9NRY6
  ENST ID: ENST00000574401
  CDS Start-End: 493-1380
cagggcgctgagcacgcacgccgccggcctggcggcgttcgcggggcccgggaccagccgccgccttctccaggcgctcctactctctgggcatctgcagtccgagcggaaggggcgggaacgtcggcgacgccgaggagcaaagcccacgatcggcttcccggggcagcggacggctgccttcctcccggcgcaaacgcaccgcccaggagggggcgggctcggcgggtcggggggcggggccggggtccgagctcgggcccgcctccgcctccgccagctcctgtgagctgccgagtgctaggcacccgggctcttctgggggctccagtcagaggcgccgcccaagagaccctgggccggcgccgggcgcagctgcctctccgtctttgtgtctgtctctgtgtctgtctggctatctccgagtttgcctccgcttccagaactaagccacccagacaccatcatctcgaaaaccccagcccttctcccatggcaggctacttgccccccaaaggctacgccccttcgcccccacctccctaccctgtcacccctgggtacccggagccggcgctacatcctgggcccgggcaggcgccagtgcccgcccaggtacctgccccagctcccggcttcgccctcttcccctcgcctggccccgtggccttggggtctgctgcccccttcttgccactgccaggggtgccttctggcctcgaattcctggtgcagattgatcagattttgattcaccagaaggctgagcgagtggaaacgttcctaggctgggagacctgtaatcggtatgaactgcgctctggggccgggcagcccctgggtcaggcggccgaggagagcaactgctgcgcccgtctgtgctgtggcgcccgccggccgctgcgtgtccgcctggccgaccccggggaccgtgaggtgctgcgtttgctccgcccgctgcactgtggctgcagctgctgcccctgtggcctccaggagatggaagtacaggctccaccaggcaccaccattggccacgtgctacagacctggcatcccttcctccccaagttctccatccaggatgccgatcgccagacagtcttgcgagtggtggggccctgctggacctgtggctgtggcacagacaccaactttgaggtgaagactcgggatgaatcccgcagtgtgggccgcatcagcaagcagtgggggggcctggtccgagaagccctcacagatgcagatgactttggcctacagttcccgctggacctggatgtgagggtgaaggctgtgctgctgggagccacattcctcattgactacatgttctttgagaagcgaggaggcgctgggccctctgccgtcaccagttagaggccaccatggtgtgaggagaccatcacctcgaccagaactccagatggtcacctgccctggcccctcctctgggcagcccctttcctccatgtacactgcaggggacagaaggggggccccatccctaccctactccctggccgcctgcccctgtggttcccaaggaggggtatgtatgagagccgctctcctgctacctcccaccactgtcccagcagtccctcggcacacaggcatatcagctttcacactttccccatgcactctctcccacccccttccagggcctctgctccaaaggaggcctctggaacccaggactctggggttttacaagagggctggggtgtggaagggcaagctgcaccaaagacggtggatatagccaccgcccccccgccgctgcctagcatctgcttggccaattagttcagcctcagaccatggcactttgagggggtctctacctccccatcaacagctgcagggggaccccagtgccaacttcctctcccactagggccctgccttcagctggtgcttgctgcgattcctgtgccttatgtaactgcccttccttcccttgccctaggaaaaaggctgcatctttatatgttacattcatataaactttgtaactttttggaca

SEQ ID NO: 191487 - DNA, 1740 bp, Homo sapiens
  Payload ID: 17823
  Gene Name: TMEM256-PLSCR3 readthrough (NMD candidate)
  ENST ID: ENST00000573070
  CDS Start-End: 416-862
ggccagcgcggcccgggccgccctcgcctcccacccagggcgctgagcacgcacgccgccggcctggcggcgttcgcggggcccgggaccagccgccgccttctccaggcgctcctactctctgggcatctgcagtccgagcggaaggggcgggaacgtcggcgacgccgaggagcaaagcccacgatcggcttcccggggcagcggacggctgccttcctcccggcgcaaacgcaccgcccaggagggggcgggctcggcgggtcggggggcggggccggggtccgagctcgggcccgcctccgcctccgccagctcctgtgagctgccgagtgctaggcacccgggctcttctgggggctccagaactaagccacccagacaccatcatctcgaaaaccccagcccttctcccatggcaggctacttgccccccaaaggctacgccccttcgcccccacctccctaccctgtcacccctgggtacccggagccggcgctacatcctgggcccgggcaggcgccagtgcccgcccaggtacctgccccagctcccggcttcgccctcttcccctcgcctggccccgtggccttggggtctgctgcccccttcttgccactgccaggggtgccttctggcctcgaattcctggtgcagattgatcagattttgattcaccagaaggctgagcgagtggaaaatggaagtacaggctccaccaggcaccaccattggccacgtgctacagacctggcatcccttcctccccaagttctccatccaggatgccgatcgccagacagtcttgcgagtggtggggccctgctggacctgtggctgtggcacagacaccaactttgaggtgaagactcgggatgaatcccgcagtgtgggccgcatcagcaagcagtgggggggcctggtccgagaagccctcacagatgcagatgactttggcctacagttcccgctggacctggatgtgagggtgaaggctgtgctgctgggagccacattcctcattgactacatgttctttgagaagcgaggaggcgctgggccctctgccgtcaccagttagaggccaccatggtgtgaggagaccatcacctcgaccagaactccagatggtcacctgccctggcccctcctctgggcagcccctttcctccatgtacactgcaggggacagaaggggggccccatccctaccctactccctggccgcctgcccctgtggttcccaaggaggggtatgtatgagagccgctctcctgctacctcccaccactgtcccagcagtccctcggcacacaggcatatcagctttcacactttccccatgcactctctcccacccccttccagggcctctgctccaaaggaggcctctggaacccaggactctggggttttacaagagggctggggtgtggaagggcaagctgcaccaaagacggtggatatagccaccgcccccccgccgctgcctagcatctgcttggccaattagttcagcctcagaccatggcactttgagggggtctctacctccccatcaacagctgcagggggaccccagtgccaacttcctctcccactagggccctgccttcagctggtgcttgctgcgattcctgtgccttatgtaactgcccttccttcccttgccctaggaaaaaggctgcatctttatatgttacattcatataaactttgtaactttttggacattgaaa

SEQ ID NO: 191488 - DNA, 1965 bp, Homo sapiens
  Payload ID: 17823
  Gene Name: TMEM256-PLSCR3 readthrough (NMD candidate)
  Uniprot ID: Q9NRY6
  ENST ID: ENST00000576201
  CDS Start-End: 426-1313
tccgccagctcctgtgagctgccgagtgctaggcacccgggctcttctgggggctccaggtgagcgggggcacagaggggtcagggagaccgcccttggggtggggctgtcggtctgaccgcgggtccatctgtcctgccgtcggcccacagcctcctccgcaggatgggagaacaaagggagggggcggttctggggcccccgagggaatccagggtcccaggtacccggtcccgcccactgacacttgggtttctccccgagtcagaggcgccgcccaagagaccctgggccggcgccgggcgcagctgcctctccgtctttgtgtctgtctctgtgtctgtctggctatctccgagtttgcctccgcttccagaactaagccacccagacaccatcatctcgaaaaccccagcccttctcccatggcaggctacttgccccccaaaggctacgccccttcgcccccacctccctaccctgtcacccctgggtacccggagccggcgctacatcctgggcccgggcaggcgccagtgcccgcccaggtacctgccccagctcccggcttcgccctcttcccctcgcctggccccgtggccttggggtctgctgcccccttcttgccactgccaggggtgccttctggcctcgaattcctggtgcagattgatcagattttgattcaccagaaggctgagcgagtggaaacgttcctaggctgggagacctgtaatcggtatgaactgcgctctggggccgggcagcccctgggtcaggcggccgaggagagcaactgctgcgcccgtctgtgctgtggcgcccgccggccgctgcgtgtccgcctggccgaccccggggaccgtgaggtgctgcgtttgctccgcccgctgcactgtggctgcagctgctgcccctgtggcctccaggagatggaagtacaggctccaccaggcaccaccattggccacgtgctacagacctggcatcccttcctccccaagttctccatccaggatgccgatcgccagacagtcttgcgagtggtggggccctgctggacctgtggctgtggcacagacaccaactttgaggtgaagactcgggatgaatcccgcagtgtgggccgcatcagcaagcagtgggggggcctggtccgagaagccctcacagatgcagatgactttggcctacagttcccgctggacctggatgtgagggtgaaggctgtgctgctgggagccacattcctcattgactacatgttctttgagaagcgaggaggcgctgggccctctgccgtcaccagttagaggccaccatggtgtgaggagaccatcacctcgaccagaactccagatggtcacctgccctggcccctcctctgggcagcccctttcctccatgtacactgcaggggacagaaggggggccccatccctaccctactccctggccgcctgcccctgtggttcccaaggaggggtatgtatgagagccgctctcctgctacctcccaccactgtcccagcagtccctcggcacacaggcatatcagctttcacactttccccatgcactctctcccacccccttccagggcctctgctccaaaggaggcctctggaacccaggactctggggttttacaagagggctggggtgtggaagggcaagctgcaccaaagacggtggatatagccaccgcccccccgccgctgcctagcatctgcttggccaattagttcagcctcagaccatggcactttgagggggtctctacctccccatcaacagctgcagggggaccccagtgccaacttcctctcccactagggccctgccttcagctggtgcttgctgcgattcctgtgccttatgtaactgcccttccttcccttgccctaggaaaaaggctgcatctttatatgttacattcatataaactttgtaactttttggaca

SEQ ID NO: 191489 - DNA, 1605 bp, Homo sapiens
  Payload ID: 17823
  Gene Name: TMEM256-PLSCR3 readthrough (NMD candidate)
  ENST ID: ENST00000576362
  CDS Start-End: 159-974
gaggcgccgcccaagagaccctgggccggcgccgggcgcagctgcctctccgtctttgtgtctgtctctgtgtctgtctggctatctccgagtttgcctccgcttccagaactaagccacccagacaccatcatctcgaaaaccccagcccttctcccatggcaggctacttgccccccaaaggctacgccccttcgcccccacctccctaccctgtcacccctgggtacccggagccggcgctacatcctgggcccgggcaggcgccagtgcccgcccaggtacctgccccagctcccggcttcgccctcttcccctcgcctggccccgtggccttggggtctgctgcccccttcttgccactgccaggggtgccttctggcctcgaattcctggtgcagattgatcagattttgattcaccagaaggctgagcgagtggaaacgttcctaggctgggagacctgtaatcggtatgaactgcgctctggggccgggcagcccctgggtcaggcggccgaggagagcaactgctgcgcccgtctgtgctgtggcgcccgccggccgctgcgtgtccgcctggccgaccccggggaccgtgaggtgctgcgtttgctccgcccgctgcactgtggctgcagctgctgcccctgtggcctccaggagttctccatccaggatgccgatcgccagacagtcttgcgagtggtggggccctgctggacctgtggctgtggcacagacaccaactttgaggtgaagactcgggatgaatcccgcagtgtgggccgcatcagcaagcagtgggggggcctggtccgagaagccctcacagatgcagatgactttggcctacagttcccgctggacctggatgtgagggtgaaggctgtgctgctgggagccacattcctcattgactacatgttctttgagaagcgaggaggcgctgggccctctgccgtcaccagttagaggccaccatggtgtgaggagaccatcacctcgaccagaactccagatggtcacctgccctggcccctcctctgggcagcccctttcctccatgtacactgcaggggacagaaggggggccccatccctaccctactccctggccgcctgcccctgtggttcccaaggaggggtatgtatgagagccgctctcctgctacctcccaccactgtcccagcagtccctcggcacacaggcatatcagctttcacactttccccatgcactctctcccacccccttccagggcctctgctccaaaggaggcctctggaacccaggactctggggttttacaagagggctggggtgtggaagggcaagctgcaccaaagacggtggatatagccaccgcccccccgccgctgcctagcatctgcttggccaattagttcagcctcagaccatggcactttgagggggtctctacctccccatcaacagctgcagggggaccccagtgccaacttcctctcccactagggccctgccttcagctggtgcttgctgcgattcctgtgccttatgtaactgcccttccttcccttgccctaggaaaaaggctgcatctttatatgttacattcatata

SEQ ID NO: 191490 - DNA, 583 bp, Homo sapiens
  Payload ID: 17823
  Gene Name: TMEM256-PLSCR3 readthrough (NMD candidate)
  ENST ID: ENST00000571802
  CDS Start-End: 477-583
ctgtgagctgccgagtgctaggcacccgggctcttctgggggctccagaggcgccgcccaagagaccctgggccggcgccgggcgcagctgcctctccgtctttgtgtctgtctctgtgtctgtctggctatctccgagtttgcctccgcttccagaactaagccacccagacaccatcatctcgaaaaccccagcccttctcccatggcagattgatcagattttgattcaccagaaggctgagcgagtggaaacgttcctaggctgggagacctgtaatcggtatgaactgcgctctggggccgggcagcccctgggtcaggcggccgaggagagcaactgctgcgcccgtctgtgctgtggcgcccgccggccgctgcgtgtccgcctggccgaccccggggaccgtgaggtgctgcgtttgctccgcccgctgcactgtggctgcagctgctgcccctgtggcctccaggagatggaagtacaggctccaccaggcaccaccattggccacgtgctacagacctggcatcccttcctccccaagttctccatccaggatgccgatcgccagacagtctt

SEQ ID NO: 191491 - DNA, 851 bp, Homo sapiens
  Payload ID: 17823
  Gene Name: TMEM256-PLSCR3 readthrough (NMD candidate)
  ENST ID: ENST00000575434
  CDS Start-End: 1-516
gctgagcgagtggaaacgttcctaggctgggagacctgtaatcggtatgaactgcgctctggggccgggcagcccctgggtcaggcggccgaggagagcaactgctgcgcccgtctgtgctgtggcgcccgccggccgctgcgtgtccgcctggccgaccccggggaccgtgaggtgctgcgtttgctccgcccgctgcactgtggctgcagctgctgcccctgtggcctccaggagatggaagtacaggctccaccaggcaccaccattggccacgtgctacagacctggcatcccttcctccccaagttctccatccaggatgccgatcgccagacagtcttgcgagtggtggggccctgctggacctgtggctgtggcacagacaccaactttgagttcccgctggacctggatgtgagggtgaaggctgtgctgctgggagccacattcctcattgactacatgttctttgagaagcgaggaggcgctgggccctctgccgtcaccagttagaggccaccatggtgtgaggagaccatcacctcgaccagaactccagatggtcacctgccctggcccctcctctgggcagcccctttcctccatgtacactgcaggggacagaaggggggccccatccctaccctactccctggccgcctgcccctgtggttcccaaggaggggtatgtatgagagccgctctcctgctacctcccaccactgtcccagcagtccctcggcacacaggcatatcagctttcacactttccccatgcactctctcccacccccttccagggcctctgctccaaaggaggcctctggaacccaggactctggggtttt

SEQ ID NO: 191492 - DNA, 2066 bp, Homo sapiens
  Payload ID: 17823
  Gene Name: TMEM256-PLSCR3 readthrough (NMD candidate)
  ENST ID: ENST00000619711
  CDS Start-End: 525-1196
gggccagcgcggcccgggccgccctcgcctcccacccagggcgctgagcacgcacgccgccggcctggcggcgttcgcggggcccgggaccagccgccgccttctccaggcgctcctactctctgggcatctgcagtccgagcggaaggggcgggaacgtcggcgacgccgaggagcaaagcccacgatcggcttcccggggcagcggacggctgccttcctcccggcgcaaacgcaccgcccaggagggggcgggctcggcgggtcggggggcggggccggggtccgagctcgggcccgcctccgcctccgccagctcctgtgagctgccgagtgctaggcacccgggctcttctgggggctccagaggcgccgcccaagagaccctgggccggcgccgggcgcagctgcctctccgtctttgtgtctgtctctgtgtctgtctggctatctccgagtttgcctccgcttccagaactaagccacccagacaccatcatctcgaaaaccccagcccttctcccatggcaggctacttgccccccaaaggctacgccccttcgcccccacctccctaccctgtcacccctgggtacccggagccggcgctacatcctgggcccgggcaggcgccagtgcccgcccaggtacctgccccagctcccggcttcgccctcttcccctcgcctggccccgtggccttggggtctgctgcccccttcttgccactgccaggggtgccttctggcctcgaattcctggtgcagattgatcagattttgattcaccagaaggctgagcgagtggaaacgttcctaggctggagacctgtaatcggtatgaactgcgctctggggccgggcagcccctgggtcaggcggccgaggagagcaactgctgcgcccgtctgtgctgtggcgcccgccggccgctgcgtgtccgcctggccgaccccggggaccgtgaggtgctgcgtttgctccgcccgctgcactgtggctgcagctgctgcccctgtggcctccaggagatggaagtacaggctccaccaggcaccaccattggccacgtgctacagacctggcatcccttcctccccaagttctccatccaggatgccgatcgccagacagtcttgcgagtggtggggccctgctggacctgtggctgtggcacagacaccaactttgaggtgaagactcgggatgaatcccgcagtgtgggccgcatcagcaagcagtgggggggcctggtccgagaagccctcacagatgcagatgactttggcctacagttcccgctggacctggatgtgagggtgaaggctgtgctgctgggagccacattcctcattgactacatgttctttgagaagcgaggaggcgctgggccctctgccgtcaccagttagaggccaccatggtgtgaggagaccatcacctcgaccagaactccagatggtcacctgccctggcccctcctctgggcagcccctttcctccatgtacactgcaggggacagaaggggggccccatccctaccctactccctggccgcctgcccctgtggttcccaaggaggggtatgtatgagagccgctctcctgctacctcccaccactgtcccagcagtccctcggcacacaggcatatcagctttcacactttccccatgcactctctcccacccccttccagggcctctgctccaaaggaggcctctggaacccaggactctggggttttacaagagggctggggtgtggaagggcaagctgcaccaaagacggtggatatagccaccgcccccccgccgctgcctagcatctgcttggccaattagttcagcctcagaccatggcactttgagggggtctctacctccccatcaacagctgcagggggaccccagtgccaacttcctctcccactagggccctgccttcagctggtgcttgctgcgattcctgtgccttatgtaactgcccttccttcccttgccctaggaaaaaggctgcatctttatatgttacattcatataaactttgtaactttttggacattg

SEQ ID NO: 191493 - DNA, 680 bp, Homo sapiens
  Payload ID: 17824
  Gene Name: TMEM56-RWDD3 readthrough
  ENST ID: ENST00000604203
  CDS Start-End: 1-325
aatgcatcattgtgcgtccctgtatgcatactaccttgtactgaaaaatggagtgctggcatacattgggaattttcgcctgcttgcagagctttccagcccgtttgtgaatcagcgaccaaaggctgtagtcactggaaacatggacttgttttcatctctaactctccacctctccacactcagcctgcagagcccggccaacaatcagtttctggcatttgaagtcaaagagtattcagcgttggatgaattacaaaaggaatttgaaactgcaggacttaagaagcttttctccgaatttgtacttgctctggtaaaatgaaatggaagacaggaatcttttagtaaaatagcagtgttttttgttgtttttgcattggatttggggagtggttaattgaaatagtcaattttaaagtttctctgaagcaaaatgataggcatcattctaacttcaggaacaaaagccagttctgttttatgaaatattaaacatgaagaaaacttgtatattctaatgtttgccaggaaaggctaggttcagtagatgagacattatttaaaagataaatttaaaaagatggtaaatgaacacttgtttttatagacaatatttgtttgaaactatgtaattttctggctaattttcttgtaattaaatgattttttaaaaaaga

SEQ ID NO: 191494 - DNA, 1491 bp, Homo sapiens
  Payload ID: 17824
  Gene Name: TMEM56-RWDD3 readthrough
  ENST ID: ENST00000604534
  CDS Start-End: 181-786
ccgggcgccccgcattcctctcgcgtttctcgggctgcacgattccggctgccctgtctgcctggcggtgcctctcgggtctgagcttaaagcgggtgggtgcaaacctttgggcatccagggagagctttcttgttagagcccacacacaatcgggcgcatcaagtgggttgaagaaatatggagatcaacacaaaactgctcatcagtgttacctgtatcagctttttcacctttcagcttcttttctactttgtaagttactggttttcagcaaaagtttctccaggtttcaatagtctcagcttcaaaaagaagattgaatggaactcaagggtagtatccacatgccattctttggtggttggtatttttggcctgtacattttcttattcgatgaggctactaaagctgatccactttggggtggtccatcacttgcaaacgtgaatattgctattgcctcaggctacctcatttctgatttgtccattataattttgtattggaaagtgattggtgacaaattttttataatgcatcattgtgcgtccctgtatgcatactaccttgtactgaaaaatggagtgctggcatacattgggaattttcgcctgcttgcagagctttccagcccgtttgtgaatcagcgaccaaaggctgtagtcactggaaacatggacttgttttcatctctaactctccacctctccacactcagcctgcagagcccggccaacaatcaagacagatgggaccgtgttcagaattcacacaaaagctgaaggatttatggatgtggatatacctctggaattggtgttccatttgccagtcaattatccttcatgtctacctggtatctcgattaactctgaacagttgaccagggcccagtgtgtgactgtgaaagagaatttacttgagcaagcagagagccttttgtcggagcctatggttcatgagctggttctctggattcagcagaatctcaggcatatcctcagccaaccagaaactggcagtggcagtgaaaagtgtactttttcaacaagcacgaccatggatgatggattgtggataactcttttgcatttagatcacatgagagcaaagactaaatatgtcaaaattgtggagaagtgggcttcagatttaaggctgacaggaagactgatgttcatgggtaaaataatactgattttactacagggagacagaaacaacctcaaggtgccaaaaagttaaatgttgagtatgaatctggctattttctgctttaaatggtgtgtctttaagtgtgttttataacaatgggatagattaattattaagatgtttctgctttcattattacaatcttaatggatcttccttttctttttaaagaatgtctgactgctaattacaagtacaaacttgcaaagcttgaagaataagattgcattttaaaaatcatgtcacttaataaagtgacaggttatttaaaa

SEQ ID NO: 191495 - DNA, 1659 bp, Homo sapiens
  Payload ID: 17825
  Gene Name: TMEM9 domain family, member B
  Uniprot ID: Q9NQ34
  ENST ID: ENST00000309134
  CDS Start-End: 259-633
gacggaagtgcgggcggaggatccccagccgggtcccaagcctgtgcctgagcctgagcctgagcctgagcccgagccgggagccggtcgcgggggctccgggctgtgggaccgctgggcccccagcgatggcgaccctgtggggaggccttcttcggcttggctccttgctcagcctgtcgtgcctggcgctttccgtgctgctgctggcgcagctgtcagacgccgccaagtgattgccttcatgttgtggagcccatgcctgtgcgggggcctgatgtagaagcatactgtctacgctgtgaatgcaaatatgaagaaagaagctctgtcacaatcaaggttaccattataatttatctctccattttgggccttctacttctgtacatggtatatcttactctggttgagcccatactgaagaggcgcctctttggacatgcacagttgatacagagtgatgatgatattggggatcaccagccttttgcaaatgcacacgatgtgctagcccgctcccgcagtcgagccaacgtgctgaacaaggtagaatatgcacagcagcgctggaagcttcaagtccaagagcagcgaaagtctgtctttgaccggcatgttgtcctcagctaattgggaattgaattcaaggtgactagaaagaaacaggcagacaactggaaagaactgactgggttttgctgggtttcattttaataccttgttgatttcaccaactgttgctggaagattcaaaactggaagcaaaaacttgcttgatttttttttcttgttaacgtaataatagagacatttttaaaagcacacagctcaaagtcagccaataagtcttttcctatttgtgacttttactaataaaaataaatctgcctgtaaattatcttgaagtcctttacctggaacaagcactctctttttcaccacatagttttaacttgactttcaagataattttcagggtttttgttgttgttgttttttgtttgtttgttttggtgggagaggggagggatgcctgggaagtggttaacaacttttttcaagtcactttactaaacaaacttttgtaaatagaccttaccttctattttcgagtttcatttatattttgcagtgtagccagcctcatcaaagagctgacttactcatttgacttttgcactgactgtattatctgggtatctgctgtgtctgcacttcatggtaaacgggatctaaaatgcctggtggcttttcacaaaaagcagattttcttcatgtactgtgatgtctgatgcaatgcatcctagaacaaactggccatttgctagtttactctaaagactaaacatagtcttggtgtgtgtggtcttactcatcttctagtacctttaaggacaaatcctaaggacttggacacttgcaataaagaaattttattttaaacccaagcctccctggattgataatatatacacatttgtcagcatttccggtcgtggtgagaggcagctgtttgagctccaatgtgtgcagctttgaactagggctggggttgtgggtgcctcttctgaaaggtctaaccattattggataactggcttttttcttcctatgtcctctttggaatgtaacaataaaaataatttttgaaacatc

SEQ ID NO: 191496 - DNA, 1433 bp, Homo sapiens
  Payload ID: 17825
  Gene Name: TMEM9 domain family, member B
  Uniprot ID: Q9NQ34
  ENST ID: ENST00000525069
  CDS Start-End: 240-614
gctgcaggctggaccaaggggaggcacatggggagctccacagggaggccacgcccacgagggcagctcacagaattagaaagccgacggggtgctgtggtcaggaggcgcgtgggcggcagaatttcgaggatgtcagatgtaaatgtatctgccctccctataaagaaaattctgggcatatttataataagaacatatctcagaaagattgtgattgccttcatgttgtggagcccatgcctgtgcgggggcctgatgtagaagcatactgtctacgctgtgaatgcaaatatgaagaaagaagctctgtcacaatcaaggttaccattataatttatctctccattttgggccttctacttctgtacatggtatatcttactctggttgagcccatactgaagaggcgcctctttggacatgcacagttgatacagagtgatgatgatattggggatcaccagccttttgcaaatgcacacgatgtgctagcccgctcccgcagtcgagccaacgtgctgaacaaggtagaatatgcacagcagcgctggaagcttcaagtccaagagcagcgaaagtctgtctttgaccggcatgttgtcctcagctaattgggaattgaattcaaggtgactagaaagaaacaggcagacaactggaaagaactgactgggttttgctgggtttcattttaataccttgttgatttcaccaactgttgctggaagattcaaaactggaagcaaaaacttgcttgatttttttttcttgttaacgtaataatagagacatttttaaaagcacacagctcaaagtcagccaataagtcttttcctatttgtgacttttactaataaaaataaatctgcctgtaaattatcttgaagtcctttacctggaacaagcactctctttttcaccacatagttttaacttgactttcaagataattttcagggtttttgttgttgttgttttttgtttgtttgttttggtgggagaggggagggatgcctgggaagtggttaacaacttttttcaagtcactttactaaacaaacttttgtaaatagaccttaccttctattttcgagtttcatttatattttgcagtgtagccagcctcatcaaagagctgacttactcatttgacttttgcactgactgtattatctgggtatctgctgtgtctgcacttcatggtaaacgggatctaaaatgcctggtggcttttcacaaaaagcagattttcttcatgtactgtgatgtctgatgcaatgcatcctagaacaaactggccatttgctagtttactctaaagactaaacatagtcttggtgtgtgtggtcttactcatcttctagtacctttaaggacaaatcctaaggacttggacacttgcaataaagaaattttattttaaacccaag

SEQ ID NO: 191497 - DNA, 949 bp, Homo sapiens
  Payload ID: 17825
  Gene Name: TMEM9 domain family, member B
  ENST ID: ENST00000528117
  CDS Start-End: 220-507
gcctgtgcctgagcctgagcctgagcctgagcccgagccgggagccggtcgcgggggctccgggctgtgggaccgctgggcccccagcgatggcgaccctgtggggaggccttcttcggcttggctccttgctcagcctgtcgtgcctggcgctttccgtgctgctgctggcgcagctgtcagacgccgccaagtgattgccttcatgttgtggagcccatgcctgtgcgggggcctgatgtagaagcatactgtctacgctgtgaatgcaaatatgaagaaagaagctctgtcacaatcaaggttaccattataatttatctctccattttgggccttctacttctgtacatggtatatcttactctggttgagcccatactgaagaggcgcctctttggacatgcacagttgatacagagtgatgatgatattggggtaagttcccagcctgccctagctgctcatggccagtccctgtcatcattcgatgtgaagtgcaagtgaaaaatagtcatatatagatgttcacgtgctgaagcagatcctcaactagagaagctaaaaacagctctgatttcagtatatacctctttatgaagaaattgcttgatgaagccataaatgtgatgatttaaacgatgatctttggtgagcatgctatacagggccttgctttcagtaccaaaggcacaattttattgccattccctgtttacattgagaaaagtatcagagatggttttctctccaagctctcctgcctgaaacaccttctctgtcaatatcaccaaatattttagaaggcagagaggttttcatcaagggaagtgtgaagatcatgatgttcttttcttaatgaagtacaacttgataacctgctgatgttttatatttcctttttttctactgcttaaaaaaaaatctgtgggccaggtgtgggggcata

SEQ ID NO: 191498 - DNA, 2083 bp, Homo sapiens
  Payload ID: 17825
  Gene Name: TMEM9 domain family, member B
  Uniprot ID: Q9NQ34
  ENST ID: ENST00000534025
  CDS Start-End: 461-1057
gtgcgcgaacggctccggcccgcacgggtcgccagaggcgactgtgtgacactcggagtttgctggggtctccgtgggcgggaggactttccagcgcaatggcgactccctaagccccgcagcttctgcgcccgggaaagatatccaagagatgcaaagctctactgggcccaggctgccaccccagaggcccccttccgtcccggggccggggctaggccaaggcgggcaccaggactgcccagcctcccggcccttcgcactggtaaccggttccggggcggatgctttttgcatctgacccggcgcgcccggtgacgccttcgcgtccagacggaagtgcgggcggaggatccccagccgggtcccaagcctgtgcctgagcctgagcctgagcctgagcccgagccgggagccggtcgcgggggctccgggctgtgggaccgctgggcccccagcgatggcgaccctgtggggaggccttcttcggcttggctccttgctcagcctgtcgtgcctggcgctttccgtgctgctgctggcgcagctgtcagacgccgccaagaatttcgaggatgtcagatgtaaatgtatctgccctccctataaagaaaattctgggcatatttataataagaacatatctcagaaagattgtgattgccttcatgttgtggagcccatgcctgtgcgggggcctgatgtagaagcatactgtctacgctgtgaatgcaaatatgaagaaagaagctctgtcacaatcaaggttaccattataatttatctctccattttgggccttctacttctgtacatggtatatcttactctggttgagcccatactgaagaggcgcctctttggacatgcacagttgatacagagtgatgatgatattggggatcaccagccttttgcaaatgcacacgatgtgctagcccgctcccgcagtcgagccaacgtgctgaacaaggtagaatatgcacagcagcgctggaagcttcaagtccaagagcagcgaaagtctgtctttgaccggcatgttgtcctcagctaattgggaattgaattcaaggtgactagaaagaaacaggcagacaactggaaagaactgactgggttttgctgggtttcattttaataccttgttgatttcaccaactgttgctggaagattcaaaactggaagcaaaaacttgcttgatttttttttcttgttaacgtaataatagagacatttttaaaagcacacagctcaaagtcagccaataagtcttttcctatttgtgacttttactaataaaaataaatctgcctgtaaattatcttgaagtcctttacctggaacaagcactctctttttcaccacatagttttaacttgactttcaagataattttcagggtttttgttgttgttgttttttgtttgtttgttttggtgggagaggggagggatgcctgggaagtggttaacaacttttttcaagtcactttactaaacaaacttttgtaaatagaccttaccttctattttcgagtttcatttatattttgcagtgtagccagcctcatcaaagagctgacttactcatttgacttttgcactgactgtattatctgggtatctgctgtgtctgcacttcatggtaaacgggatctaaaatgcctggtggcttttcacaaaaagcagattttcttcatgtactgtgatgtctgatgcaatgcatcctagaacaaactggccatttgctagtttactctaaagactaaacatagtcttggtgtgtgtggtcttactcatcttctagtacctttaaggacaaatcctaaggacttggacacttgcaataaagaaattttattttaaacccaagcctccctggattgataatatatacacatttgtcagcatttccggtcgtggtgagaggcagctgtttgagctccaatgtgtgcagctttgaactagggctggggttgtgggtgcctcttctgaaaggtctaaccattattggataactggcttttttcttcctatgtcctctttggaatgtaacaataaaaataatttttgaaacatc

SEQ ID NO: 191499 - DNA, 625 bp, Homo sapiens
  Payload ID: 17825
  Gene Name: TMEM9 domain family, member B
  ENST ID: ENST00000530136
  CDS Start-End: 466-625
ggaagctcctcccctaccaccggccttgcggaaactgggtctgccaacctgctccttggcccattcctgacagccatacgcctggcctcacagctccggcagacccccgccgccaccagccccgcccctcccgactgcccggcggcactctcgccctcagccccgacagcctggcaggcagcgccccacgatacttagtcacctgttcctccacctcttgaaacttgttttgttggtagttgttctgtctgtcaaccaggaattagaagcaaagtttcctgggaagagtatactaaactgatctcagagtcaggctacttcctgtgtgtacttcctttctagttgtagaatttcgaggatgtcagatgtaaatgtatctgccctccctataaagaaaattctgggcatatttataataagaacatatctcagaaagattgtgattgccttcatgttgtggagcccatgcctgtgcgggggcctgatgtagaagcatactgtctacgctgtgaatgcaaatatgaagaaagaagctctgtcacaatcaaggttaccattataatttatctctccattttgggccttctacttctgtacatggtatatcttactctggttgagccca

SEQ ID NO: 191500 - DNA, 1958 bp, Homo sapiens
  Payload ID: 17826
  Gene Name: TMF1-regulated nuclear protein 1
  Uniprot ID: Q6NT89
  ENST ID: ENST00000522111
  CDS Start-End: 81-764
gccgtgtctagctgttcgggtgtgctgtggtcatcctccctgcgcacctacagccgcagaccgccggtggggggcgggggatgccgggctgccgcatcagcgcctgcggcccgggggcccaggaggggacggcagagcagaggtcgccgccgccgccctgggatcccatgccgtcctctcagcccccgcccccaactccgaccttgactcctaccccgaccccgggtcagtccccgccgctgccggacgcagctggggcttcagcaggcgcggccgaggaccaggagctgcagcgctggcgccagggcgctagcgggatcgcggggctcgccggccccggagggggctctggcgcggctgcgggggcggggggccgcgcgctggagctggccgaagcacggcggcggctgctggaggtggagggccgccggcgcctggtgtcggagctggagagccgcgtgctgcagctgcaccgcgttttcttggcggccgagctgcgcctggcgcaccgcgcggagagcctgagccgcctgagcggcggcgtggcgcaggccgagctctacctggcggctcacgggtcgcgcctcaagaagggcccgcgccgcggccgccgcggccgaccccccgcgctgctggcctcggcgctgggcctgggcggctgcgtgccctggggtgccgggcgactgcggcgcggccacggccccgagcccgactcgcccttccgccgcagcccgccccgcggccccgcctccccgcagcgctgacctccacgcccggacccctggccaccccgacaagcttcgccgaggtgccgaccgaccgactgatcgcggacgccggctggaaggactacggatccgcaggaagaggcagttgggggccaggggcccagtagaggaggctgagctccttccaactcctcagaacctccactctatggatctggacctctggattcggctttctccctgggcactgccttcaggaagacgttgagaattgaccttacacaatcccagcgccctcctcacaggagcctttcactttacagtggcaaggggctggttctggagaactggctgatgctctgaatttcttcatataccccacatttgactttggcttacactgtacaattggagatgttgctacaggtccctgagatgcaatcagattaagcgtagcaagcattgccaatgggaaagtcaaaataatttattttttttccctttccccctaccccatccccagccaagaatttcttttcaagatatcgtcatcattcttaaacaacattcttaacccccagctggggtccccattttaatagatgtcattgcttcaagtctaacggcgccgggaggcctgtttgagggaaaacattagtttgaaaaatccccgttcccttcatccactgcccttgttctccacgtgggagtgtgcttgtggcccctcagaaagatagtctgctggctcctaggggttggggtgggggacacacctttttctcaggaagaggtgatggcaatgtaaaacatctaagcaaagttttaaatgaaaaaaaggaaacacatttaaacatcctgataatggagggaaggggggcacatttacacatagcccagaacttgtagaattctgcatagtgaatgtatattgaattagtctcctgccttatacattcaggaggaataaatttccataatgtaaggcaaatgcatggggttctgaggttcactttgcaagtgcccttgctgcctttcctctgtgtctattatggctctttaagttgacggttcctggagcagcttgtatttagtttcgtttggcagtctggccctgttgactttgatttgcagaccaattctcccttgacctgactcacagccgcctgctcttacccccctcctcaggaagtcttcctcattaaaggatgtgatgacggagctcagggatga

SEQ ID NO: 191501 - DNA, 575 bp, Homo sapiens
  Payload ID: 17826
  Gene Name: TMF1-regulated nuclear protein 1
  ENST ID: ENST00000531285
  CDS Start-End: 1-152
gcggccgaccccccgcgctgctggcctcggcgctgggcctgggcggctgcgtgccctggggtgccgggcgactgcggcgcggccacggccccgagcccgactcgcccttccgccgcagcccgccccgcggccccgcctccccgcagcgctgacctccacgcccggacccctggccaccccgacaagcttcgccgaggtgccgaccgaccgactgatcgcggacgccggctggaaggactacggatccgcaggaagaggcagttgggggccaggggcccagtagaggaggctgaggtgcggtcttagcggctgctccttccaactcctcagaacctccactctatggatctggacctctggattcggctttctccctgggcactgccttcaggaagacgttgagaattgaccttacacaatcccagcgccctcctcacaggagcctttcactttacagtggcaaggggctggttctggagaactggctgatgctctgaatttcttcatataccccacatttgactttggcttacactgtacaattggagatgttgctacaggtccctgagatgcaa

SEQ ID NO: 191502 - DNA, 585 bp, Homo sapiens
  Payload ID: 17827
  Gene Name: TMX2-CTNND1 readthrough (NMD candidate)
  ENST ID: ENST00000528395
  CDS Start-End: 15-326
ttacggccgaaaagatggcggtcttggcacctctaattgctctcgtgtattcggtgccgcgactttcacgatggctcgcccaaccttactaccttctgtcggccctgctctctgctgccttcctactcgtgaggaaactgccgccgctctgccacggtctgcccacccaacgcgaagacggtaacccgtgtgactttgactggagagaagtggagatcctgatgtttctcagtgccattgtgatgatgaagaaccgcagatccactctctccttcctgcttcctccttgctgtggtggctgggatgcttcttccatgattttttgaatctagactgggctgttctctgtgttaaaccaatcagttgcgaccttctcttaacagtgtgaagtgagggggtctctctccctccttctccttcctctgtgattcaccttcctttttaccctgccctgcggcggctccgccccttaccttcatggacgactcagaggtggagtcgaccgccagcatcttggcctctgtgaaggaacaagaggcccagtttgagaagctgacccgggcgctggaggaggaacggcgccac

SEQ ID NO: 191503 - DNA, 6324 bp, Homo sapiens
  Payload ID: 17828
  Gene Name: TNF receptor-associated factor 1
  Uniprot ID: Q13077
  ENST ID: ENST00000373887
  CDS Start-End: 2447-3697
gcggcgggggctgtgctggcgccggcaggcgcgaggaatcacagagcggggcgcccagcctcatcatggggcggcccacggagacttcccgtgggagtggggtctggtgcaggggcgccccaaaggacgagtgggagatggggacacgcggcgcagagagactcctcgtggatggagccgatggaggcccagtgtagaagagaaaggggtcaaggagacggataaggagccaccagagacgcggggggaattccccgcagaggatgcgggaagccggggaaaggaagggattccggaaggaagggctgagagccgggtcaggtgctggcaggagggctggttggatagaaactggggcgggcccagggcatttggcgtccccgacatgcgtatacacttggagagatgattccctggagatccaagtgcctgtatagacaatcttttctagaagttctaccgttaggtgaggcgagagtagatgtagaaattggagacgagaataaagagtgttttaaaagcgtgcgtggttacaggactggctctgggttcaggggtccccactcactagctgtgagaccttgaacaagtcgcttagcctctctgtgcctcagttttctcatctgtaaggtggggatgatgatggcaatacctgcttcacagagtgaaaattagatgagatgatgtctgtaaaattacgtaagacggtacccaaaagtagtactatttttcccttttcttattagagcaggttgcgcacgttttgatgtccgtgggaatgagcaggtagagagggtggtattgaggccggaggggagagaagggacccacagatggggagagaagtcttgggtgcctgttttatcccaaaccaggggaaggagggaacaggtagggctggctgcaggaaagcttgcaggtatggggtacacagttaaaagggagtgtcttctgatagtcttgatgcaggcctggaggtcgtttgttatgggggtggaggtcctgatgtacattgtggcggtaagatgccgtgctgtctttgccaccagcctgtggcagccctggtgttacaccagggcaggtgggcagtttaatgtatctcaggccagatgacctgccctgcccacctgttgaggctccagtagatagacgtgaaagcacagtataagcataatgcaccactttaatccttttctctgaggagctggaaggcctgtagtcaccatctgagccaaatgtcattcaagtacttcacttgggttacacaccacactttgacccactatctcatttagtcatcacaacaaatgggtgaaataggtattattgtcccattttacagatgcagaatctgagtttcagggaagttaaggactttgtcccagggcccacagttagtaagcagtggacccaggatttcaactcagctctgtctgacctcaaaacccatgatctgaaaccactgtgaaagtttgcaaaacctctgtagcagccaagcaggatggaaagatgtgtagggattgtcttctccatttgatagatgagacaagagctgggtactctgatctccatcccaagcacacagagcttggggccccacagccctggtgtgaatcccactccactaccagaggctgtgtgcctttggaccaggcatcttgcttctctgaccctatatacagctgcagaagaattccttgcaggttgctgtaaggatttggagggaaactgttgcccagcacacagtacacattctgggagccatcgtttccccagtgcacttttcctgcaaatgtggatctacatcccacttggatgctgagaccagctgctgtgatcttgcatttgtttagcgctttgttctccttgaggcagtaaagtggtggcacctgaccggagcatgtagccacctatgacttcctgagtggggtggtgtggggagggccctgaggagtctgtggtcctaggccttggatttcatcagggctttcctgctccttctggttgcctcagtcccaggcaagatagggtcccagaatcttacagcccagaggccacctgttgcaacttcttttttacagatggagtcatcagaacccactgtgaggaagtgacttctccttgaggtcacccagacactccaaacagagcagagcaaaagcgcctagaacttgaaattttggacctgtctccaacaccctggggatttccaccaggaagccttcagtcaccatccaggggatttttatcgccacaaagggtaattcctgctccatccctgctgtgactcagctgtgacgttgaaccacacaagccagagagaagaagataaagtcatcagagctcctactcaccagagagtgaggcccaggccaggactccacaaggctggtcccctgccctggagcaacttaaacaggccctctggccagcctggaaccctgagatggcctccagctcaggcagcagtcctcgcccggcccctgatgagaatgagtttccctttgggtgccctcccaccgtctgccaggacccaaaggagcccagggctctctgctgtgcaggctgtctctctgagaacccgaggaatggcgaggatcagatctgccccaaatgcagaggggaagacctccagtctataagcccaggaagccgtcttcgaactcaggagaaggctcaccccgaggtggctgaggctggaattgggtgcccctttgcaggtgtcggctgctccttcaagggaagcccacagtctgtgcaagagcatgaggtcacctcccagacctcccacctaaacctgctgttggggttcatgaaacagtggaaggcccggctgggctgtggcctggagtctgggcccatggccctggagcagaacctgtcagacctgcagctgcaggcagccgtggaagtggcgggggacctggaggtcgattgctaccgggcaccctgctccgagagccaggaggagctggccctgcagcacttcatgaaggagaagcttctggctgagctggaggggaagctgcgtgtgtttgagaacattgttgctgtcctcaacaaggaggtggaggcctcccacctggccctggccacctctatccaccagagccagctggaccgtgagcgcatcctgagcttggagcagagggtggtggagcttcagcagaccctggcccagaaagaccaggccctgggcaagctggagcagagcttgcgcctcatggaggaggcctccttcgatggcactttcctgtggaagatcaccaatgtcaccaggcggtgccatgagtcggcctgtggcaggaccgtcagcctcttctccccagccttctacactgccaagtatggctacaagttgtgcctgcggctgtacctgaatggagatggcactggaaagagaacccatctgtcgctcttcatcgtgatcatgagaggggagtatgatgcgctgctgccgtggcccttccggaacaaggtcaccttcatgctgctggaccagaacaaccgtgagcacgccattgacgccttccggcctgacctaagctcagcgtccttccagaggccccagagtgaaaccaacgtggccagtggatgcccactcttcttccccctcagcaaactgcagtcacccaagcacgcctacgtgaaggacgacacaatgttcctcaagtgcattgtggagaccagcacttagggtgggcggggctcctgagggagctccaactcagaagggagctagccagaggactgtgatgccctgcccttggcacccaagacctcagggcacaaagatgggtgaaggctggcatgatccaagcaagactgaggggtcgacttcgggctggccatctggttaggatggcaggacgtgggctgggcccacaaaggcaaagggtccagaaggagacaggcagagctgctcccctctgcacggaccatgcgacactgggaggccagtgagccactccggccccgaatgttgaggtggactctcaccaaatgagaagaaaatggaaccaggcttggaaccgtaggacccaagcagagaagctctcgggctaggaagatctctgcagggccgccagggagacctggacacaggcctgctctctttttctccagggtcagaaacaggaccgggtggaagggatggggtgccagtttgaatgcagtctgtccaggctcgtcattggaggtgaacaagcaaacccagacggctccactaggacttcaaattgggggttggatttgaagacttttaagtttccttccagcccagaaagtctctcattctaggcctcctggcccaggtgagtcctagagctacaggggttctggaaacattcaggagcttcctgtcctcccagctcctcactcaccttcagtaacccccactggactgacctggtccacagggcacctgccaccctgggcctggcagctcagcttccccaacacgcaggagcacacccagcccccacatcctgtgcctccatcagctaaacaccacgtcacttcatgcaggtgaaacccagtcactgtgagctcccaggtgcagccagaggcacctcaagaagaagaggggcataaactttcctcttcctgcctagaggccccacctttggtgctttccagaatcccgtaacacctgattaactgaggcatccacttctttcagcagactgatcaggacctccaagccactgagcaatgtataaccccaaagaaataatttttagaatctctttcgaagttttcctaaagtgtatggtttgggagttgtttgtactgagccaggtttgaaaaggccattgctgagtttgaggtggtgccaccagttttgcaggtggcatcagaggctggcatgctggcaggaacatcccctcttagccccagtcttctcttttctataatgagacccaccccagcttgcctccctccctggcttctctgaccctcaaaggagatgccacgcaggacagactggagagagaagcctgggcaatactgcccgcctgtcatggcctggtggtggcccacacctatcttctcaccttggaggccacacccaactttccaaagaccctgagacaagtcaggaccctactactctcccctgctgctttcctgacagcttactcttcctccacctgctgagcctgtgccagactccattgctcaaatcgttagggttgcttctataaaaatgggtcagtagcccttcctgttctctccagcccagcatacaggaggatcaaaggaggtgacggagcatcgtggcacggcagtctcaatgggtcagaaacccaggccagctgggctctaagcctggcatcctgtcatgcttagtccttcagctgaagatcagaggaagcctctcccttgccctctccagctctaggggttttcaggaggcccaactgcaataatggagcactagtgcttttatgtgcaatggtgtcgtccatgcacgacagcagcaaacattctggggctgctttttattgttcccacggctgacagcgtggcagcggagactgtggaggcagtggagactgacttcttcctgctgacagctggatgtcacacatgaaggtctggcctagcgagtgatgggtctaggccctgaaactgatgtcctagcaataacctcttgatccctactcaccgagtgttgagcccaaggggggatttgtagaacaagcccccatgagaaacagctgttactctacacttttgattgcctatttctgatggcaagagatacatactctcttcaaagagcatgagatgcagccattctttcagcaaagcttcattgacacctgcacctgttaactgtgttcgacattgaagggagaaaggcaagatgtgcactctggactcaagaaactcttagttcagtggaggaaatgagcagataagtagatcattatgattgagagtaggagaagcttagagaaagcacagaatcccagatccagctggtgaaggagggaaggcttcaggcctttaagctcagcctgagaatattgtgaaatgcagaggatggggaaaagggaagagtaccgacttgaaaacggagagctgtcttggctgagggcagggtctgtgtggcaggatgggggagggagtcagaagggtcagatgaactggagtgtagacagcatcagatgcagcagtgcccaccgcccccccccccaccccccgccctgcccacagagcacctgctggtaaccctgggcctattgaaagcaggatgagatgataatttaagacactgaatgatttcttttccaacaaagctctatgttaagtgca

SEQ ID NO: 191504 - DNA, 3715 bp, Homo sapiens
  Payload ID: 17828
  Gene Name: TNF receptor-associated factor 1
  Uniprot ID: Q13077
  ENST ID: ENST00000546084
  CDS Start-End: 204-1088
gatgattacggagctgtgtggactgtgccctgacaggagaaatagcagtgctgcccaggatcacagctcaccccgaggtggctgaggctggaattgggtgcccctttgcaggtgtcggctgctccttcaagggaagcccacagtctgtgcaagagcatgaggtcacctcccagacctcccacctaaacctgctgttggggttcatgaaacagtggaaggcccggctgggctgtggcctggagtctgggcccatggccctggagcagaacctgtcagacctgcagctgcaggcagccgtggaagtggcgggggacctggaggtcgattgctaccgggcaccctgctccgagagccaggaggagctggccctgcagcacttcatgaaggagaagcttctggctgagctggaggggaagctgcgtgtgtttgagaacattgttgctgtcctcaacaaggaggtggaggcctcccacctggccctggccacctctatccaccagagccagctggaccgtgagcgcatcctgagcttggagcagagggtggtggagcttcagcagaccctggcccagaaagaccaggccctgggcaagctggagcagagcttgcgcctcatggaggaggcctccttcgatggcactttcctgtggaagatcaccaatgtcaccaggcggtgccatgagtcggcctgtggcaggaccgtcagcctcttctccccagccttctacactgccaagtatggctacaagttgtgcctgcggctgtacctgaatggagatggcactggaaagagaacccatctgtcgctcttcatcgtgatcatgagaggggagtatgatgcgctgctgccgtggcccttccggaacaaggtcaccttcatgctgctggaccagaacaaccgtgagcacgccattgacgccttccggcctgacctaagctcagcgtccttccagaggccccagagtgaaaccaacgtggccagtggatgcccactcttcttccccctcagcaaactgcagtcacccaagcacgcctacgtgaaggacgacacaatgttcctcaagtgcattgtggagaccagcacttagggtgggcggggctcctgagggagctccaactcagaagggagctagccagaggactgtgatgccctgcccttggcacccaagacctcagggcacaaagatgggtgaaggctggcatgatccaagcaagactgaggggtcgacttcgggctggccatctggttaggatggcaggacgtgggctgggcccacaaaggcaaagggtccagaaggagacaggcagagctgctcccctctgcacggaccatgcgacactgggaggccagtgagccactccggccccgaatgttgaggtggactctcaccaaatgagaagaaaatggaaccaggcttggaaccgtaggacccaagcagagaagctctcgggctaggaagatctctgcagggccgccagggagacctggacacaggcctgctctctttttctccagggtcagaaacaggaccgggtggaagggatggggtgccagtttgaatgcagtctgtccaggctcgtcattggaggtgaacaagcaaacccagacggctccactaggacttcaaattgggggttggatttgaagacttttaagtttccttccagcccagaaagtctctcattctaggcctcctggcccaggtgagtcctagagctacaggggttctggaaacattcaggagcttcctgtcctcccagctcctcactcaccttcagtaacccccactggactgacctggtccacagggcacctgccaccctgggcctggcagctcagcttccccaacacgcaggagcacacccagcccccacatcctgtgcctccatcagctaaacaccacgtcacttcatgcaggtgaaacccagtcactgtgagctcccaggtgcagccagaggcacctcaagaagaagaggggcataaactttcctcttcctgcctagaggccccacctttggtgctttccagaatcccgtaacacctgattaactgaggcatccacttctttcagcagactgatcaggacctccaagccactgagcaatgtataaccccaaagaaataatttttagaatctctttcgaagttttcctaaagtgtatggtttgggagttgtttgtactgagccaggtttgaaaaggccattgctgagtttgaggtggtgccaccagttttgcaggtggcatcagaggctggcatgctggcaggaacatcccctcttagccccagtcttctcttttctataatgagacccaccccagcttgcctccctccctggcttctctgaccctcaaaggagatgccacgcaggacagactggagagagaagcctgggcaatactgcccgcctgtcatggcctggtggtggcccacacctatcttctcaccttggaggccacacccaactttccaaagaccctgagacaagtcaggaccctactactctcccctgctgctttcctgacagcttactcttcctccacctgctgagcctgtgccagactccattgctcaaatcgttagggttgcttctataaaaatgggtcagtagcccttcctgttctctccagcccagcatacaggaggatcaaaggaggtgacggagcatcgtggcacggcagtctcaatgggtcagaaacccaggccagctgggctctaagcctggcatcctgtcatgcttagtccttcagctgaagatcagaggaagcctctcccttgccctctccagctctaggggttttcaggaggcccaactgcaataatggagcactagtgcttttatgtgcaatggtgtcgtccatgcacgacagcagcaaacattctggggctgctttttattgttcccacggctgacagcgtggcagcggagactgtggaggcagtggagactgacttcttcctgctgacagctggatgtcacacatgaaggtctggcctagcgagtgatgggtctaggccctgaaactgatgtcctagcaataacctcttgatccctactcaccgagtgttgagcccaaggggggatttgtagaacaagcccccatgagaaacagctgttactctacacttttgattgcctatttctgatggcaagagatacatactctcttcaaagagcatgagatgcagccattctttcagcaaagcttcattgacacctgcacctgttaactgtgttcgacattgaagggagaaaggcaagatgtgcactctggactcaagaaactcttagttcagtggaggaaatgagcagataagtagatcattatgattgagagtaggagaagcttagagaaagcacagaatcccagatccagctggtgaaggagggaaggcttcaggcctttaagctcagcctgagaatattgtgaaatgcagaggatggggaaaagggaagagtaccgacttgaaaacggagagctgtcttggctgagggcagggtctgtgtggcaggatgggggagggagtcagaagggtcagatgaactggagtgtagacagcatcagatgcagcagtgcccaccgcccccccccccaccccccgccctgcccacagagcacctgctggtaaccctgggcctattgaaagcaggatgagatgataatttaagacactgaatgatttcttttccaacaaagctctatgttaagtgca

SEQ ID NO: 191505 - DNA, 4303 bp, Homo sapiens
  Payload ID: 17828
  Gene Name: TNF receptor-associated factor 1
  Uniprot ID: Q13077
  ENST ID: ENST00000540010
  CDS Start-End: 426-1676
acactccaccggaagctccgggcctggccgccggtaggcggtggcggaggcggcgccgagatggagtcatcagaacccactgtgaggaagtgacttctccttgaggtcacccagacactccaaacagagcagagcaaaagcgcctagaacttgaaattttggacctgtctccaacaccctggggatttccaccaggaagccttcagtcaccatccaggggatttttatcgccacaaagggtaattcctgctccatccctgctgtgactcagctgtgacgttgaaccacacaagccagagagaagaagataaagtcatcagagctcctactcaccagagagtgaggcccaggccaggactccacaaggctggtcccctgccctggagcaacttaaacaggccctctggccagcctggaaccctgagatggcctccagctcaggcagcagtcctcgcccggcccctgatgagaatgagtttccctttgggtgccctcccaccgtctgccaggacccaaaggagcccagggctctctgctgtgcaggctgtctctctgagaacccgaggaatggcgaggatcagatctgccccaaatgcagaggggaagacctccagtctataagcccaggaagccgtcttcgaactcaggagaaggctcaccccgaggtggctgaggctggaattgggtgcccctttgcaggtgtcggctgctccttcaagggaagcccacagtctgtgcaagagcatgaggtcacctcccagacctcccacctaaacctgctgttggggttcatgaaacagtggaaggcccggctgggctgtggcctggagtctgggcccatggccctggagcagaacctgtcagacctgcagctgcaggcagccgtggaagtggcgggggacctggaggtcgattgctaccgggcaccctgctccgagagccaggaggagctggccctgcagcacttcatgaaggagaagcttctggctgagctggaggggaagctgcgtgtgtttgagaacattgttgctgtcctcaacaaggaggtggaggcctcccacctggccctggccacctctatccaccagagccagctggaccgtgagcgcatcctgagcttggagcagagggtggtggagcttcagcagaccctggcccagaaagaccaggccctgggcaagctggagcagagcttgcgcctcatggaggaggcctccttcgatggcactttcctgtggaagatcaccaatgtcaccaggcggtgccatgagtcggcctgtggcaggaccgtcagcctcttctccccagccttctacactgccaagtatggctacaagttgtgcctgcggctgtacctgaatggagatggcactggaaagagaacccatctgtcgctcttcatcgtgatcatgagaggggagtatgatgcgctgctgccgtggcccttccggaacaaggtcaccttcatgctgctggaccagaacaaccgtgagcacgccattgacgccttccggcctgacctaagctcagcgtccttccagaggccccagagtgaaaccaacgtggccagtggatgcccactcttcttccccctcagcaaactgcagtcacccaagcacgcctacgtgaaggacgacacaatgttcctcaagtgcattgtggagaccagcacttagggtgggcggggctcctgagggagctccaactcagaagggagctagccagaggactgtgatgccctgcccttggcacccaagacctcagggcacaaagatgggtgaaggctggcatgatccaagcaagactgaggggtcgacttcgggctggccatctggttaggatggcaggacgtgggctgggcccacaaaggcaaagggtccagaaggagacaggcagagctgctcccctctgcacggaccatgcgacactgggaggccagtgagccactccggccccgaatgttgaggtggactctcaccaaatgagaagaaaatggaaccaggcttggaaccgtaggacccaagcagagaagctctcgggctaggaagatctctgcagggccgccagggagacctggacacaggcctgctctctttttctccagggtcagaaacaggaccgggtggaagggatggggtgccagtttgaatgcagtctgtccaggctcgtcattggaggtgaacaagcaaacccagacggctccactaggacttcaaattgggggttggatttgaagacttttaagtttccttccagcccagaaagtctctcattctaggcctcctggcccaggtgagtcctagagctacaggggttctggaaacattcaggagcttcctgtcctcccagctcctcactcaccttcagtaacccccactggactgacctggtccacagggcacctgccaccctgggcctggcagctcagcttccccaacacgcaggagcacacccagcccccacatcctgtgcctccatcagctaaacaccacgtcacttcatgcaggtgaaacccagtcactgtgagctcccaggtgcagccagaggcacctcaagaagaagaggggcataaactttcctcttcctgcctagaggccccacctttggtgctttccagaatcccgtaacacctgattaactgaggcatccacttctttcagcagactgatcaggacctccaagccactgagcaatgtataaccccaaagaaataatttttagaatctctttcgaagttttcctaaagtgtatggtttgggagttgtttgtactgagccaggtttgaaaaggccattgctgagtttgaggtggtgccaccagttttgcaggtggcatcagaggctggcatgctggcaggaacatcccctcttagccccagtcttctcttttctataatgagacccaccccagcttgcctccctccctggcttctctgaccctcaaaggagatgccacgcaggacagactggagagagaagcctgggcaatactgcccgcctgtcatggcctggtggtggcccacacctatcttctcaccttggaggccacacccaactttccaaagaccctgagacaagtcaggaccctactactctcccctgctgctttcctgacagcttactcttcctccacctgctgagcctgtgccagactccattgctcaaatcgttagggttgcttctataaaaatgggtcagtagcccttcctgttctctccagcccagcatacaggaggatcaaaggaggtgacggagcatcgtggcacggcagtctcaatgggtcagaaacccaggccagctgggctctaagcctggcatcctgtcatgcttagtccttcagctgaagatcagaggaagcctctcccttgccctctccagctctaggggttttcaggaggcccaactgcaataatggagcactagtgcttttatgtgcaatggtgtcgtccatgcacgacagcagcaaacattctggggctgctttttattgttcccacggctgacagcgtggcagcggagactgtggaggcagtggagactgacttcttcctgctgacagctggatgtcacacatgaaggtctggcctagcgagtgatgggtctaggccctgaaactgatgtcctagcaataacctcttgatccctactcaccgagtgttgagcccaaggggggatttgtagaacaagcccccatgagaaacagctgttactctacacttttgattgcctatttctgatggcaagagatacatactctcttcaaagagcatgagatgcagccattctttcagcaaagcttcattgacacctgcacctgttaactgtgttcgacattgaagggagaaaggcaagatgtgcactctggactcaagaaactcttagttcagtggaggaaatgagcagataagtagatcattatgattgagagtaggagaagcttagagaaagcacagaatcccagatccagctggtgaaggagggaaggcttcaggcctttaagctcagcctgagaatattgtgaaatgcagaggatggggaaaagggaagagtaccgacttgaaaacggagagctgtcttggctgagggcagggtctgtgtggcaggatgggggagggagtcagaagggtcagatgaactggagtgtagacagcatcagatgcagcagtgcccaccgcccccccccccaccccccgccctgcccacagagcacctgctggtaaccctgggcctattgaaagcaggatgagatgataatttaagacactgaatgatttcttttccaacaaagctctatgttaagtgca

SEQ ID NO: 191506 - DNA, 2264 bp, Homo sapiens
  Payload ID: 17829
  Gene Name: TNF receptor-associated factor 2
  Uniprot ID: Q12933
  ENST ID: ENST00000247668
  CDS Start-End: 53-1558
ttccgggcgcgctgcgaccgttggggctttgttcgcgggggtcacagctctcatggctgcagctagcgtgaccccccctggctccctggagttgctacagcccggcttctccaagaccctcctggggaccaagctggaagccaagtacctgtgctccgcctgcagaaacgtcctccgcaggcccttccaggcgcagtgtggccaccggtactgctccttctgcctggccagcatcctcagctctgggcctcagaactgtgctgcctgtgttcacgagggcatatatgaagaaggcatttctattttagaaagcagttcggccttcccagataatgctgcccgcagggaggtggagagcctgccggccgtctgtcccagtgatggatgcacctggaaggggaccctgaaagaatacgagagctgccacgaaggccgctgcccgctcatgctgaccgaatgtcccgcgtgcaaaggcctggtccgccttggtgaaaaggagcgccacctggagcacgagtgcccggagagaagcctgagctgccggcattgccgggcaccctgctgcggagcagacgtgaaggcgcaccacgaggtctgccccaagttccccttaacttgtgacggctgcggcaagaagaagatcccccgggagaagtttcaggaccacgtcaagacttgtggcaagtgtcgagtcccttgcagattccacgccatcggctgcctcgagacggtagagggtgagaaacagcaggagcacgaggtgcagtggctgcgggagcacctggccatgctactgagctcggtgctggaggcaaagcccctcttgggagaccagagccacgcggggtcagagctcctgcagaggtgcgagagcctggagaagaagacggccacttttgagaacattgtctgcgtcctgaaccgggaggtggagagggtggccatgactgccgaggcctgcagccggcagcaccggctggaccaagacaagattgaagccctgagtagcaaggtgcagcagctggagaggagcattggcctcaaggacctggcgatggctgacttggagcagaaggtcttggagatggaggcatccacctacgatggggtcttcatctggaagatctcagacttcgccaggaagcgccaggaagctgtggctggccgcatacccgccatcttctccccagccttctacaccagcaggtacggctacaagatgtgtctgcgtatctacctgaacggcgacggcaccgggcgaggaacacacctgtccctcttctttgtggtgatgaagggcccgaatgacgccctgctgcggtggcccttcaaccagaaggtgaccttaatgctgctcgaccagaataaccgggagcacgtgattgacgccttcaggcccgacgtgacttcatcctcttttcagaggccagtcaacgacatgaacatcgcaagcggctgccccctcttctgccccgtctccaagatggaggcaaagaattcctacgtgcgggacgatgccatcttcatcaaggccattgtggacctgacagggctctaactgccccctactggtgtctgggggttgggggcagccaggcacagccggctcacggaggggccaccacgctgggccagggtctcactgtacaagtgggcaggggccgcgcttgggcgcttgggagggtgtcggcctgcagccaagttcactgtcacgggggaaggagccaccagccagtcctcagatttcagagactgcggaggggcttggcagacggtcttagccaagggctgtggtggcattggccgagggtcttcgggtgcttcccagcacaagctgcccttgctgtcctgtgcagtgaagggagaggccctgggtgggggacactcagagtgggagcacatcccagcagtgcccatgtagcaggagcacagtggatggccttgtgtccctcgggcatgacaggcagaaacgagggctgctccaggagaagggcctcctgctggccagagcaaggaaggctgagcagcttggttctcccctctggcccctggagagaagggagcattcctagacccctgggtgcttgtctgcacagagctctggtctgtgccaccttggccaggctggctgtgggagagggtctggtcccacgccgcctctgctcagaccactgtgtgggaggtgcacagcacagcctgcgggtaaagtgtgagagcttgccatccagctcacgaagacagagttattaaaccattcaaatctc

SEQ ID NO: 191507 - DNA, 680 bp, Homo sapiens
  Payload ID: 17829
  Gene Name: TNF receptor-associated factor 2
  ENST ID: ENST00000414589
  CDS Start-End: 318-680
tggcactcccaaagtgctgggattacaggctggtctcgaactcctggcctgaagtgatcctccaacctcagcctcccaagtagctgggattacaggttgaatcgctcctagctgacccctcacgtctcttatgatacgtacagaaagcaagagcagcccatgccgtccggccgcgcaccaggtctcagtctgtgtgtctggttcaggtgaccatggtgttcagttcagttcctcctgcctcgtgtgtaggccactgagagctccctagtctaagccggaggaggttctgggctttgttcgcgggggtcacagctctcatggctgcagctagcgtgaccccccctggctccctggagttgctacagcccggcttctccaagaccctcctggggaccaagctggaagccaagtacctgtgctccgcctgcagaaacgtcctccgcaggcccttccaggcgcagtgtggccaccggtactgctccttctgcctggccagcatcctcagctctgggcctcagaactgtgctgcctgtgttcacgagggcatatatgaagaaggcatttctattttagaaagcagttcggccttcccagataatgctgcccgcagggaggtggagagcctgccggccgtctgtcccagtgatggatgcacctggaaggggaccctgaaagaatac

SEQ ID NO: 191508 - DNA, 709 bp, Homo sapiens
  Payload ID: 17829
  Gene Name: TNF receptor-associated factor 2
  ENST ID: ENST00000419057
  CDS Start-End: 195-709
agatgactgcagagtgagagtgaaaccagcttccctcggaggctgcagcacagggctgacatgcaaacgtctgaaaaagaggcaagctctcggtgtgagcaagtggactgcggctatttgaggaaggagcccacgtgggaatcccctgagctgcgccatggccagaggctttgttcgcgggggtcacagctctcatggctgcagctagcgtgaccccccctggctccctggagttgctacagcccggcttctccaagaccctcctggggaccaagctggaagccaagtacctgtgctccgcctgcagaaacgtcctccgcaggcccttccaggcgcagtgtggccaccggtactgctccttctgcctggccagcatcctcagctctgggcctcagaactgtgctgcctgtgttcacgagggcatatatgaagaaggcatttctattttagaaagcagttcggccttcccagataatgctgcccgcagggaggtggagagcctgccggccgtctgtcccagtgatggatgcacctggaaggggaccctgaaagaatacgagagctgccacgaaggccgctgcccgctcatgctgaccgaatgtcccgcgtgcaaaggcctggtccgccttggtgaaaaggagcgccacctggagcacgagtgcccggagagaagcctgagctgccggcattgccgggcaccctgctgcgg

SEQ ID NO: 191509 - DNA, 823 bp, Homo sapiens
  Payload ID: 17829
  Gene Name: TNF receptor-associated factor 2
  ENST ID: ENST00000429509
  CDS Start-End: 244-823
accggtgtcgcccggcttgggctcccggctcacctctcgggtgtgcggcaggggtctccgccccggggccacgggaggggaagcaagggcctcgctgtctcgccgcacctggggaagggacccaattagcgcggaccccacagcgcagcacctcaccagctccccgcaccaacgccccggcgcgctctttgaggaaaaagcagagggcgacttagggctttgttcgcgggggtcacagctctcatggctgcagctagcgtgaccccccctggctccctggagttgctacagcccggcttctccaagaccctcctggggaccaagctggaagccaagtacctgtgctccgcctgcagaaacgtcctccgcaggcccttccaggcgcagtgtggccaccggtactgctccttctgcctggccagcatcctcagctctgggcctcagaactgtgctgcctgtgttcacgagggcatatatgaagaaggcatttctattttagaaagcagttcggccttcccagataatgctgcccgcagggaggtggagagcctgccggccgtctgtcccagtgatggatgcacctggaaggggaccctgaaagaatacgagagctgccacgaaggccgctgcccgctcatgctgaccgaatgtcccgcgtgcaaaggcctggtccgccttggtgaaaaggagcgccacctggagcacgagtgcccggagagaagcctgagctgccggcattgccgggcaccctgctgcggagcagacgtgaaggcgcaccacgaggtctgccccaagttccccttaacttgtgacggctgcggca

SEQ ID NO: 191510 - DNA, 7700 bp, Homo sapiens
  Payload ID: 17830
  Gene Name: TNF receptor-associated factor 3
  ENST ID: ENST00000347662
  CDS Start-End: 354-1985
gggagcgcggcgcggccgccgcgtgcgcgagccggggttgcagcccagccgggactttccagccggcggcagccgcggcggccgccggctcttccccgccccccgccatggggcagcccggggagcagaacgctgcggaccgcggcggaggacgcgcccggcgcccctgagccggccgagcggcgacggaccgcgagatgaggaaaatgaggcccaaagaagtgatgccacttggttaaggtcccagagcaggtcagaatcagacctaggatcagaaacctggctcctggctcctggctccctactcttctaaggatcgctgtcctgacagaagagaactcctctttcctaaaatggagtcgagtaaaaagatggactctcctggcgcgctgcagactaacccgccgctaaagctgcacactgaccgcagtgctgggacgccagtttttgtccctgaacaaggaggttacaaggaaaagtttgtgaagaccgtggaggacaagtacaagtgtgagaagtgccacctggtgctgtgcagcccgaagcagaccgagtgtgggcaccgcttctgcgagagctgcatggcggccctgctgagctcttcaagtccaaaatgtacagcgtgtcaagagagcatcgttaaagataaggtgtttaaggataattgctgcaagagagaaattctggctcttcagatctattgtcggaatgaaagcagaggttgtgcagagcagttaatgctgggacatctgctggtgcatttaaaaaatgattgccattttgaagaacttccatgtgtgcgtcctgactgcaaagaaaaggtcttgaggaaagacctgcgagaccacgtggagaaggcgtgtaaataccgggaagccacatgcagccactgcaagagtcaggttccgatgatcgcgctgcagaaacacgaagacaccgactgtccctgcgtggtggtgtcctgccctcacaagtgcagcgtccagactctcctgaggagcgaggggacaaaccagcagatcaaggcccacgaggccagctccgccgtgcagcacgtcaacctgctgaaggagtggagcaactcgctcgaaaagaaggtttccttgttgcagaatgaaagtgtagaaaaaaacaagagcatacaaagtttgcacaatcagatatgtagctttgaaattgaaattgagagacaaaaggaaatgcttcgaaataatgaatccaaaatccttcatttacagcgagtgatagacagccaagcagagaaactgaaggagcttgacaaggagatccggcccttccggcagaactgggaggaagcagacagcatgaagagcagcgtggagtccctccagaaccgcgtgaccgagctggagagcgtggacaagagcgcggggcaagtggctcggaacacaggcctgctggagtcccagctgagccggcatgaccagatgctgagtgtgcacgacatccgcctagccgacatggacctgcgcttccaggtcctggagaccgccagctacaatggagtgctcatctggaagattcgcgactacaagcggcggaagcaggaggccgtcatggggaagaccctgtccctttacagccagcctttctacactggttactttggctataagatgtgtgccagggtctacctgaacggggacgggatggggaaggggacgcacttgtcgctgttttttgtcatcatgcgtggagaatatgatgccctgcttccttggccgtttaagcagaaagtgacactcatgctgatggatcaggggtcctctcgacgtcatttgggagatgcattcaagcccgaccccaacagcagcagcttcaagaagcccactggagagatgaatatcgcctctggctgcccagtctttgtggcccaaactgttctagaaaatgggacatatattaaagatgatacaatttttattaaagtcatagtggatacttcggatctgcccgatccctgataagtagctggggaggtggatttagcagaaggcaactcctctgggggatttgaaccggtctgtcttcactgaggtcctcgcgctcagaaaaggaccttgtgagacggaggaagcggcagaaggcggacgcgtgccggcgggaggagccacgcgtgagcacacctgacacgttttataatagactagccacacttcactctgaagaattatttatccttcaacaagataaatattgctgtcagagaaggttttcattttcatttttaaagatctagttaattaaggtggaaaacatatatgctaaacaaaagaaacatgatttttcttccttaaacttgaacaccaaaaaaacacacacacacacacacgtggggatagctggacatgtcagcatgttaagtaaaaggagaatttatgaaatagtaatgcaattctgatatcttctttctaaaattcaagagtgcaattttgtttcaaatacagtatattgtctatttttaaggcctcatctggtctctgttttaataatttgtttgtcagaagaccctgaagtatatacctaggtcttttttttgaaagtctctaaattcagaatcattttttaatttaaagttctacaaataattgttactgcaaacattttattttaaaacgttgatagactgatatttcttggaagaaaatataaaatatcaaacactggttatcacttgtgataggaaagagaatattcaacctgttgttatttctcgttagaaatgtaaaccttcaaatatctgtcgtagttaatgacacgacttcacaattctgaacggagcctcgctcatggatgctgtgcatcattttcagatttataattgttttcaccctaaaatagggcatccgttgaactttggagttctaaacaaaatcctgtaggtgtttggattctgccccatgtgttcggacgagctctctgttgctgacagcaccggccttcggtctccatgtcaggggtgggcgggtgactgctgagggaggcccgcaggtgtgtttctccatcccgtcatcttgctgcatgccgtcaacggtctccgaaagcaacgttgtgcgtagagctggtggcatacggcccacgtgccttagatgggacatgctgcttctccaccctgggtttgcattgagcatcattctagaaagtgctagtttaaccagacttttctctccaccactagatctttgtctctacaagggccctcagacacctctgcacctgctgaggggaagccaggctccaccgtcggcttctggagcctccgctgcttaattaccacagattccaaatctctaggccccacgagtgagccgcctggtccaagtacggcctggtcccaccctgagggaggcaggtgtggaacagaagccgagcctctccgtgtccccaccggggccgtgggcacccccacagcccgaagcagaaccctctgagcattccagagaccgctgctcgggggcctgcccaggctgaccaacgggcgctcctgaccaccaccctggcgggaagggtggccacggggcccgtcgtcccagcctgtgcctgcccagatggcattttctcaactcactgtttactgtctctcagtgtccaactgtgattagaagcctggagcctgccccctgcaccccttttgctatgcaccacgcttcatggtgctcttaccactgatgggtgctacacgcgacgggtgcttcttaggcaaaaccaatgtgtgcgaactgtcacacctgtgccactcgcccacaagccgcgcccacaattggccagctgggccgtgcacgtcagactgcctgcctcggctctccccgtggccgcgcggggacagcttggtgggtgcccggtggcccacctgtctctggtgctgccatctgtcctgggtgtgccttcgccccagtgcctgctggaagtgccctccgtcgcacccctgtgccctgagctcccgtgaggggcccgccgcgccctttcgcggtcgaagcgttccgttgttcttatctgcctttcctttccccgctctcctgggattactttgggggaatgagtatccttggttctgccctgtgagggagtcgtgtgtccctgctcataaaggaaggacttcctgcagaagctgcggaaaactactgttccctcgaaggtgtcccccacctgaggcctgtcccctacctgccctcaggtagttttcctgaggccaggggttaacaacagggacatccctgcaacttccccttcacaaaatgtataatattagatgaaggatatgcaacatcttggtctagtaagaaccgtttcctcccctctgggttgaagtcctggtgtggcccccagaagcagcagtgcgtgtcactgggacgtctccagtagcccttcccaggcagacgctcctggcgggacgccatggggcccacctgagggtcccacagacgtaacctgagtgacaggagtccttgaggatgggatggcctatgtcacacactttgtccttgaacctgagtgatgggggtccttgaggatgggatggcctgtgtcacgcgctttgtctttgtgtttggttgtatcggggtctctgttctgagtgtgtcttcctctcatgtactcaacacagtgggcagcagcctgggacggcgtcccctctcccggcggcgggcaagccttgcgctgctccaccctcggcctgggcaccctcacttggcgctggccacctgggccagcctggggccatggtctctctgcagctgaggcccagtggccccttgggcagtgatcggccctccccgcatcacagggccctggcagcaagcgggaaatgggggcgcacactgtgtgcttgggggtgctgcttgtttaccacacatgaccagactcccagcaggacagagctgctcagtactttacagaaaccaactgagtcgtttgtgcatgaattaagccggtctgcttccccgtcaccttcgtaacaaaacaacgtcccctctcccctcgcctcgagcagtttcttcaggacaccgtggctcgggctgctccctgctgccaggcacgctggttggctggcctgggcccggctcacgtgaagggcactggctcttgtgaccacactgagccacgtgcaagccgcagccgggcctggaagcctgaccctctggttctagggcttgtcccgcggagcctgcagagctagacgttggggtgtgtccgtgatgatatgggggccaggctgggagtagggcctttctagcagggttgggtggctcagtgagggtgtggaagtgggggacccacggggcctggctttgggactagacatgccagccccagctgggctggagggagcctgagtgagccccgacatacgctgggcctttcagctcgccgtgctctggtgacacacaggcggccaggttgggatttgtgtcaattctaggagccatcaagcatgaatgtggttctgtctcctgagcgcaagcctcgccggacccctgggcgaaggcctggacttgcagatgtgtgttccctgtgcgggtggacagagggggcccttatgacccacattgcagccccattccaccaccccttcctccccagagcagtctctgccgagggacagcacctgtgtcccttcgatgccacaacagccagttgaacaggggagccctttgctcaggcagcttctcctgcctctccctcctttctccttccctgccccatccccgtgcccttcttggcctgtggcgctggggagccatggtgtggcatactggggctcctgctccttgggccacttcctcagcccgggccccacaggcccaccacctgccagggctcccactgcactggctgtggcaggaggcttccccatgaccccgtgtggcccagctcggtgaggatgcagttctaggcacagcccctgggacagccagctgcctcccagaccacgtcagcctgctccagggtcctcagtcaccctgggccaggggccacgtgtcccatggatgtcgaccatgccaacgtcacattccagcaccccttttgcttgatggcgtctggtggtagtcagcatggtggacccacatcctacagccagaggtgatgttggacaaaggaaggggagtctggatgggtccttaaacgaccattctgtccgcagcggggtcattccttgtcagcccaagggagggccggggagtacactgatcccaacagctgggctgacacctcctttctcccctgcacggggaggattggcctgaggaccgtcaccctgtgcacagccccagtagggtggcagtgccactgtctccttgggccgttgcaggattgggcgggtgcagactccccttgcgggccccttgctcaatccccggccctcccagactcctccctctactgggggtaatttgtgtgtcagaagggctctggcagagctgtaaaatactgttttttaaaaattttagtccagatctttacttattagactgcagaaggagagctagggagagtgggggaagcccccttgcttttgtatctgtgaggtgaatgagggtctgtcacccaaatctacttctcagcccatgaccatagttctgttttccgtttgcaaatctcagtagctctgttttctccaaagtagaatgtgcgcaccggggtcctagccaggcgaggtcagtgtcggcaggctacctggtcattattgctgcctcgtccaggctgatgctgatggtcacaggcacggtggcatcagggagccgggccagcaggcggcgtgaggcggggccagcagctcactgcaagggcattttccacctgatcctggtgtgccccacatgcggtggcagggcagacgtgtgaagcctcggccgtctcggggctggcaggtgtgcgggtgaggaggccccggtggccaagcagagcctgcgtttcatttctcctgctgcactgtgtctagtctgtcttgtgaactctcaccgtgaaaagaggctagaagtccaggatcgctgtaccgctcctgtaattaggtgatgactggatttgacaacttagtcccctcagacaagtaagataccctccaacagcaaattcaatgacttaattggaaaacacacaagctggcatgatgtccggtgatttctgtaagaaatgcctgtaggagaaggtctgtgaagtgtggagggcagtgtcgacgctgcacagcatctgcagattcgcagcctcttctctgccggtgcctctgttcggttctgttacccaaaaacaaagaccaaagaaggccaatctctcatttgaccctgtctttttaatctgcctgttttaaaagttgcgtctgtagtagccgcttgctgtgaagacacatcttgacagtccaagtgattttgtgaccagtgatttgggtcctgttttccgctcttctaagaaaaaacaaaaagaccgtgagttattgcccagcaataatcatgttgttactgtgagttagcaacatgcctgacttcctgatagcattactgttttctagttttgtttattgtatattatgtgtggttttatttggtatttatttgtgttttgaggtcttgcaatgtttttgtgtttctgatgctaataactaaagtttgtaagactgtagaatgcaaaactcggagatgctaaactgtcttattagaggaaaataaatctgattatggagtctc

SEQ ID NO: 191511 - DNA, 2239 bp, Homo sapiens
  Payload ID: 17830
  Gene Name: TNF receptor-associated factor 3
  ENST ID: ENST00000351691
  CDS Start-End: 137-1768
agaagtgatgccacttggttaaggtcccagagcaggtcagaatcagacctaggatcagaaacctggctcctggctcctggctccctactcttctaaggatcgctgtcctgacagaagagaactcctctttcctaaaatggagtcgagtaaaaagatggactctcctggcgcgctgcagactaacccgccgctaaagctgcacactgaccgcagtgctgggacgccagtttttgtccctgaacaaggaggttacaaggaaaagtttgtgaagaccgtggaggacaagtacaagtgtgagaagtgccacctggtgctgtgcagcccgaagcagaccgagtgtgggcaccgcttctgcgagagctgcatggcggccctgctgagctcttcaagtccaaaatgtacagcgtgtcaagagagcatcgttaaagataaggtgtttaaggataattgctgcaagagagaaattctggctcttcagatctattgtcggaatgaaagcagaggttgtgcagagcagttaatgctgggacatctgctggtgcatttaaaaaatgattgccattttgaagaacttccatgtgtgcgtcctgactgcaaagaaaaggtcttgaggaaagacctgcgagaccacgtggagaaggcgtgtaaataccgggaagccacatgcagccactgcaagagtcaggttccgatgatcgcgctgcagaaacacgaagacaccgactgtccctgcgtggtggtgtcctgccctcacaagtgcagcgtccagactctcctgaggagcgaggggacaaaccagcagatcaaggcccacgaggccagctccgccgtgcagcacgtcaacctgctgaaggagtggagcaactcgctcgaaaagaaggtttccttgttgcagaatgaaagtgtagaaaaaaacaagagcatacaaagtttgcacaatcagatatgtagctttgaaattgaaattgagagacaaaaggaaatgcttcgaaataatgaatccaaaatccttcatttacagcgagtgatagacagccaagcagagaaactgaaggagcttgacaaggagatccggcccttccggcagaactgggaggaagcagacagcatgaagagcagcgtggagtccctccagaaccgcgtgaccgagctggagagcgtggacaagagcgcggggcaagtggctcggaacacaggcctgctggagtcccagctgagccggcatgaccagatgctgagtgtgcacgacatccgcctagccgacatggacctgcgcttccaggtcctggagaccgccagctacaatggagtgctcatctggaagattcgcgactacaagcggcggaagcaggaggccgtcatggggaagaccctgtccctttacagccagcctttctacactggttactttggctataagatgtgtgccagggtctacctgaacggggacgggatggggaaggggacgcacttgtcgctgttttttgtcatcatgcgtggagaatatgatgccctgcttccttggccgtttaagcagaaagtgacactcatgctgatggatcaggggtcctctcgacgtcatttgggagatgcattcaagcccgaccccaacagcagcagcttcaagaagcccactggagagatgaatatcgcctctggctgcccagtctttgtggcccaaactgttctagaaaatgggacatatattaaagatgatacaatttttattaaagtcatagtggatacttcggatctgcccgatccctgataagtagctggggaggtggatttagcagaaggcaactcctctgggggatttgaaccggtctgtcttcactgaggtcctcgcgctcagaaaaggaccttgtgagacggaggaagcggcagaaggcggacgcgtgccggcgggaggagccacgcgtgagcacacctgacacgttttataatagactagccacacttcactctgaagaattatttatccttcaacaagataaatattgctgtcagagaaggttttcattttcatttttaaagatctagttaattaaggtggaaaacatatatgctaaacaaaagaaacatgatttttcttccttaaacttgaacaccaaaaaaacacacacacacacacacgtggggatagctggacatgtcagcatgttaagtaaaaggagaatttatgaaatagtaatgcaattctgatatcttctttctaaaattcaagagtgcaattttg

SEQ ID NO: 191512 - DNA, 2459 bp, Homo sapiens
  Payload ID: 17830
  Gene Name: TNF receptor-associated factor 3
  Uniprot ID: Q13114
  ENST ID: ENST00000392745
  CDS Start-End: 276-1982
cggccgccggctcttccccgccccccgccatggggcagcccggggagcagaacgctgcggaccgcggcggaggacgcgcccggcgcccctgagccggccgagcggcgacggaccgcgagatgaggaaaatgaggcccaaagaagtgatgccacttggttaaggtcccagagcaggtcagaatcagacctaggatcagaaacctggctcctggctcctggctccctactcttctaaggatcgctgtcctgacagaagagaactcctctttcctaaaatggagtcgagtaaaaagatggactctcctggcgcgctgcagactaacccgccgctaaagctgcacactgaccgcagtgctgggacgccagtttttgtccctgaacaaggaggttacaaggaaaagtttgtgaagaccgtggaggacaagtacaagtgtgagaagtgccacctggtgctgtgcagcccgaagcagaccgagtgtgggcaccgcttctgcgagagctgcatggcggccctgctgagctcttcaagtccaaaatgtacagcgtgtcaagagagcatcgttaaagataaggtgtttaaggataattgctgcaagagagaaattctggctcttcagatctattgtcggaatgaaagcagaggttgtgcagagcagttaatgctgggacatctgctggtgcatttaaaaaatgattgccattttgaagaacttccatgtgtgcgtcctgactgcaaagaaaaggtcttgaggaaagacctgcgagaccacgtggagaaggcgtgtaaataccgggaagccacatgcagccactgcaagagtcaggttccgatgatcgcgctgcagaaacacgaagacaccgactgtccctgcgtggtggtgtcctgccctcacaagtgcagcgtccagactctcctgaggagcgagttgagtgcacacttgtcagagtgtgtcaatgcccccagcacctgtagttttaagcgctatggctgcgtttttcaggggacaaaccagcagatcaaggcccacgaggccagctccgccgtgcagcacgtcaacctgctgaaggagtggagcaactcgctcgaaaagaaggtttccttgttgcagaatgaaagtgtagaaaaaaacaagagcatacaaagtttgcacaatcagatatgtagctttgaaattgaaattgagagacaaaaggaaatgcttcgaaataatgaatccaaaatccttcatttacagcgagtgatagacagccaagcagagaaactgaaggagcttgacaaggagatccggcccttccggcagaactgggaggaagcagacagcatgaagagcagcgtggagtccctccagaaccgcgtgaccgagctggagagcgtggacaagagcgcggggcaagtggctcggaacacaggcctgctggagtcccagctgagccggcatgaccagatgctgagtgtgcacgacatccgcctagccgacatggacctgcgcttccaggtcctggagaccgccagctacaatggagtgctcatctggaagattcgcgactacaagcggcggaagcaggaggccgtcatggggaagaccctgtccctttacagccagcctttctacactggttactttggctataagatgtgtgccagggtctacctgaacggggacgggatggggaaggggacgcacttgtcgctgttttttgtcatcatgcgtggagaatatgatgccctgcttccttggccgtttaagcagaaagtgacactcatgctgatggatcaggggtcctctcgacgtcatttgggagatgcattcaagcccgaccccaacagcagcagcttcaagaagcccactggagagatgaatatcgcctctggctgcccagtctttgtggcccaaactgttctagaaaatgggacatatattaaagatgatacaatttttattaaagtcatagtggatacttcggatctgcccgatccctgataagtagctggggaggtggatttagcagaaggcaactcctctgggggatttgaaccggtctgtcttcactgaggtcctcgcgctcagaaaaggaccttgtgagacggaggaagcggcagaaggcggacgcgtgccggcgggaggagccacgcgtgagcacacctgacacgttttataatagactagccacacttcactctgaagaattatttatccttcaacaagataaatattgctgtcagagaaggttttcattttcatttttaaagatctagttaattaaggtggaaaacatatatgctaaacaaaagaaacatgatttttcttccttaaacttgaacaccaaaaaaacacacacacacacacacgtggggatagctggacatgtcagcatgttaagtaaaaggagaatttatgaaatagtaatgcaattctgatatcttctttctaaaattcaagagtgcaattttgtttcaa

SEQ ID NO: 191513 - DNA, 1786 bp, Homo sapiens
  Payload ID: 17830
  Gene Name: TNF receptor-associated factor 3
  Uniprot ID: Q13114
  ENST ID: ENST00000539721
  CDS Start-End: 92-1549
agcagaacgctgcggaccgcggcggaggacgcgcccggcgcccctgagccggccgagcggcgacggaccgcgagaactcctctttcctaaaatggagtcgagtaaaaagatggactctcctggcgcgctgcagactaacccgccgctaaagctgcacactgaccgcagtgctgggacgccagtttttgtccctgaacaaggaggttacaaggaaaagtttgtgaagaccgtggaggacaagtacaagtgtgagaagtgccacctggtgctgtgcagcccgaagcagaccgagtgtgggcaccgcttctgcgagagctgcatggcggccctgctgagctcttcaagtccaaaatgtacagcgtgtcaagagagcatcgttaaagataaggtgtttaaggataattgctgcaagagagaaattctggctcttcagatctattgtcggaatgaaagcagaggttgtgcagagcagttaatgctgggacatctgctggtgcatttaaaaaatgattgccattttgaagaacttccatgtgtgcgtcctgactgcaaagaaaaggtcttgaggaaagacctgcgagaccacgtggagaaggcgtgtaaataccgggaagccacatgcagccactgcaagagtcaggttccgatgatcgcgctgcaggtttccttgttgcagaatgaaagtgtagaaaaaaacaagagcatacaaagtttgcacaatcagatatgtagctttgaaattgaaattgagagacaaaaggaaatgcttcgaaataatgaatccaaaatccttcatttacagcgagtgatagacagccaagcagagaaactgaaggagcttgacaaggagatccggcccttccggcagaactgggaggaagcagacagcatgaagagcagcgtggagtccctccagaaccgcgtgaccgagctggagagcgtggacaagagcgcggggcaagtggctcggaacacaggcctgctggagtcccagctgagccggcatgaccagatgctgagtgtgcacgacatccgcctagccgacatggacctgcgcttccaggtcctggagaccgccagctacaatggagtgctcatctggaagattcgcgactacaagcggcggaagcaggaggccgtcatggggaagaccctgtccctttacagccagcctttctacactggttactttggctataagatgtgtgccagggtctacctgaacggggacgggatggggaaggggacgcacttgtcgctgttttttgtcatcatgcgtggagaatatgatgccctgcttccttggccgtttaagcagaaagtgacactcatgctgatggatcaggggtcctctcgacgtcatttgggagatgcattcaagcccgaccccaacagcagcagcttcaagaagcccactggagagatgaatatcgcctctggctgcccagtctttgtggcccaaactgttctagaaaatgggacatatattaaagatgatacaatttttattaaagtcatagtggatacttcggatctgcccgatccctgataagtagctggggaggtggatttagcagaaggcaactcctctgggggatttgaaccggtctgtcttcactgaggtcctcgcgctcagaaaaggaccttgtgagacggaggaagcggcagaaggcggacgcgtgccggcgggaggagccacgcgtgagcacacctgacacgttttataatagactagccacacttcactctgaagaattatttatccttcaacaagataaatattgct

SEQ ID NO: 191514 - DNA, 738 bp, Homo sapiens
  Payload ID: 17830
  Gene Name: TNF receptor-associated factor 3
  ENST ID: ENST00000558700
  CDS Start-End: 1-624
ccaaaatgtacagcgtgtcaagagagcatcgttaaagataaggtgtttaaggataattgctgcaagagagaaattctggctcttcagatctattgtcggaatgaaagcagaggttgtgcagagcagttaatgctgggacatctgctggtgcatttaaaaaatgattgccattttgaagaacttccatgtgtgcgtcctgactgcaaagaaaaggtcttgaggaaagacctgcgagaccacgtggagaaggcgtgtaaataccgggaagccacatgcagccactgcaagagtcaggttccgatgatcgcgctgcagaaacacgaagacaccgactgtccctgcgtggtggtgtcctgccctcacaagtgcagcgtccagactctcctgaggagcgagttgagtgcacacttgtcagagtgtgtcaatgcccccagcacctgtagttttaagcgctatggctgcgtttttcaggggacaaaccagcagatcaaggcccacgaggccagctccgccgtgcagcacgtcaacctgctgaaggagtggagcaactcgctcgaaaagaagggatatgagaataaagagtctgagaattctgtcccgtctttgacagatggaaatgaatgaattgttactttcagagggacacaactaccacgcgatgctgcatatggcccgctccacattcgtgcaggtttccttgttgcagaatgaaagtgtagaaaaaaacaagagcataca

SEQ ID NO: 191515 - DNA, 870 bp, Homo sapiens
  Payload ID: 17830
  Gene Name: TNF receptor-associated factor 3
  ENST ID: ENST00000559734
  CDS Start-End: 1-870
agcagaggttgtgcagagcagttaatgctgggacatctgctggtgcatttaaaaaatgattgccattttgaagaacttccatgtgtgcgtcctgactgcaaagaaaaggtcttgaggaaagacctgcgagaccacgtggagaaggcgtgtaaataccgggaagccacatgcagccactgcaagagtcaggttccgatgatcgcgctgcaggggacaaaccagcagatcaaggcccacgaggccagctccgccgtgcagcacgtcaacctgctgaaggagtggagcaactcgctcgaaaagaaggtttccttgttgcagaatgaaagtgtagaaaaaaacaagagcatacaaagtttgcacaatcagatatgtagctttgaaattgaaattgagagacaaaaggaaatgcttcgaaataatgaatccaaaatccttcatttacagcgagtgatagacagccaagcagagaaactgaaggagcttgacaaggagatccggcccttccggcagaactgggaggaagcagacagcatgaagagcagcgtggagtccctccagaaccgcgtgaccgagctggagagcgtggacaagagcgcggggcaagtggctcggaacacaggcctgctggagtcccagctgagccggcatgaccagatgctgagtgtgcacgacatccgcctagccgacatggacctgcgcttccaggtcctggagaccgccagctacaatggagtgctcatctggaagattcgcgactacaagcggcggaagcaggaggccgtcatggggaagaccctgtccctttacagccagcctttctacactggttactttggctataagatgtgtgccagggtctacctgaacggg

SEQ ID NO: 191516 - DNA, 701 bp, Homo sapiens
  Payload ID: 17830
  Gene Name: TNF receptor-associated factor 3
  ENST ID: ENST00000560463
  CDS Start-End: 420-701
ccgcggcggaggacgcgcccggcgcccctgagccggccgagcggcgacggaccgcgagatggcgtctcgctctgtcacccaggctggagtgcagtggcgcgatccctgcttactgcagcttctgcctcccaggttcgagagattctcctgcctcagcctcccaagtagctgggactacagcagctgacatctgtgaagcctcagtgatcctataaattgaggaacctgagagaatcaagagaaagacaacaattcttgctgatatgaggaaaatgaggcccaaagaagtgatgccacttggttaaggtcccagagcaggtcagaatcagacctaggatcagaaacctggctcctggctcctggctccctactcttctaaggatcgctgtcctgacagaagagaactcctctttcctaaaatggagtcgagtaaaaagatggactctcctggcgcgctgcagactaacccgccgctaaagctgcacactgaccgcagtgctgggacgccagtttttgtccctgaacaaggaggttacaaggaaaagtttgtgaagaccgtggaggacaagtacaagtgtgagaagtgccacctggtgctgtgcagcccgaagcagaccgagtgtgggcaccgcttctgcgagagctgcatggcggccctgctgagctcttcaagtccaaaatgtacagcgtgtcaagagagc

SEQ ID NO: 191517 - DNA, 7640 bp, Homo sapiens
  Payload ID: 17830
  Gene Name: TNF receptor-associated factor 3
  Uniprot ID: Q13114
  ENST ID: ENST00000560371
  CDS Start-End: 218-1924
cgagggagcgcggcgcggccgccgcgtgcgcgagccggggttgcagcccagccgggactttccagccggcggcagccgcggcggccgccggctcttccccgccccccgccatggggcagcccggggagcagaacgctgcggaccgcggcggaggacgcgcccggcgcccctgagccggccgagcggcgacggaccgcgagaactcctctttcctaaaatggagtcgagtaaaaagatggactctcctggcgcgctgcagactaacccgccgctaaagctgcacactgaccgcagtgctgggacgccagtttttgtccctgaacaaggaggttacaaggaaaagtttgtgaagaccgtggaggacaagtacaagtgtgagaagtgccacctggtgctgtgcagcccgaagcagaccgagtgtgggcaccgcttctgcgagagctgcatggcggccctgctgagctcttcaagtccaaaatgtacagcgtgtcaagagagcatcgttaaagataaggtgtttaaggataattgctgcaagagagaaattctggctcttcagatctattgtcggaatgaaagcagaggttgtgcagagcagttaatgctgggacatctgctggtgcatttaaaaaatgattgccattttgaagaacttccatgtgtgcgtcctgactgcaaagaaaaggtcttgaggaaagacctgcgagaccacgtggagaaggcgtgtaaataccgggaagccacatgcagccactgcaagagtcaggttccgatgatcgcgctgcagaaacacgaagacaccgactgtccctgcgtggtggtgtcctgccctcacaagtgcagcgtccagactctcctgaggagcgagttgagtgcacacttgtcagagtgtgtcaatgcccccagcacctgtagttttaagcgctatggctgcgtttttcaggggacaaaccagcagatcaaggcccacgaggccagctccgccgtgcagcacgtcaacctgctgaaggagtggagcaactcgctcgaaaagaaggtttccttgttgcagaatgaaagtgtagaaaaaaacaagagcatacaaagtttgcacaatcagatatgtagctttgaaattgaaattgagagacaaaaggaaatgcttcgaaataatgaatccaaaatccttcatttacagcgagtgatagacagccaagcagagaaactgaaggagcttgacaaggagatccggcccttccggcagaactgggaggaagcagacagcatgaagagcagcgtggagtccctccagaaccgcgtgaccgagctggagagcgtggacaagagcgcggggcaagtggctcggaacacaggcctgctggagtcccagctgagccggcatgaccagatgctgagtgtgcacgacatccgcctagccgacatggacctgcgcttccaggtcctggagaccgccagctacaatggagtgctcatctggaagattcgcgactacaagcggcggaagcaggaggccgtcatggggaagaccctgtccctttacagccagcctttctacactggttactttggctataagatgtgtgccagggtctacctgaacggggacgggatggggaaggggacgcacttgtcgctgttttttgtcatcatgcgtggagaatatgatgccctgcttccttggccgtttaagcagaaagtgacactcatgctgatggatcaggggtcctctcgacgtcatttgggagatgcattcaagcccgaccccaacagcagcagcttcaagaagcccactggagagatgaatatcgcctctggctgcccagtctttgtggcccaaactgttctagaaaatgggacatatattaaagatgatacaatttttattaaagtcatagtggatacttcggatctgcccgatccctgataagtagctggggaggtggatttagcagaaggcaactcctctgggggatttgaaccggtctgtcttcactgaggtcctcgcgctcagaaaaggaccttgtgagacggaggaagcggcagaaggcggacgcgtgccggcgggaggagccacgcgtgagcacacctgacacgttttataatagactagccacacttcactctgaagaattatttatccttcaacaagataaatattgctgtcagagaaggttttcattttcatttttaaagatctagttaattaaggtggaaaacatatatgctaaacaaaagaaacatgatttttcttccttaaacttgaacaccaaaaaaacacacacacacacacacgtggggatagctggacatgtcagcatgttaagtaaaaggagaatttatgaaatagtaatgcaattctgatatcttctttctaaaattcaagagtgcaattttgtttcaaatacagtatattgtctatttttaaggcctcatctggtctctgttttaataatttgtttgtcagaagaccctgaagtatatacctaggtcttttttttgaaagtctctaaattcagaatcattttttaatttaaagttctacaaataattgttactgcaaacattttattttaaaacgttgatagactgatatttcttggaagaaaatataaaatatcaaacactggttatcacttgtgataggaaagagaatattcaacctgttgttatttctcgttagaaatgtaaaccttcaaatatctgtcgtagttaatgacacgacttcacaattctgaacggagcctcgctcatggatgctgtgcatcattttcagatttataattgttttcaccctaaaatagggcatccgttgaactttggagttctaaacaaaatcctgtaggtgtttggattctgccccatgtgttcggacgagctctctgttgctgacagcaccggccttcggtctccatgtcaggggtgggcgggtgactgctgagggaggcccgcaggtgtgtttctccatcccgtcatcttgctgcatgccgtcaacggtctccgaaagcaacgttgtgcgtagagctggtggcatacggcccacgtgccttagatgggacatgctgcttctccaccctgggtttgcattgagcatcattctagaaagtgctagtttaaccagacttttctctccaccactagatctttgtctctacaagggccctcagacacctctgcacctgctgaggggaagccaggctccaccgtcggcttctggagcctccgctgcttaattaccacagattccaaatctctaggccccacgagtgagccgcctggtccaagtacggcctggtcccaccctgagggaggcaggtgtggaacagaagccgagcctctccgtgtccccaccggggccgtgggcacccccacagcccgaagcagaaccctctgagcattccagagaccgctgctcgggggcctgcccaggctgaccaacgggcgctcctgaccaccaccctggcgggaagggtggccacggggcccgtcgtcccagcctgtgcctgcccagatggcattttctcaactcactgtttactgtctctcagtgtccaactgtgattagaagcctggagcctgccccctgcaccccttttgctatgcaccacgcttcatggtgctcttaccactgatgggtgctacacgcgacgggtgcttcttaggcaaaaccaatgtgtgcgaactgtcacacctgtgccactcgcccacaagccgcgcccacaattggccagctgggccgtgcacgtcagactgcctgcctcggctctccccgtggccgcgcggggacagcttggtgggtgcccggtggcccacctgtctctggtgctgccatctgtcctgggtgtgccttcgccccagtgcctgctggaagtgccctccgtcgcacccctgtgccctgagctcccgtgaggggcccgccgcgccctttcgcggtcgaagcgttccgttgttcttatctgcctttcctttccccgctctcctgggattactttgggggaatgagtatccttggttctgccctgtgagggagtcgtgtgtccctgctcataaaggaaggacttcctgcagaagctgcggaaaactactgttccctcgaaggtgtcccccacctgaggcctgtcccctacctgccctcaggtagttttcctgaggccaggggttaacaacagggacatccctgcaacttccccttcacaaaatgtataatattagatgaaggatatgcaacatcttggtctagtaagaaccgtttcctcccctctgggttgaagtcctggtgtggcccccagaagcagcagtgcgtgtcactgggacgtctccagtagcccttcccaggcagacgctcctggcgggacgccatggggcccacctgagggtcccacagacgtaacctgagtgacaggagtccttgaggatgggatggcctatgtcacacactttgtccttgaacctgagtgatgggggtccttgaggatgggatggcctgtgtcacgcgctttgtctttgtgtttggttgtatcggggtctctgttctgagtgtgtcttcctctcatgtactcaacacagtgggcagcagcctgggacggcgtcccctctcccggcggcgggcaagccttgcgctgctccaccctcggcctgggcaccctcacttggcgctggccacctgggccagcctggggccatggtctctctgcagctgaggcccagtggccccttgggcagtgatcggccctccccgcatcacagggccctggcagcaagcgggaaatgggggcgcacactgtgtgcttgggggtgctgcttgtttaccacacatgaccagactcccagcaggacagagctgctcagtactttacagaaaccaactgagtcgtttgtgcatgaattaagccggtctgcttccccgtcaccttcgtaacaaaacaacgtcccctctcccctcgcctcgagcagtttcttcaggacaccgtggctcgggctgctccctgctgccaggcacgctggttggctggcctgggcccggctcacgtgaagggcactggctcttgtgaccacactgagccacgtgcaagccgcagccgggcctggaagcctgaccctctggttctagggcttgtcccgcggagcctgcagagctagacgttggggtgtgtccgtgatgatatgggggccaggctgggagtagggcctttctagcagggttgggtggctcagtgagggtgtggaagtgggggacccacggggcctggctttgggactagacatgccagccccagctgggctggagggagcctgagtgagccccgacatacgctgggcctttcagctcgccgtgctctggtgacacacaggcggccaggttgggatttgtgtcaattctaggagccatcaagcatgaatgtggttctgtctcctgagcgcaagcctcgccggacccctgggcgaaggcctggacttgcagatgtgtgttccctgtgcgggtggacagagggggcccttatgacccacattgcagccccattccaccaccccttcctccccagagcagtctctgccgagggacagcacctgtgtcccttcgatgccacaacagccagttgaacaggggagccctttgctcaggcagcttctcctgcctctccctcctttctccttccctgccccatccccgtgcccttcttggcctgtggcgctggggagccatggtgtggcatactggggctcctgctccttgggccacttcctcagcccgggccccacaggcccaccacctgccagggctcccactgcactggctgtggcaggaggcttccccatgaccccgtgtggcccagctcggtgaggatgcagttctaggcacagcccctgggacagccagctgcctcccagaccacgtcagcctgctccagggtcctcagtcaccctgggccaggggccacgtgtcccatggatgtcgaccatgccaacgtcacattccagcaccccttttgcttgatggcgtctggtggtagtcagcatggtggacccacatcctacagccagaggtgatgttggacaaaggaaggggagtctggatgggtccttaaacgaccattctgtccgcagcggggtcattccttgtcagcccaagggagggccggggagtacactgatcccaacagctgggctgacacctcctttctcccctgcacggggaggattggcctgaggaccgtcaccctgtgcacagccccagtagggtggcagtgccactgtctccttgggccgttgcaggattgggcgggtgcagactccccttgcgggccccttgctcaatccccggccctcccagactcctccctctactgggggtaatttgtgtgtcagaagggctctggcagagctgtaaaatactgttttttaaaaattttagtccagatctttacttattagactgcagaaggagagctagggagagtgggggaagcccccttgcttttgtatctgtgaggtgaatgagggtctgtcacccaaatctacttctcagcccatgaccatagttctgttttccgtttgcaaatctcagtagctctgttttctccaaagtagaatgtgcgcaccggggtcctagccaggcgaggtcagtgtcggcaggctacctggtcattattgctgcctcgtccaggctgatgctgatggtcacaggcacggtggcatcagggagccgggccagcaggcggcgtgaggcggggccagcagctcactgcaagggcattttccacctgatcctggtgtgccccacatgcggtggcagggcagacgtgtgaagcctcggccgtctcggggctggcaggtgtgcgggtgaggaggccccggtggccaagcagagcctgcgtttcatttctcctgctgcactgtgtctagtctgtcttgtgaactctcaccgtgaaaagaggctagaagtccaggatcgctgtaccgctcctgtaattaggtgatgactggatttgacaacttagtcccctcagacaagtaagataccctccaacagcaaattcaatgacttaattggaaaacacacaagctggcatgatgtccggtgatttctgtaagaaatgcctgtaggagaaggtctgtgaagtgtggagggcagtgtcgacgctgcacagcatctgcagattcgcagcctcttctctgccggtgcctctgttcggttctgttacccaaaaacaaagaccaaagaaggccaatctctcatttgaccctgtctttttaatctgcctgttttaaaagttgcgtctgtagtagccgcttgctgtgaagacacatcttgacagtccaagtgattttgtgaccagtgatttgggtcctgttttccgctcttctaagaaaaaacaaaaagaccgtgagttattgcccagcaataatcatgttgttactgtgagttagcaacatgcctgacttcctgatagcattactgttttctagttttgtttattgtatattatgtgtggttttatttggtatttatttgtgttttgaggtcttgcaatgtttttgtgtttctgatgctaataactaaagtttgtaagactgtagaatgcaaaactcggagatgctaaactgtcttattagaggaaaataaatctgattatggagtctca

SEQ ID NO: 191518 - DNA, 4279 bp, Homo sapiens
  Payload ID: 17831
  Gene Name: TNF receptor-associated factor 3 interacting protein 1
  Uniprot ID: Q8TDR0
  ENST ID: ENST00000373327
  CDS Start-End: 223-2298
gtccgttgctaaggccgcgcagccctagtgaccgaacgccctgcggcggccgcgcaggcgctgtggtgggctccggtgcactgtgggatggaaaccggagcggcgcgtcctggcaggaccgggcggcggcggcggcggggccggcggcggccagggacccgggcttaggctcggccaggccggctgaggggcgcgggcggccagcgggcggcggacgccgtcatgaacgcggcggtggtgaggcggacgcaggaggcgctggggaaagtgattcggaggccgccgctgaccgagaagctgctgagcaagcccccgttccgctacctgcacgacatcatcacggaggtgattagaatgactggtttcatgaagggcctctacacagacgccgagatgaagtctgataatgtgaaggataaagatgcaaaaattagcttcctacaaaaggccatagacgtggttgtaatggtgtcgggagagccactgttggccaaaccagcccgaatcgtggcggggcatgagcctgaaagaacaaacgagctgctccagataattggaaaatgctgtctcaacaagctctctagtgacgatgcggtgcggagggttttagctggagagaagggagaagtgaaaggccgggcctcactgacctcaagatctcaggaattggataataagaatgtgcgagaagaagagtccagagttcacaaaaatacagaggatagaggagacgctgaaataaaagagagaagtacaagcagagatcgaaaacagaaggaagaattgaaagaagaccgcaagccaagagaaaaggacaaggacaaggagaaggccaaggagaatggcggaaacagacacagagaaggggagagagagagagccaaagcccgggccaggccagacaacgagcgacagaaagacagaggcaacagggagcgggacagagactccgagcgcaagaaggagacagagagaaagagtgagggggggaaagagaaggagagactgagagacagggaccgagagcgcgaccgggacaaagggaaggacagggacagacggagagtgaaaaacggggagcactcctgggacctggacagggagaagaacagagagcatgacaaacctgagaaaaagtcagcaagctcaggggagatgtctaaaaagttatcagatggaacttttaaagactccaaggctgaaacagagactgagatttccactagagcttccaagtcattgacaacaaaaacatcaaaacggcgatccaaaaattcagtggaaggaaggaaggaggataatatttcagctaaaagtttagactccatagtgtctggaataaataatgagccaaatcaggaaacgacaacatcagaaataggaacaaaagaagctaatattaactcaactagtatttcagatgataattcagctagtctgcggtgtgagaatattcagcccaaccccacagagaagcagaaaggtgactccaccagtgatgcagaaggagatgctggacctgctggccaagataagtctgaggtgccagagactccagaaattcctaatgagctttcatccaacatcagaagaattcctcggcctgggagtgcaagaccagcccctccccgggtcaaacggcaagacagcatggaggcgctacaaatggataggtcagggagtggtaaaaccgtttcaaatgtgattacagagtcacacaattctgacaatgaagaggatgatcaatttgtggtggaagctgcccctcagctctctgaaatgtcagaaattgaaatggtaacagcagtggaactagaagaagaggagaagcatggtggacttgtgaaaaaaattttggagacgaagaaagattatgagaaattgcagcagtcacccaaacctggggagaaggagcgatctctctttgagtcggcatggaagaaggagaaggacatcgtttccaaggagatagagaagctccgcacgtccatccagaccctgtgcaagagcgcacttcccctggggaagatcatggactacatccaggaagacgtggatgccatgcagaatgagctgcagatgtggcacagcgagaacaggcagcacgccgaggccctgcagcaggagcagaggatcacagactgtgccgtggagcccttaaaggctgagctcgcggagctggagcagctgatcaaagaccagcaagacaagatctgtgctgtgaaggccaacatcctcaagaatgaagaaaaaatccagaaaatggtatatagtatcaatttgacttcgagaaggtgaacactcaaaagtttcagagatgaaaagtcacctcagtttaaaagcaaaaaggaagatagaaaatcattactcttttaagttccagtttgctaagaaaatgaacagtttacaatgttattatccagctaattttcagagctttaaaactgtaagcatgttaagtgtattaaaaaaaccatgttttcttacctccttccagatggaatactggctagttataaatagcgcttccaaacacctctgtgaaaagtttttttgaaagcctgttctttgtgtttctgctgtaacctgtttagttctgtaccagaactctctagcaggtaagtggtgtgggcataccaagggaacagtagtcctttattttggtttagtggaaagactttcagaggtcagtgccgaatgaaggatgactgtgtactttttgataggcacttgataagtagaatgaggcctgaaaatgaatacattatatttttagttaatttccaatggaaagggctaacctcagcctgtctccatatcaggtacctatcaactggattgttttcatttttgttttttgacctctttgtaattgcatgtacttctctatgtaattttcctcttgatctctactatcgtttgcttgtgtttctagtccttaaagttcataaatttaaaaaggagatttcaggatggcctttatggacgttgtctggacatacatcctcactttcttccgcagtttaccctggttttcctcagacagaggctagcgcagccccccggagtccttgttctccttaagagggtctcgctctgcaaagcattggcgccatggcttttcctttgcatgggtgtgcataccgagagacaggcagcttaggaaaaacaacataaggaagacttaaaaggatgcactgatttacgacgttttttgatgttagccatttttttggaaattgttttttaaagcaaaagttttttaaaaacatggtttatagtttttcacttacatatactattgtaaatacttagcagagtcttaagttactgtataaaacatttcattgtgtttgaagacatacttatgggtcttgaggtctgggtcctaatacttttaaatagtgtatttattatgtaaactgaggagtgccatttaaagtgtgaggattgcctgaaaaggttttgtttctttcttttttttttttttttgagatggagtcttactctgtcgcccaggctggagtgcagtggcgcaatctcggctcactgcaaccaccgcctcccgagttcaagtgattctcctgcctcagcctcctgagtaactgggactacaggcgcacgccaccatgcccagctaatttttgtattttcagtagagatggggtttcaccgtgttgaccaggatggtctccacctcctgacctcgtgatccgcctgcctcggcctcccaaagtgctgggattacaggcatgagccactgcacccggccaggttttgtttctttaaggattagcacaaatggcaccgttgggtttttcttcatacaatttccaaaataaattctgtactcaggttgttatatgattttctgagctgaataagttcaggagcagattattaagatctgccattctgaaacgctggtctttttctccttcctatagtgcaccataaaattctgtttgatcagattatattacatacattttgggggagtggagggacatgagttaagtagcccttcatgtatttataatctcttttctactgaatcaaatgacttagccatgaccctgaatggaccttgttttacttcaagttgagatgtctgccttttatgaatttgtatatgtgaatagagtttgggggttgccaaaaattgcatacattgtatgtaagtaaaattttttatgaagtagtctgtcaaattgtatcataaagtttatttttcttttatacgtaaatcattaaaaataatcacatattttttccataa

SEQ ID NO: 191519 - DNA, 4003 bp, Homo sapiens
  Payload ID: 17831
  Gene Name: TNF receptor-associated factor 3 interacting protein 1
  Uniprot ID: Q8TDR0
  ENST ID: ENST00000391993
  CDS Start-End: 223-2100
gtccgttgctaaggccgcgcagccctagtgaccgaacgccctgcggcggccgcgcaggcgctgtggtgggctccggtgcactgtgggatggaaaccggagcggcgcgtcctggcaggaccgggcggcggcggcggcggggccggcggcggccagggacccgggcttaggctcggccaggccggctgaggggcgcgggcggccagcgggcggcggacgccgtcatgaacgcggcggtggtgaggcggacgcaggaggcgctggggaaagtgattcggaggccgccgctgaccgagaagctgctgagcaagcccccgttccgctacctgcacgacatcatcacggaggtgattagaatgactggtttcatgaagggcctctacacagacgccgagatgaagtctgataatgtgaaggataaagatgcaaaaattagcttcctacaaaaggccatagacgtggttgtaatggtgtcgggagagccactgttggccaaaccagcccgaatcgtggcggggcatgagcctgaaagaacaaacgagctgctccagataattggaaaatgctgtctcaacaagctctctagtgacgatgcggtgcggagggttttagctggagagaagggagaagtgaaaggccgggcctcactgacctcaagatctcaggaattggataataagaatgtgcgagaagaagagtccagagttcacaaaaatacagaggatagaggagacgctgaaataaaagagagaagtacaagcagagatcgaaaacagaaggaagaattgaaagaagaccgcaagccaagagaaaaggacaaggacaaggagaaggccaaggagaatggcggaaacagacacagagaaggggagagagagagagccaaagcccgggccaggccagacaacgagcgacagaaagacagaggcaacagggagcgggacagagactccgagcgcaagaaggagacagagagaaagagtgagggggggaaagagaaggagagactgagagacagggaccgagagcgcgaccgggacaaagggaaggacagggacagacggagagtgaaaaacggggagcactcctgggacctggacagggagaagaacagagagcatgacaaacctgagaaaaagtcagcaagctcaggggagatgtctaaaaagttatcagatggaacttttaaagactccaaggctgaaacagagactgagatttccactagagcttccaagtcattgacaacaaaaacatcaaaacggcgatccaaaaattcagtggaaggtgactccaccagtgatgcagaaggagatgctggacctgctggccaagataagtctgaggtgccagagactccagaaattcctaatgagctttcatccaacatcagaagaattcctcggcctgggagtgcaagaccagcccctccccgggtcaaacggcaagacagcatggaggcgctacaaatggataggtcagggagtggtaaaaccgtttcaaatgtgattacagagtcacacaattctgacaatgaagaggatgatcaatttgtggtggaagctgcccctcagctctctgaaatgtcagaaattgaaatggtaacagcagtggaactagaagaagaggagaagcatggtggacttgtgaaaaaaattttggagacgaagaaagattatgagaaattgcagcagtcacccaaacctggggagaaggagcgatctctctttgagtcggcatggaagaaggagaaggacatcgtttccaaggagatagagaagctccgcacgtccatccagaccctgtgcaagagcgcacttcccctggggaagatcatggactacatccaggaagacgtggatgccatgcagaatgagctgcagatgtggcacagcgagaacaggcagcacgccgaggccctgcagcaggagcagaggatcacagactgtgccgtggagcccttaaaggctgagctcgcggagctggagcagctgatcaaagaccagcaagacaagatctgtgctgtgaaggccaacatcctcaagaatgaagaaaaaatccagaaaatggtatatagtatcaatttgacttcgagaaggtgaacactcaaaagtttcagagatgaaaagtcacctcagtttaaaagcaaaaaggaagatagaaaatcattactcttttaagttccagtttgctaagaaaatgaacagtttacaatgttattatccagctaattttcagagctttaaaactgtaagcatgttaagtgtattaaaaaaaccatgttttcttacctccttccagatggaatactggctagttataaatagcgcttccaaacacctctgtgaaaagtttttttgaaagcctgttctttgtgtttctgctgtaacctgtttagttctgtaccagaactctctagcaggtaagtggtgtgggcataccaagggaacagtagtcctttattttggtttagtggaaagactttcagaggtcagtgccgaatgaaggatgactgtgtactttttgataggcacttgataagtagaatgaggcctgaaaatgaatacattatatttttagttaatttccaatggaaagggctaacctcagcctgtctccatatcaggtacctatcaactggattgttttcatttttgttttttgacctctttgtaattgcatgtacttctctatgtaattttcctcttgatctctactatcgtttgcttgtgtttctagtccttaaagttcataaatttaaaaaggagatttcaggatggcctttatggacgttgtctggacatacatcctcactttcttccgcagtttaccctggttttcctcagacagaggctagcgcagccccccggagtccttgttctccttaagagggtctcgctctgcaaagcattggcgccatggcttttcctttgcatgggtgtgcataccgagagacaggcagcttaggaaaaacaacataaggaagacttaaaaggatgcactgatttacgacgttttttgatgttagccatttttttggaaattgttttttaaagcaaaagttttttaaaaacatggtttatagtttttcacttacatatactattgtaaatacttagcagagtcttaagttactgtataaaacatttcattgtgtttgaagacatacttatgggtcttgaggtctgggtcctaatacttttaaatagtgtatttattatgtaaactgaggagtgccatttaaagtgtgaggattgcctgaaaaggttttgtttctttcttttttttttttttttgagatggagtcttactctgtcgcccaggctggagtgcagtggcgcaatctcggctcactgcaaccaccgcctcccgagttcaagtgattctcctgcctcagcctcctgagtaactgggactacaggcgcacgccaccatgcccagctaatttttgtattttcagtagagatggggtttcaccgtgttgaccaggatggtctccacctcctgacctcgtgatccgcctgcctcggcctcccaaagtgctgggattacaggcatgagccactgcacccggccaggttttgtttctttaaggattagcacaaatggcaccgttgggtttttcttcatacaatttccaaaataaattctgtactcaggttgttatatgattttctgagctgaataagttcaggagcagattattaagatctgccattctgaaacgctggtctttttctccttcctatagtgcaccataaaattctgtttgatcagattatattacatacattttgggggagtggagggacatgagttaagtagcccttcatgtatttataatctcttttctactgaatcaaatgacttagccatgaccctgaatggaccttgttttacttcaagttgagatgtctgccttttatgaatttgtatatgtgaatagagtttgggggttgccaaaaattgcatacattgtatgtaagtaaaattttttatgaagta

SEQ ID NO: 191520 - DNA, 1070 bp, Homo sapiens
  Payload ID: 17831
  Gene Name: TNF receptor-associated factor 3 interacting protein 1
  ENST ID: ENST00000409739
  CDS Start-End: 128-286
cggagcggcgcgtcctggcaggaccgggcggcggcggcggcggggccggcggcggccagggacccgggcttaggctcggccaggccggctgaggggcgcgggcggccagcgggcggcggacgccgtcatgaacgcggcggtggtgaggcggacgcaggaggcgctggggaaagtgattcggaggccgccgctgaccgagaagctgctgagcaagcccccgttccgctacctgcacgacatcatcacggaggtgggcgccggggaccgggcccggccaggtgattagaatgactggtttcatgaagggcctctacacagacgccgagatgaagtctgataatgtgaaggataaagatgcaaaaattagcttcctacaaaaggccatagacgtggttgtaatggtgtcgggagagccactgttggccaaaccagcccgaatcgtggcggggcatgagcctgaaagaacaaacgagctgctccagataattggaaaatgctgtctcaacaagctctctagtgacgatgcggtgcggagggttttagctggagagaagggagaagtgaaaggccgggcctcactgacctcaagatctcaggaattggataataagaatgtgcgagaagaagagtccagagttcacaaaaatacagaggatagaggagacgctgaaataaaagagagaagtacaagcagagatcgaaaacagaaggaagaattgaaagaagaccgcaagccaagagaaaaggacaaggacaaggagaaggccaaggagaatggcggaaacagacacagagaaggggagagagagagagccaaagcccgggccaggccagacaacgagcgacagaaagacagaggcaacagggagcgggacagagactccgagcgcaagaaggagacagagagaaagagtgagggggggaaagagaaggagagactgagagacagggaccgagagcgcgaccgggacaaagggaaggacagggacagacggagagtgaaaaacggggagcactcctgggacctggacagggagaagaacagagagcatgacaaacctgagaaaaag

SEQ ID NO: 191521 - DNA, 2923 bp, Homo sapiens
  Payload ID: 17832
  Gene Name: TNF receptor-associated factor 4
  Uniprot ID: Q9BUZ4
  ENST ID: ENST00000262395
  CDS Start-End: 130-1542
cacagccgagccctggccgcgaccgccagtcggcgccgcccggagccgggagcgccgctccagcgaggcgcgggctgtggggccgccgcgtgcctggccccgctcgcccgtgccggccgctcgcccgccatgcctggcttcgactacaagttcctggagaagcccaagcgacggctgctgtgcccactgtgcgggaagcccatgcgcgagcctgtgcaggtttccacctgcggccaccgtttctgcgatacctgcctgcaggagttcctcagtgaaggagtcttcaagtgccctgaggaccagcttcctctggactatgccaagatctacccagacccggagctggaagtacaagtattgggcctgcctatccgctgcatccacagtgaggagggctgccgctggagtgggccactacgtcatctacagggccacctgaatacctgcagcttcaatgtcattccctgccctaatcgctgccccatgaagctgagccgccgtgatctacctgcacacttgcagcatgactgccccaagcggcgcctcaagtgcgagttttgtggctgtgacttcagtggggaggcctatgagagccatgagggtatgtgcccccaggagagtgtctactgtgagaataagtgtggtgcccgcatgatgcggcggctgctggcccagcatgccacctctgagtgccccaagcgcactcagccctgcacctactgcactaaggagttcgtctttgacaccatccagagccaccagtaccagtgcccaaggctgcctgttgcctgccccaaccaatgtggtgtgggcactgtggctcgggaggacctgccaggccatctgaaggacagctgtaacaccgccctggtgctctgcccattcaaagactccggctgcaagcacaggtgccctaagctggcaatggcacggcatgtggaggagagtgtgaagccacatctggccatgatgtgtgccctggtgagccggcaacggcaggagctgcaggagcttcggcgagagctggaggagctatcagtgggcagtgatggcgtgctcatctggaagattggcagctatggacggcggctacaggaggccaaggccaagcccaaccttgagtgcttcagcccagccttctacacacataagtatggttacaagctgcaggtgtctgcattcctcaatggcaatggcagtggtgagggcacacacctctcactgtacattcgtgtgctgcctggtgcctttgacaatctccttgagtggccctttgcccgccgtgtcaccttctccctgctggatcagagcgaccctgggctggctaaaccacagcacgtcactgagaccttccaccccgacccaaactggaagaatttccagaagccaggcacgtggcggggctccctggatgagagttctctgggctttggttatcccaagttcatctcccaccaggacattcgaaagcgaaactatgtgcgggatgatgcagtcttcatccgtgctgctgttgaactgccccggaagatcctcagctgagtgcaggtggggttcgaggggaaaggacgatggggcatgacctcagtcaggcactggctgaacttggagagggggccggacccccgtcagctgcttctgctgcctaggttctgttaccccatcctccctcccccagccaccaccctcaggtgcctccaattggtgcttcagccctggcccctgtggggaacaggtcttggggtcatgaagggctggaaacaagtgaccccagggcctgtctcccttcttgggtagggcagacatgccttggtgccggtcacactctacacggactgaggtgcctgctcaggtgctatgtcccaagagccataagggggtgggaattggggagggagaaagggtagttcaaagagtctgtcttgagatctgattttttccccctttacctagctgtgccccctctggttatttatttccttagtgccaggagggcacagcaggggagccctgatttttaataaatccggaattgtatttattaatttgcttccagcctgacttacctgggttggttaggtccctgggaggctcaaccaaactgaaggcaaagaaaggaccagtcagagaagggccgctgcctgggtctggccccaggatccagcttacctgctggctcgccctctgatggacgccgggaaaactgcatcgggctttgtgtggaagacggtccctgccactgccctctgccgatgaaatgcgggaagtgtatggcctagatgtttcataaggctggagtccctggtcagccccaccagattagtgcttctaccctaggcagggctttcttggtctaatggtaataagcaccgacactgctaagcactttacgtgcattattatttcattgaaaagaactgtcaagtgaaatactttttagcacagtaactggctttgtgggctctagagaagagttaatgaggcagtgcatgttcttggcccagagtaagtgcttagtgaatgctttctaactccgaaccccagccacatccagggactgggtgttgagcaaaaggggccttcaagatgttcaaggcacttggattttctcctgtctctcatcggcttttcttaacgggcctcagtgggtgcatgtgattatccacgtttcacctatgaaacatgaacagaggagactgacttatcagtgattcttccgcgggttcggacagggcctcgattctgttttaaactccagtagtccctagaaattgtagctccctctagttgtggcaataggtgtgggtccttgtgcttgcttttggcaagtttctgagctacacagggcctccattaccgtcactggtgaaatgcggctcacctcccagatttgttgtaaagattaaatgaactggtcagcaca

SEQ ID NO: 191522 - DNA, 683 bp, Homo sapiens
  Payload ID: 17832
  Gene Name: TNF receptor-associated factor 4
  ENST ID: ENST00000262396
  CDS Start-End: 29-616
gctcgcccgtgccggccgctcgcccgccatgcctggcttcgactacaagttcctggagaagcccaagcgacggctgctgtgcccactgtgcgggaagcccatgcgcgagcctgtgcaggtttccacctgcggccaccgtttctgcgatacctgcctgcaggagttcctcagtgaaggagtcttcaagtgccctgaggaccagcttcctctggactatgccaagatctacccagacccggagctggaagtacaagtattgggcctgcctatccgctgcatccacagtgaggagggctgccgctggagtgggccactacgtcatctacagggccacctgaatacctgcagcttcaatgtcattccctgccctaatcgctgccccatgaagctgagccgccgtgatctacctgcacacttgcagcatgactgccccaagcggcgcctcaagtgcgagttttgtggctgtgacttcagtggggaggcctatgagagttctctgggctttggttatcccaagttcatctcccaccaggacattcgaaagcgaaactatgtgcgggatgatgcagtcttcatccgtgctgctgttgaactgccccggaagatcctcagctgagtgcaggtggggttcgaggggaaaggacgatggggcatgacctcagtcaggcactggctgaacttgg

SEQ ID NO: 191523 - DNA, 672 bp, Homo sapiens
  Payload ID: 17832
  Gene Name: TNF receptor-associated factor 4
  ENST ID: ENST00000454852
  CDS Start-End: 1-339
gaaggagtcttcaagtgccctgaggaccagcttcctctggactatgccaagatctacccagacccggagctggaagtacaagtattgggcctgcctatccgctgcatccacagtgaggagggctgccgctggagtgggccactacgtcatctacagggccacctgaatacctgcagcttcaatgtcattccctgccctaatcgctgccccatgaagctgagccgccgtgatctacctgcacacttgcagcatgactgccccaagcggcgcctcaaagccatgagggtatgtgcccccaggagagtgtctactgtgagaataagtgtggtgcccgcatgatgcggcggctgctggcccagcatgccacctctgagtgccccaagcgcactcagccctgcacctactgcactaaggagttcgtctttgacaccatccagagccaccagtaccagtgcccaaggctgcctgttgcctgccccaaccaatgtggtgtgggcactgtggctcgggaggacctgccaggccatctgaaggacagctgtaacaccgccctggtgctctgcccattcaaagactccggctgcaagcacaggtgccctaagctggcaatggcacggcatgtggaggagagtgtgaagccacatctggccatgatgtgtgccctggtgagcc

SEQ ID NO: 191524 - DNA, 631 bp, Homo sapiens
  Payload ID: 17832
  Gene Name: TNF receptor-associated factor 4
  ENST ID: ENST00000422344
  CDS Start-End: 84-631
cgggagcgccgctccagcgaggcgcgggctgtggggccgccgcgtgcctggccccgctcgcccgtgccggccgctcgcccgccatgcctggcttcgactacaagttcctggagaagcccaagcgacggctgctgtgcccactgtgcgggaagcccatgcgcgagcctgtgcaggtttccacctgcggccaccgtttctgcgatacctgcctgcaggagttcctcagtgaaggagtcttcaagtgccctgaggaccagcttcctctggactatgccaagttcccccatccctacccccagatctacccagacccggagctggaagtacaagtattgggcctgcctatccgctgcatccacagtgaggagggctgccgctggagtgggccactacgtcatctacagggccacctgaatacctgcagcttcaatgtcattccctgccctaatcgctgccccatgaagctgagccgccgtgatctacctgcacacttgcagcatgactgccccaagcggcgcctcaagtgcgagttttgtggctgtgacttcagtggggaggcctatgagagccatgagggtatgtgcccccaggagagtgtctactgtgagaataagtgtggtgcccgcatgat

SEQ ID NO: 191525 - DNA, 1456 bp, Homo sapiens
  Payload ID: 17832
  Gene Name: TNF receptor-associated factor 4
  ENST ID: ENST00000444415
  CDS Start-End: 74-1387
gctccagcgaggcgcgggctgtggggccgccgcgtgcctggccccgctcgcccgtgccggccgctcgcccgccatgcctggcttcgactacaagttcctggagaagcccaagcgacggctgctgtgcccactgtgcgggaagcccatgcgcgagcctgtgcaggtttccacctgcggccaccgtttctgcgatacctgcctgcaggagttcctcagtgaaggagtcttcaagtgccctgaggaccagcttcctctggactatgccaagatctacccagacccggagctggaagtacaagtattgggcctgcctatccgctgcatccacagtgaggagggctgccgctggagtgggccactacgtcatctacagggccacctgaatacctgcagcttcaatgtcattccctgccctaatcgctgccccatgaagctgagccgccgtgatctacctgcacacttgcagcatgactgccccaagcggcgcctcaagtgcgagttttgtggctgtgacttcagtggggaggcctatgagagccatgagggtatgtgcccccaggagagtgtctactgtgagaataagtgtggtgcccgcatgatgcggcggctgctggcccagcatgccacctctgagtgccccaagcgcactcagccctgcacctactgcactaaggagttcgtctttgacaccatccagagccaccagtaccagtgcccaaggctgcctgttgcctgccccaaccaatgtggtgtgggcactgtggctcgggaggacctgccaggccatctgaaggacagctgtaacaccgccctggtgctctgcccattcaaagactccggctgcaagcacaggtgccctaagctggcaatggcacggcatgtggaggagagtgtgaagccacatctggccatgatgtgtgccctggtgagccggcaacggcaggagctgcaggagcttcggcgagagctggaggagctatcagtgggcagtgatggcgtgctcatctggaagattggcagctatggacggcggctacaggaggccaaggccaagcccaaccttgagtgcttcagcccagccttctacacacataagtatggttacaagctgcaggtgtctgcattcctcaatggcaatggcagtggtgagggcacacacctctcactgtacattcgtgtgctgcctggtgcctttgacaatctccttgagtggccctttgcccgccgtggcctgtctcccttcttgggtagggcagacatgccttggtgccggtcacactctacacggactgaggtgcctgctcaggtgctatgtcccaagagccataagggggtgggaattggggagggagaaagggtagttcaaagagtctgtcttgagatctgattttttccccctttacctagctgtgccccctctggttatttatttccttagtgccaggagggcacagca

SEQ ID NO: 191526 - DNA, 718 bp, Homo sapiens
  Payload ID: 17832
  Gene Name: TNF receptor-associated factor 4
  ENST ID: ENST00000478021
  CDS Start-End: 96-245
gccgcccggagccgggagcgccgctccagcgaggcgcgggctgtggggccgccgcgtgcctggccccgctcgcccgtgccggccgctcgcccgccatgcctggcttcgactacaagttcctggagaagcccaagcgacggctgctgtgcccactgtgcgggaagcccatgcgcgagcctgtgcaggtttccacctgcggccaccgtttctgcgatacctgcctgcaggagttcctcagatcatgaaacgagattcaaagaaaggctgcgacttgcccagggtcacatagttacttaaaggcttaactaggatttaaacccggactgcttatgatcacacaatggaggaaggactgaatcctcccccgaagaaggacccctctaggcggctcccctctctcccgggggctggagtaaggcgggtggtccataagtcatgaagaagggggtcgcactcgtgttgttactgaactcccgctgccctctcaggacgcagcctgggccggctcctgccctcacatatgctccggcacaagctgcaggactgccccctccccctcggcagtgtacacatttactctcctacagacacagccccattgtctccgccactgctcttccccggccctctgggttccagatgaggccagctgagccccccgacccccccacagctgacccaccctgactgcctcgggaaaggagcgggggagggggcc

SEQ ID NO: 191527 - DNA, 544 bp, Homo sapiens
  Payload ID: 17832
  Gene Name: TNF receptor-associated factor 4
  ENST ID: ENST00000475329
  CDS Start-End: 1-277
tttctgcgatacctgcctgcaggagttcctcagtgaaggagtcttcaagtgccctgaggaccagcttcctctggactatgccaaggtgagtccacactgccaggaagaagcccaagcacagtctgttgcccttggaggccggagctgctggcagccagtgggctcagggccagtgtcaaccaaaagccttgggatggtgcgcctccacaaagatctacccagacccggagctggaagtacaagtattgggcctgcctatccgctgcatccacagtgaggagggctgccgctggagtgggccactacgtcatctacagggccacctgaatacctgcagcttcaatgtcattccctgccctaatcgctgccccatgaagctgagccgccgtgatctacctgcacacttgcagcatgactgccccaagcggcgcctcaagtgcgagttttgtggctgtgacttcagtggggaggcctatgagagccatgagggtatgtgcccccaggagagtgtctactgtgagaataagtgtggtgcccgcatgat

SEQ ID NO: 191528 - DNA, 825 bp, Homo sapiens
  Payload ID: 17832
  Gene Name: TNF receptor-associated factor 4
  ENST ID: ENST00000584944
  CDS Start-End: 682-825
gtggccgcaagctgacctttgccctggttcttggcagaggaccttcctggggactgggcagccttcgcacttaatctcagcccatccctgttccccctcccagtcagctttcagcgcagccaatgaaaactaacctagggggagggggtgactgtgcagcgtgttcctttcccagtccagctgccatcctgggggagggggtgccagctgccacctgttggccaagtcctgactgaggcagctgtctgtgcctcctctaggcccagaccccccttcccaggacaggggctggggtcttctgggatcctggggaagtagagcccctcaggcctctgcttgcccttttgtctcatctaggctggttgggaaccggtctggtgaggaagggaggctgcctcagtggagggggtggggccaggcctccctttcccctaatgagaaacctttttcctgcccctcccccatttcagtgaaggagtcttcaagtgccctgaggaccagcttcctctggactatgccaagatctacccagacccggagctggaagtacaagtattgggcctgcctatccgctgcatccacagtgaggagggctgccgctggagtgggccactacgtcatctacagggccacctgaatacctgcagcttcaatgtcattccctgccctaatcgctgccccatgaagctgagccgccgtgatctacctgcacacttgcagcatgactgccccaagcggcgcctcaagtgcgagttttgtggctgtgacttcagtggggaggcctatgagagccatgagggtatgtgcccccaggagagtgtctac

SEQ ID NO: 191529 - DNA, 789 bp, Homo sapiens
  Payload ID: 17832
  Gene Name: TNF receptor-associated factor 4
  ENST ID: ENST00000586813
  CDS Start-End: 78-239
cgccgctccagcgaggcgcgggctgtggggccgccgcgtgcctggccccgctcgcccgtgccggccgctcgcccgccatgcctggcttcgactacaagttcctggagaagcccaagcgacggctgctgtgcccactgtgcgggaagcccatgcgcgagcctgtgcaggtttccacctgcggccaccgtttctgcgatacctgcctgcaggagttcctcaggagtcttcaagtgccctgaggaccagcttcctctggactatgccaagatctacccagacccggagctggaagtacaagtattgggcctgcctatccgctgcatccacagtgaggagggctgccgctggagtgggccactacgtcatctacagggccacctgaatacctgcagcttcaatgtcattccctgccctaatcgctgccccatgaagctgagccgccgtgatctacctgcacacttgcagcatgactgccccaagcggcgcctcaagtgcgagttttgtggctgtgacttcagtggggaggcctatgagagccatgagggtatgtgcccccaggagagtgtctactgtgagaataagtgtggtgcccgcatgatgcggcggctgctggcccagcatgccacctctgagtgccccaagcgcactcagccctgcacctactgcactaaggagttcgtctttgacaccatccagagccaccagtaccagtgcccaaggctgcctgttgcctgccccaaccaatgtggtgtgggcactgtggctcgggaggacctgccaggccatctg

SEQ ID NO: 191530 - DNA, 585 bp, Homo sapiens
  Payload ID: 17832
  Gene Name: TNF receptor-associated factor 4
  ENST ID: ENST00000473421
  CDS Start-End: 316-585
ttcccaggacaggggctggggtcttctgggatcctggggaagtagagcccctcaggcctctgcttgcccttttgtctcatctaggctggttgggaaccggtctgtgaaggagtcttcaagtgccctgaggaccagcttcctctggactatgccaagatctacccagacccggagctggaagtacaagtattgggcctgcctatccgctgcatccacagtgaggagggctgccgctggagtgggccactacgtcatctacagggccacctgaatacctgcagcttcaatgtcattccctgccctaatcgctgccccatgaagctgagccgccgtgatctacctgcacacttgcagcatgactgccccaagcggcgcctcaagtgcgagttttgtggctgtgacttcagtggggaggcctatgagagccatgagggtatgtgcccccaggagagtgtctactgtgagaataagtgtggtgcccgcatgatgcggcggctgctggcccagcatgccacctctgagtgccccaagcgcactcagccctgcacctactgcactaaggagttcgtctttgacaccatccag

SEQ ID NO: 191531 - DNA, 543 bp, Homo sapiens
  Payload ID: 17832
  Gene Name: TNF receptor-associated factor 4
  ENST ID: ENST00000618771
  CDS Start-End: 109-543
accgccagtcggcgccgcccggagccgggagcgccgctccagcgaggcgcgggctgtggggccgccgcgtgcctggccccgctcgcccgtgccggccgctcgcccgccatgcctggcttcgactacaagttcctggagaagcccaagcgacggctgctgtgcccactgtgcgggaagcccatgcgcgagcctgtgcaggtttccacctgcggccaccgtttctgcgatacctgcctgcaggagttcctcagtgaaggagtcttcaagtggccctttgcccgccgtgtcaccttctccctgctggatcagagcgaccctgggctggctaaaccacagcacgtcactgagaccttccaccccgacccaaactggaagaatttccagaagccaggcacgtggcggggctccctggatgagagttctctgggctttggttatcccaagttcatctcccaccaggacattcgaaagcgaaactatgtgcgggatgatgcagtcttcatccgtgctgctgttgaactgccccggaagatcctcagctga

SEQ ID NO: 191532 - DNA, 3972 bp, Homo sapiens
  Payload ID: 17833
  Gene Name: TNF receptor-associated factor 5
  Uniprot ID: O00463
  ENST ID: ENST00000261464
  CDS Start-End: 55-1728
gcagcagccgcgcctgcagaccggcctcgcggagcccgcgcgccgagccccacaatggcttattcagaagagcataaaggtatgccctgtggtttcatccgccagaattccggcaactccatttccttggactttgagcccagtatagagtaccagtttgtggagcggttggaagagcgctacaaatgtgccttctgccactcggtgcttcacaacccccaccagacaggatgtgggcaccgcttctgccagcactgcatcctgtccctgagagaattaaacacagtgccaatctgccctgtagataaagaggtcatcaaatctcaggaggtttttaaagacaattgttgcaaaagagaagtcctcaacttatatgtatattgcagcaatgctcctggatgtaatgccaaggttattctgggccggtaccaggatcaccttcagcagtgcttatttcaacctgtgcagtgttctaatgagaagtgccgggagccagtcctacggaaagacctgaaagagcatttgagtgcatcctgtcagtttcgaaaggaaaaatgcctttattgcaaaaaggatgtggtagtcatcaatctacagaatcatgaggaaaacttgtgtcctgaatacccagtattttgtcccaacaattgtgcgaagattattctaaaaactgaggtagatgaacacctggctgtatgtcctgaagctgagcaagactgtccttttaagcactatggctgtgctgtaacggataaacggaggaacctgcagcaacatgagcattcagccttacgggagcacatgcgtttggttttagaaaagaatgtccaattagaagaacagatttctgacttacacaagagcctagaacagaaagaaagtaaaatccagcagctagcagaaactataaagaaacttgaaaaggagttcaagcagtttgcacagttgtttggcaaaaatggaagcttcctcccaaacatccaggtttttgccagtcacattgacaagtcagcttggctagaagctcaagtgcatcaattattacaaatggttaaccagcaacaaaataaatttgacctgagacctttgatggaagcagttgatacagtgaaacagaaaattaccctgctagaaaacaatgatcaaagattagccgttttagaagaggaaactaacaaacatgatacccacattaatattcataaagcacagctgagtaaaaatgaagagcgatttaaactgctggagggtacttgctataatggaaagctcatttggaaggtgacagattacaagatgaagaagagagaggcggtggatgggcacacagtgtccatcttcagccagtccttctacaccagccgctgtggctaccggctctgtgctagagcatacctgaatggggatgggtcagggagggggtcacacctgtccctatactttgtggtcatgcgaggagagtttgactcactgttgcagtggccattcaggcagagggtgaccctgatgcttctggaccagagtggcaaaaagaacattatggagaccttcaaacctgaccccaatagcagcagctttaaaagacctgatggggagatgaacattgcatctggctgtccccgctttgtggctcattctgttttggagaatgccaagaacgcctacattaaagatgacactctgttcttgaaagtggccgtggacttaactgacctggaggatctctagtcactgttatggggtgataagaggacttcttggggccagaactgtggaggagagcacatttgattatcatattgacctggatttagactcaaagcacatttgtatttgcctttttccttaacgtttgaagtcagtttaaaacttctgaagtgctgtctttttacattttactctgtcccagtttgaaacttaaaactcttagaatattctcttattatttatatttttatatttcttgaaagatggtaagtttcttgaagtttttggggcgtttctcttttactggtgcttagcgcagtgtctcgggcactctaaatattgagtgttatggaggacacagaggtagcagaatcccagttgaaaatgttttgatattttattgtttggcctattgattctagacctggccttaagtctgcaaaagccatctttataaggtaggctgttccagttaagtagtgggtgatgtagttacaaagataatatgctcagtttggacctttttttcagttaaatgctaaatatatgaaaattactatacctctaagtattttcatgaaattcaccagcagtttgcaagcacagttttgcaaggctgcataagaactggtgaatggggtaagcattttcattcttcctgctgaagtaaagcagaaagtactgcatagtatatgagatatagccagctagctaaagttcagattttgttaggttcaaccctatgaaaaaaactattttcataggtcaaaaatggtaaaaaattagcagtttcataagattcaaccaaataaatatatatatacacacacacatacatatacacctatatatgtgtgtatacaaacagttcgaatgtattttggtgacagtaataaatcaatgtgaggatggatagaatttagtatatgatagagaaaatgtcataaatggataaaaggaatttacaacttgaggagaaaacctttacaatttcctatgggtgtcagaagtactctcagcgaaaactgatggctaaaacagtatctactattctctgataactttttttttgagacagagtttcattgtcacccaggctggagtacagtggcatgatctcagctcactgcaaactctgcctcccgaattcaagtgattctcctgcctcagcctcctgagtagctgggattacaggcgcccgtcaccacacccaggtaatttttgtatttttagtagagacggagttttgccatgttggccaagctgatctcaaactcctgacctcaagtgatctgcccgcctcggcctcccaaagtgctgagattacaggcatgacccaccgcgtcaagcctctgacaactattgaatttgtaagctgctatgcaaatgggcatttatataaacttgtgatgtttcttgtcagaattctgagtactctgtgaagaacagaaatgatcatattcttatgcatctatctgtatgggtctgaaggtgtatatacaaactgagatgagtccttatgactcttgataagcctgagtttaacaacaacaaaaatgccaagttgtcctgagcccttctgcgttgttatgccacttccctactgctcatatgcacgctggctcccctgggcacgcaaggatgagtatgggccatgggcccctgtagagctgcttacctggtgatgaccatgcaccttacaatttctgaacagttaaccctatagaagcatgctttatatgagtgtcttctgggaagaggaaccttcttaatctcttctgtgggattttcaaaatgctaaagactcacactgcagcaatcatcccagatgattaaattcaaagaaataggttcacaacaggaatatactgaagaactagagtgtcactgctggtgaactgtggcacggttgctcaacacatcacctcggacaaattcaggaagcatttctttagcccacaagtccagacccaggtgctctgtatgtttgtttttaatattcatcatatccaagttcactctgtcttcctgagcagtggaagatcatattgctgtaacttcttttaagtagttgatgtggaaaacattttaaagtgaatttgtcaaaatgctggttttgtgttttatccaacttttgtgcatatatataaagtatgtcatggcatggtttgcttaggagttcagagttccttcatcatcgaaatagtgattaagtgatcccagaacaaggaatactagagtaaaaagcacctctttttcacaaaa

SEQ ID NO: 191533 - DNA, 3972 bp, Homo sapiens
  Payload ID: 17833
  Gene Name: TNF receptor-associated factor 5
  Uniprot ID: O00463
  ENST ID: ENST00000336184
  CDS Start-End: 61-1734
agacgcacgtgagggaaatcagatgactggacttgtagatactaacggttctgaagcggaatggcttattcagaagagcataaaggtatgccctgtggtttcatccgccagaattccggcaactccatttccttggactttgagcccagtatagagtaccagtttgtggagcggttggaagagcgctacaaatgtgccttctgccactcggtgcttcacaacccccaccagacaggatgtgggcaccgcttctgccagcactgcatcctgtccctgagagaattaaacacagtgccaatctgccctgtagataaagaggtcatcaaatctcaggaggtttttaaagacaattgttgcaaaagagaagtcctcaacttatatgtatattgcagcaatgctcctggatgtaatgccaaggttattctgggccggtaccaggatcaccttcagcagtgcttatttcaacctgtgcagtgttctaatgagaagtgccgggagccagtcctacggaaagacctgaaagagcatttgagtgcatcctgtcagtttcgaaaggaaaaatgcctttattgcaaaaaggatgtggtagtcatcaatctacagaatcatgaggaaaacttgtgtcctgaatacccagtattttgtcccaacaattgtgcgaagattattctaaaaactgaggtagatgaacacctggctgtatgtcctgaagctgagcaagactgtccttttaagcactatggctgtgctgtaacggataaacggaggaacctgcagcaacatgagcattcagccttacgggagcacatgcgtttggttttagaaaagaatgtccaattagaagaacagatttctgacttacacaagagcctagaacagaaagaaagtaaaatccagcagctagcagaaactataaagaaacttgaaaaggagttcaagcagtttgcacagttgtttggcaaaaatggaagcttcctcccaaacatccaggtttttgccagtcacattgacaagtcagcttggctagaagctcaagtgcatcaattattacaaatggttaaccagcaacaaaataaatttgacctgagacctttgatggaagcagttgatacagtgaaacagaaaattaccctgctagaaaacaatgatcaaagattagccgttttagaagaggaaactaacaaacatgatacccacattaatattcataaagcacagctgagtaaaaatgaagagcgatttaaactgctggagggtacttgctataatggaaagctcatttggaaggtgacagattacaagatgaagaagagagaggcggtggatgggcacacagtgtccatcttcagccagtccttctacaccagccgctgtggctaccggctctgtgctagagcatacctgaatggggatgggtcagggagggggtcacacctgtccctatactttgtggtcatgcgaggagagtttgactcactgttgcagtggccattcaggcagagggtgaccctgatgcttctggaccagagtggcaaaaagaacattatggagaccttcaaacctgaccccaatagcagcagctttaaaagacctgatggggagatgaacattgcatctggctgtccccgctttgtggctcattctgttttggagaatgccaagaacgcctacattaaagatgacactctgttcttgaaagtggccgtggacttaactgacctggaggatctctagtcactgttatggggtgataagaggacttcttggggccagaactgtggaggagagcacatttgattatcatattgacctggatttagactcaaagcacatttgtatttgcctttttccttaacgtttgaagtcagtttaaaacttctgaagtgctgtctttttacattttactctgtcccagtttgaaacttaaaactcttagaatattctcttattatttatatttttatatttcttgaaagatggtaagtttcttgaagtttttggggcgtttctcttttactggtgcttagcgcagtgtctcgggcactctaaatattgagtgttatggaggacacagaggtagcagaatcccagttgaaaatgttttgatattttattgtttggcctattgattctagacctggccttaagtctgcaaaagccatctttataaggtaggctgttccagttaagtagtgggtgatgtagttacaaagataatatgctcagtttggacctttttttcagttaaatgctaaatatatgaaaattactatacctctaagtattttcatgaaattcaccagcagtttgcaagcacagttttgcaaggctgcataagaactggtgaatggggtaagcattttcattcttcctgctgaagtaaagcagaaagtactgcatagtatatgagatatagccagctagctaaagttcagattttgttaggttcaaccctatgaaaaaaactattttcataggtcaaaaatggtaaaaaattagcagtttcataagattcaaccaaataaatatatatatacacacacacatacatatacacctatatatgtgtgtatacaaacagttcgaatgtattttggtgacagtaataaatcaatgtgaggatggatagaatttagtatatgatagagaaaatgtcataaatggataaaaggaatttacaacttgaggagaaaacctttacaatttcctatgggtgtcagaagtactctcagcgaaaactgatggctaaaacagtatctactattctctgataactttttttttgagacagagtttcattgtcacccaggctggagtacagtggcatgatctcagctcactgcaaactctgcctcccgaattcaagtgattctcctgcctcagcctcctgagtagctgggattacaggcgcccgtcaccacacccaggtaatttttgtatttttagtagagacggagttttgccatgttggccaagctgatctcaaactcctgacctcaagtgatctgcccgcctcggcctcccaaagtgctgagattacaggcatgacccaccgcgtcaagcctctgacaactattgaatttgtaagctgctatgcaaatgggcatttatataaacttgtgatgtttcttgtcagaattctgagtactctgtgaagaacagaaatgatcatattcttatgcatctatctgtatgggtctgaaggtgtatatacaaactgagatgagtccttatgactcttgataagcctgagtttaacaacaacaaaaatgccaagttgtcctgagcccttctgcgttgttatgccacttccctactgctcatatgcacgctggctcccctgggcacgcaaggatgagtatgggccatgggcccctgtagagctgcttacctggtgatgaccatgcaccttacaatttctgaacagttaaccctatagaagcatgctttatatgagtgtcttctgggaagaggaaccttcttaatctcttctgtgggattttcaaaatgctaaagactcacactgcagcaatcatcccagatgattaaattcaaagaaataggttcacaacaggaatatactgaagaactagagtgtcactgctggtgaactgtggcacggttgctcaacacatcacctcggacaaattcaggaagcatttctttagcccacaagtccagacccaggtgctctgtatgtttgtttttaatattcatcatatccaagttcactctgtcttcctgagcagtggaagatcatattgctgtaacttcttttaagtagttgatgtggaaaacattttaaagtgaatttgtcaaaatgctggttttgtgttttatccaacttttgtgcatatatataaagtatgtcatggcatggtttgcttaggagttcagagttccttcatcatcgaaatagtgattaagtgatcccagaacaaggaatactagagtaaaaagcacctctttttc

SEQ ID NO: 191534 - DNA, 1827 bp, Homo sapiens
  Payload ID: 17833
  Gene Name: TNF receptor-associated factor 5
  Uniprot ID: O00463
  ENST ID: ENST00000367004
  CDS Start-End: 61-1734
agtgcagggatgtgcagatgagtgggctgtggggtgtcctgctcacggtttcatggatgaatggcttattcagaagagcataaaggtatgccctgtggtttcatccgccagaattccggcaactccatttccttggactttgagcccagtatagagtaccagtttgtggagcggttggaagagcgctacaaatgtgccttctgccactcggtgcttcacaacccccaccagacaggatgtgggcaccgcttctgccagcactgcatcctgtccctgagagaattaaacacagtgccaatctgccctgtagataaagaggtcatcaaatctcaggaggtttttaaagacaattgttgcaaaagagaagtcctcaacttatatgtatattgcagcaatgctcctggatgtaatgccaaggttattctgggccggtaccaggatcaccttcagcagtgcttatttcaacctgtgcagtgttctaatgagaagtgccgggagccagtcctacggaaagacctgaaagagcatttgagtgcatcctgtcagtttcgaaaggaaaaatgcctttattgcaaaaaggatgtggtagtcatcaatctacagaatcatgaggaaaacttgtgtcctgaatacccagtattttgtcccaacaattgtgcgaagattattctaaaaactgaggtagatgaacacctggctgtatgtcctgaagctgagcaagactgtccttttaagcactatggctgtgctgtaacggataaacggaggaacctgcagcaacatgagcattcagccttacgggagcacatgcgtttggttttagaaaagaatgtccaattagaagaacagatttctgacttacacaagagcctagaacagaaagaaagtaaaatccagcagctagcagaaactataaagaaacttgaaaaggagttcaagcagtttgcacagttgtttggcaaaaatggaagcttcctcccaaacatccaggtttttgccagtcacattgacaagtcagcttggctagaagctcaagtgcatcaattattacaaatggttaaccagcaacaaaataaatttgacctgagacctttgatggaagcagttgatacagtgaaacagaaaattaccctgctagaaaacaatgatcaaagattagccgttttagaagaggaaactaacaaacatgatacccacattaatattcataaagcacagctgagtaaaaatgaagagcgatttaaactgctggagggtacttgctataatggaaagctcatttggaaggtgacagattacaagatgaagaagagagaggcggtggatgggcacacagtgtccatcttcagccagtccttctacaccagccgctgtggctaccggctctgtgctagagcatacctgaatggggatgggtcagggagggggtcacacctgtccctatactttgtggtcatgcgaggagagtttgactcactgttgcagtggccattcaggcagagggtgaccctgatgcttctggaccagagtggcaaaaagaacattatggagaccttcaaacctgaccccaatagcagcagctttaaaagacctgatggggagatgaacattgcatctggctgtccccgctttgtggctcattctgttttggagaatgccaagaacgcctacattaaagatgacactctgttcttgaaagtggccgtggacttaactgacctggaggatctctagtcactgttatggggtgataagaggacttcttggggccagaactgtggaggagagcacatttgattatcatattgacctggatttagactcaaa

SEQ ID NO: 191535 - DNA, 2558 bp, Homo sapiens
  Payload ID: 17834
  Gene Name: TNF receptor-associated factor 6, E3 ubiquitin protein ligase
  Uniprot ID: Q9Y4K3
  ENST ID: ENST00000348124
  CDS Start-End: 325-1893
gcagtggcgtccgcagctggggcttggcctgcgggcggccagcgaaggtggcgaaggctcccactggatccagagtttgccgtccaagcagcctcgtctcggcgcgcagtgtctgtgtccgtcctctaccagcgccttggctgagcggagtcgtgcggttggtgggggagccctgccctcctggttcggcctccccgcgcactagaacgatcatgaacttctgaagggacccagctttctttgtgtgctccaagtgatttgcacaaataataatatatatatttattgaaggagagaatcagagcaagtgataatcaagttactatgagtctgctaaactgtgaaaacagctgtggatccagccagtctgaaagtgactgctgtgtggccatggccagctcctgtagcgctgtaacaaaagatgatagtgtgggtggaactgccagcacggggaacctctccagctcatttatggaggagatccagggatatgatgtagagtttgacccacccctggaaagcaagtatgaatgccccatctgcttgatggcattacgagaagcagtgcaaacgccatgcggccataggttctgcaaagcctgcatcataaaatcaataagggatgcaggtcacaaatgtccagttgacaatgaaatactgctggaaaatcaactatttccagacaattttgcaaaacgtgagattctttctctgatggtgaaatgtccaaatgaaggttgtttgcacaagatggaactgagacatcttgaggatcatcaagcacattgtgagtttgctcttatggattgtccccaatgccagcgtcccttccaaaaattccatattaatattcacattctgaaggattgtccaaggagacaggtttcttgtgacaactgtgctgcatcaatggcatttgaagataaagagatccatgaccagaactgtcctttggcaaatgtcatctgtgaatactgcaatactatactcatcagagaacagatgcctaatcattatgatctagactgccctacagccccaattccatgcacattcagtacttttggttgccatgaaaagatgcagaggaatcacttggcacgccacctacaagagaacacccagtcacacatgagaatgttggcccaggctgttcatagtttgagcgttatacccgactctgggtatatctcagaggtccggaatttccaggaaactattcaccagttagagggtcgccttgtaagacaagaccatcaaatccgggagctgactgctaaaatggaaactcagagtatgtatgtaagtgagctcaaacgaaccattcgaacccttgaggacaaagttgctgaaatcgaagcacagcagtgcaatggaatttatatttggaagattggcaactttggaatgcatttgaaatgtcaagaagaggagaaacctgttgtgattcatagccctggattctacactggcaaacccgggtacaaactgtgcatgcgcttgcaccttcagttaccgactgctcagcgctgtgcaaactatatatccctttttgtccacacaatgcaaggagaatatgacagccacctcccttggcccttccagggtacaatacgccttacaattcttgatcagtctgaagcacctgtaaggcaaaaccacgaagagataatggatgccaaaccagagctgcttgctttccagcgacccacaatcccacggaacccaaaaggttttggctatgtaacttttatgcatctggaagccctaagacaaagaactttcattaaggatgacacattattagtgcgctgtgaggtctccacccgctttgacatgggtagccttcggagggagggttttcagccacgaagtactgatgcaggggtatagcttgccctcacttgctcaaaaacaactacctggagaaaacagtgcctttccttgccctgttctcaataacatgcaaacaaacaagccacgggaaatatgtaatatctactagtgagtgttgttagagaggtcacttactatttcttcctgttacaaatgatctgaggcagttttttcctgggaatccacacgttccatgctttttcagaaatgttaggcctgaagtgcctgtggcatgttgcagcagctattttgccagttagtatacctctttgttgtactttcttgggcttttgctctggtgtattttattgtcagaaagtccagactcaagagtactaaacttttaataataatggattttccttaaaacttcagtctttttgtagtattatatgtaatatattaaaagtgaaaatcactaccgccttgtgctagtgccctcgagaagagttattgctctagaaagttgagttctcatttttttaacctgttatagatttcagaggatttgaaccataatccttggaaaacttaagttctcattcaccccagtttttcctccaggttgttactaaggatattcagggatgagtttaaaccctaaatataaccttaattatttagtgtaaacatgtctgttgaataatacttgtttaagtgtt

SEQ ID NO: 191536 - DNA, 4627 bp, Homo sapiens
  Payload ID: 17834
  Gene Name: TNF receptor-associated factor 6, E3 ubiquitin protein ligase
  Uniprot ID: Q9Y4K3
  ENST ID: ENST00000526995
  CDS Start-End: 248-1816
agcagagaaggcggaagcagtggcgtccgcagctggggcttggcctgcgggcggccagcgaaggtggcgaaggctcccactggatccagagtttgccgtccaagcagcctcgtctcggcgcgcagtgtctgtgtccgtcctctaccagcgccttggctgagcggagtcgtgcggttggtgggggagccctgccctcctggttcggcctccccgcgcactagaacgagcaagtgataatcaagttactatgagtctgctaaactgtgaaaacagctgtggatccagccagtctgaaagtgactgctgtgtggccatggccagctcctgtagcgctgtaacaaaagatgatagtgtgggtggaactgccagcacggggaacctctccagctcatttatggaggagatccagggatatgatgtagagtttgacccacccctggaaagcaagtatgaatgccccatctgcttgatggcattacgagaagcagtgcaaacgccatgcggccataggttctgcaaagcctgcatcataaaatcaataagggatgcaggtcacaaatgtccagttgacaatgaaatactgctggaaaatcaactatttccagacaattttgcaaaacgtgagattctttctctgatggtgaaatgtccaaatgaaggttgtttgcacaagatggaactgagacatcttgaggatcatcaagcacattgtgagtttgctcttatggattgtccccaatgccagcgtcccttccaaaaattccatattaatattcacattctgaaggattgtccaaggagacaggtttcttgtgacaactgtgctgcatcaatggcatttgaagataaagagatccatgaccagaactgtcctttggcaaatgtcatctgtgaatactgcaatactatactcatcagagaacagatgcctaatcattatgatctagactgccctacagccccaattccatgcacattcagtacttttggttgccatgaaaagatgcagaggaatcacttggcacgccacctacaagagaacacccagtcacacatgagaatgttggcccaggctgttcatagtttgagcgttatacccgactctgggtatatctcagaggtccggaatttccaggaaactattcaccagttagagggtcgccttgtaagacaagaccatcaaatccgggagctgactgctaaaatggaaactcagagtatgtatgtaagtgagctcaaacgaaccattcgaacccttgaggacaaagttgctgaaatcgaagcacagcagtgcaatggaatttatatttggaagattggcaactttggaatgcatttgaaatgtcaagaagaggagaaacctgttgtgattcatagccctggattctacactggcaaacccgggtacaaactgtgcatgcgcttgcaccttcagttaccgactgctcagcgctgtgcaaactatatatccctttttgtccacacaatgcaaggagaatatgacagccacctcccttggcccttccagggtacaatacgccttacaattcttgatcagtctgaagcacctgtaaggcaaaaccacgaagagataatggatgccaaaccagagctgcttgctttccagcgacccacaatcccacggaacccaaaaggttttggctatgtaacttttatgcatctggaagccctaagacaaagaactttcattaaggatgacacattattagtgcgctgtgaggtctccacccgctttgacatgggtagccttcggagggagggttttcagccacgaagtactgatgcaggggtatagcttgccctcacttgctcaaaaacaactacctggagaaaacagtgcctttccttgccctgttctcaataacatgcaaacaaacaagccacgggaaatatgtaatatctactagtgagtgttgttagagaggtcacttactatttcttcctgttacaaatgatctgaggcagttttttcctgggaatccacacgttccatgctttttcagaaatgttaggcctgaagtgcctgtggcatgttgcagcagctattttgccagttagtatacctctttgttgtactttcttgggcttttgctctggtgtattttattgtcagaaagtccagactcaagagtactaaacttttaataataatggattttccttaaaacttcagtctttttgtagtattatatgtaatatattaaaagtgaaaatcactaccgccttgtgctagtgccctcgagaagagttattgctctagaaagttgagttctcatttttttaacctgttatagatttcagaggatttgaaccataatccttggaaaacttaagttctcattcaccccagtttttcctccaggttgttactaaggatattcagggatgagtttaaaccctaaatataaccttaattatttagtgtaaacatgtctgttgaataatacttgtttaagtgttccttctgccttgcttacttatttccttgaggttacgaagtagcatcttccccagagtttataatgctgagaaccacgtggataccaactgctcattgttatgctatgtaaccctttttgtctattcagtgcagagtgaatttcacagctctgcatatgtcttcatttgtttaatgcttacaagacaggagatgcacacatacaatcagcaacataaaaattaaaagtgacccaagtagtcagcgcatgtggcatctcattggtggtgacagaagctatgtgagccagaagttttcagctcttttgaataccctctggtttatttcgattaaaaagaacaaaattgatttcctaaaatcagaattttttaaaacttgggagatgattggagatacctaggaggtcaccaaactaggattagaagtcacagtggttgtatcacaacttagcttgagtatgttgctgtagcctaacaactgcaggttctgagaaggatcctgtagaatcctggaagtaaccagattttcctaatagggagatgatttttttgtgtgccatcatgtatttgttaaaggcctatatatagatataaaatatcgtggaatctagttctcagggagacccgcaactagtataagcttataaaggatctaaagatccatccaccatttaaagttgtctggtaatgagagatgacattgtatcccccagagaggccaaatcagagtcgccagccagcgttctagatcagccttaatttcaagagaaagccaaggacctcatctgcaggggagtgtggttttcagccccagcgagtgtcactttgaactttccctttgcttttttctctcttctccctccccacccacccttaggctcctgatctggtgagtttgttatggagtgaaaataaaagtcaagcagagaccttgtttcccgtgccaccattagtaccacaagctcatggctagttaccacattacttcctggcagtttgtgtccctcagctgtgccttccaaccagcgcctgagaatcactgcataccaccctctaggtagggaaacctacactgctgctgttcctgtgattattttacaatgaataaataattgtcaagttccatttaaaaactgaacagtagtatttttgtatttgcgtagaaaaagcctgaaggaaatatactaaactttttgttggcttattttcctttgcgcttgcttatattttttacattttctacaataaatgtgtacttttatcggagaaaaaaattaaatgttgccacaaaacatttaatctccacgcccccagctcaaaaaaggaaatgatatttaaaagcttcctggtcagatttctattaaaagcactggctgtgcattagatacaaagaggagtcatttcctgccttggtgatactatttttttctactaactcaagagtctttattaaaaaaaaaagttgttttgcctaatttcagcttttagcaagcttcccatctgtaaaatgatttggaccagatatttctagagtcccctccagccataacattctgtctcaaattaagttccaaccagcagaacaatgacaatacttaggaaagtattttgccagtataaaatgtctttaacttactctttgctgacactgatactttcctctaatttagtgtctatcagctgggtcacatcttaagtaaaatgagcaattttaacccccaacatttggcattttgtcataaaccagccagttattttatgctggtcattcatcttgactacaaagtagaatagtcaagctgtcattccaaatagaaaactttttacttcaatcagaattaagccttaacctggaaagttggtttcttccttacattttcccaatctcctactctattcttaaacatgctagtttcactcagttgggtatacaagcctttgggctttatgttgtatgttactaaccaccttttaccatatttatcttttggcatcattctgggacattgctaaattaaaaaagaaattgtttccacttttttctggagatgttcaactaaaggttgttttgttttgttttttgttttgagacagtctcaccctgacgctcaggctggagtgcagtggtgcaacctcggctcactgcaac

SEQ ID NO: 191537 - DNA, 3700 bp, Homo sapiens
  Payload ID: 17835
  Gene Name: TNF receptor-associated factor 7, E3 ubiquitin protein ligase
  Uniprot ID: Q6Q0C0
  ENST ID: ENST00000326181
  CDS Start-End: 133-2145
cggctcgcgcgtctagtccctttcccggccggcggccgagggggcatcatgaagcgggctggcggcgctgccgctcccgggcggccgcgggcgggaggtgcttcccaaggaccgtagatgcctctctagagcatgagctcaggcaagagtgcccgctacaaccgcttctccggggggcccagcaatcttcccaccccagacgtcaccacagggaccagaatggaaacgaccttcggacccgccttttcagccgtcaccaccatcacaaaagctgacgggaccagcacctacaagcagcactgcaggacaccctcctcctccagcacccttgcctactccccgcgggacgaggaggacagcatgccccccatcagcactccccgccgctccgactccgccatctctgtccgctccctgcactcagagtccagcatgtctctgcgctccacattctcactgcccgaggaggaggaggagccggagccactggtgtttgcggagcagccctcggtgaagctgtgctgtcagctctgctgcagcgtcttcaaagaccccgtgatcaccacgtgtgggcacacgttctgtaggagatgcgccttgaagtcagagaagtgtcccgtggacaacgtcaaactgaccgtggtggtgaacaacatcgcggtggccgagcagatcggggagctcttcatccactgccggcacggctgccgggtagcgggcagcgggaagccccccatctttgaggtggacccccgagggtgccccttcaccatcaagctcagcgcccggaaggaccacgagggcagctgtgactacaggcctgtgcggtgtcccaacaaccccagctgccccccgctgctcaggatgaacctggaggcccacctcaaggagtgcgagcacatcaaatgcccccactccaagtacgggtgcacgttcatcgggaaccaggacacttacgagacccacctggagacttgccgcttcgagggcctgaaggagtttctgcagcagacggatgaccgcttccacgagatgcacgtggctctggcccagaaggaccaggagatcgccttcctgcgctccatgctgggaaagctctcggagaagatcgaccagctagagaagagcctggagctcaagtttgacgtcctggacgaaaaccagagcaagctcagcgaggacctcatggagttccggcgggacgcatccatgttaaatgacgagctgtcccacatcaacgcgcggctgaacatgggcatcctaggctcctacgaccctcagcagatcttcaagtgcaaagggacctttgtgggccaccagggccctgtgtggtgtctctgcgtctactccatgggtgacctgctcttcagtggctcctctgacaagaccatcaaggtgtgggacacatgtaccacctacaagtgtcagaagacactggagggccatgatggcatcgtgctggctctctgcatccaggggtgcaaactctacagcggctctgcagactgcaccatcattgtgtgggacatccagaacctgcagaaggtgaacaccatccgggcccatgacaacccggtgtgcacgctggtctcctcacacaacgtgctcttcagcggctccctgaaggccatcaaggtctgggacatcgtgggcactgagctgaagttgaagaaggagctcacaggcctcaaccactgggtgcgggccctggtggctgcccagagctacctgtacagcggctcctaccagacaatcaagatctgggacatccgaacccttgactgcatccacgtcctgcagacgtctggtggcagcgtctactccattgctgtgacaaatcaccacattgtctgtggcacctacgagaacctcatccacgtgtgggacattgagtccaaggagcaggtgcggaccctcacgggccacgtgggcaccgtgtatgccctggcggtcatctcgacgccagaccagaccaaagtcttcagtgcatcctacgaccggtccctcagggtctggagtatggacaacatgatctgcacgcagaccctgctgcgtcaccagggcagtgtcaccgcgctggctgtgtcccggggccgactcttctcaggggctgtggatagcactgtgaaggtttggacttgctaacaggatccaggccaggctgtggtttcccctgaaccagccctggacctttctgagccaggctggccacatggggtggtctcggggtttctgcctgccccgtgggcataggtggacaggctctggcagccgggcagtgccctccccgtcccatgctcggcgagcctccctctactcggcactgtccttgctgcccagcccctctctgggtgccaggtacgacgcttgccccggcccaccctccatccccaccctccatccccaccctagatggagcgagggcctttttactcaccttttctaccgtttttagactgtatgtagatttggttacctcctggttgaaataaatgctccacagactgtggctgtgagtggggacagctcctcgggacaagggggctgtgtgtggccttgaggttggtgtgcacaggcactggctgctgtgagtgggggggcatggggcagtttcctttggtggaccccaggacttcggcccactccggggcctcccctccctgctaggaggcaactcgtcacacccaagctgctggcctccagtcccatctcccccaacacatgtgcccccaaaaagtgagccaggcacctctgtttcctgctgtttattgacagccgacggcagcgccttgcccagacctcccctgcccacctgctggagcccagcctgtgccgccctctgaggagaggcctggggggacagctgggcacgtccactcgcagggaaacacggggtgagacagcaggaaggggccctgcacgccgggacgccacctccgccagccgcctccacccgccccacaccacaatcgctggttttcggcattttttaaattttttttttaagaaacgtcaaagttgtgcccaacactgtggatcagcaaacacgatagaggagaccagtcagtacttcttggagggggcaggaggagagaggaaaagggagggcgagaatgaccacacaacacagccttggaccatgagcagaagcgtccgtgggaactccactggggtggatgggctgcctgcacagcccctggagagggggccaggcacaccctcagaggagctgcaagcccgtggcctggcctgctacatgccctgcttccacgtggctgccacgctgacacacccacattcaccaaacccacccgcgccctgggacgcagccacgccaggaggaggacacggccgccgagagcaaggcacaacctcgagttcttggggcgcagagaacttaggagagaagcacggaggagcccccggcagagcacccgcccccgggccccagccttccacctgtgctagcagcctggggcctccactctggccggaggaaggaccgcaggcagacagcctgggcctctaacagcttttgtccggagctagacttcgtgtcctttcagttggtaaatggttttctatagaatcaataatatttctttctttaaatatatatttgttaaagttatacctttttgtttctctggggaaatccgcctcagctcattcccaataaattaatactcttgatagctta

SEQ ID NO: 191538 - DNA, 737 bp, Homo sapiens
  Payload ID: 17835
  Gene Name: TNF receptor-associated factor 7, E3 ubiquitin protein ligase
  ENST ID: ENST00000567645
  CDS Start-End: 297-737
ggtgactggctgtgactcaggacccagaggagtagagggagccaggcaggggtccctccacctcggggaagagctggatgggctcttcgggagctcagaaaggctaagccttgagggacggtgacgcagagccgcctgcctgcccgggcctctgcatacctgggatcggggtgaaggacctttgcctcctagaggcctgcctgagccggggctggtggtggaaggctgctgcggcggccccacggtgccccacagcaggaggtgcttcccaaggaccgtagatgcctctctagagcatgagctcaggcaagagtgcccgctacaaccgcttctccggggggcccagcaatcttcccaccccagacgtcaccacagggaccagaatggaaacgaccttcggacccgccttttcagccgtcaccaccatcacaaaagctgacgggaccagcacctacaagcagcactgcaggacaccctcctcctccagcacccttgcctactccccgcgggacgaggaggacagcatgccccccatcagcactccccgccgctccgactccgccatctctgtccgctccctgcactcagagtccagcatgtctctgcgctccacattctcactgcccgaggaggaggaggagccggagccactggtgtttgcggagcagccctcggtgaagctgtgctgtcagctctgctgcagcgtcttcaaagaccccgtgatcaccacgtgtggg

SEQ ID NO: 191539 - DNA, 874 bp, Homo sapiens
  Payload ID: 17835
  Gene Name: TNF receptor-associated factor 7, E3 ubiquitin protein ligase
  ENST ID: ENST00000564067
  CDS Start-End: 69-233
gcgctgccgctcccgggcggccgcgggcgggaggtgcttcccaaggaccgtagatgcctctctagagcatgagctcaggcaagagtgcccgctacaaccgcttctccggggggcccagcaatcttcccaccccagacgtcaccacaggggtctcctccgtcctccctctagaccagaatggaaacgaccttcggacccgccttttcagccgtcaccaccatcacaaaagctgacgggaccagcacctacaagcagcactgcaggacaccctcctcctccagcacccttgcctactccccgcgggacgaggaggacagcatgccccccatcagcactccccgccgctccgactccgccatctctgtccgctccctgcactcagagtccagcatgtctctgcgctccacattctcactgcccgaggaggaggaggagccggagccactggtgtttgcggagcagccctcggtgaagctgtgctgtcagctctgctgcagcgtcttcaaagaccccgtgatcaccacgtgtgggcacacgttctgtaggagatgcgccttgaagtcagagaagtgtcccgtggacaacgtcaaactgaccgtggtggtgaacaacatcgcggtggccgagcagatcggggagctcttcatccactgccggcacggctgccgggtagcgggcagcgggaagccccccatctttgaggtggacccccgagggtgccccttcaccatcaagctcagcgcccggaaggaccacgagggcagctgtgactacaggcctgtgcggtgtcccaacaaccccagctgccccccgctgctcaggatgaacctggaggcccacctcaaggagtgcgagcacatcaaatgcccccact

SEQ ID NO: 191540 - DNA, 666 bp, Homo sapiens
  Payload ID: 17835
  Gene Name: TNF receptor-associated factor 7, E3 ubiquitin protein ligase
  ENST ID: ENST00000567653
  CDS Start-End: 94-354
gggggcatcatgaagcgggctggcggcgctgccgctcccgggcggccgcgggcgggaggtgcttcccaaggaccgtagatgcctctctagagcatgagctcaggcaagagtgcccgctacaaccgcttctccggggggcccagcaatcttcccaccccagacgtcaccacagggaccagaatggaaacgaccttcggacccgccttttcagccgtcaccaccatcacaaaagctgacgggaccagcacctacaagcagcactgcaggacaccctcctcctccagcacccttgcctactccccgcgggacgaggaggacagcatggtaggtccctacccccaggagcccgtgtgagcctcagcctccccccatcctccctcctgggggaaccaggtcccaggaggagttgacagtgagctggtgaggcacaggagaagaagagcacctgtggataccctgaggcctcggcagacatggcaagtctgtgagaaaggaggctcctgtggctggactgtgggtggcagggggcagccagtgagggcagctgggtcagagggcctggcacctgcaggccaggatgaggcatatttggctccatcttaagggaggtggaaaccacagaaagttcagtcaggaggatagcacaataaaatacatgctttgaaa

SEQ ID NO: 191541 - DNA, 799 bp, Homo sapiens
  Payload ID: 17835
  Gene Name: TNF receptor-associated factor 7, E3 ubiquitin protein ligase
  ENST ID: ENST00000565383
  CDS Start-End: 200-364
ggcagccgtccgggcccggagaggcggggaactacacgtcccggcgggcgcagcggcctggcgcttccggctcgcgcgtctagtccctttcccggccggcggccgagggggcatcatgaagcgggctggcggcgctgccgctcccgggcggccgcgggcgggaggtgcttcccaaggaccgtagatgcctctctagagcatgagctcaggcaagagtgcccgctacaaccgcttctccggggggcccagcaatcttcccaccccagacgtcaccacaggggtctcctccgtcctccctctagaccagaatggaaacgaccttcggacccgccttttcagccgtcaccaccatcacaaaagctgacgggaccagcacctacaagcagcactgcaggacaccctcctcctccagcacccttgcctactccccgcgggacgaggaggacagcatggtaggtccctacccccaggagcccgtgtgagcctcagcctccccccatcctccctcctgggggaaccaggtcccaggaggagttgacagtgagctggtgaggcacaggagaagaagagcacctgtggataccctgaggcctcggcagacatggcaagtctgtgagaaaggaggctcctgtggctggactgtgggtggcagggggcagccagtgagggcagctgggtcagagggcctggcacctgcaggccaggatgaggcatatttggctccatcttaagggaggtggaaaccacagaaagttcagtcaggaggatagcacaataaaatacatgctttgaaagcttc

SEQ ID NO: 191542 - DNA, 2296 bp, Homo sapiens
  Payload ID: 17836
  Gene Name: TNF receptor-associated protein 1
  Uniprot ID: Q12931
  ENST ID: ENST00000246957
  CDS Start-End: 90-2204
gaggaagccccgccccgcgcagccccgtcccgccccttcccatcgtgtacggtcccgcgtggctgcgcgcggcgctctgggagtacgacatggcgcgcgagctgcgggcgctgctgctgtggggccgccgcctgcggcctttgctgcgggcgccggcgctggcggccgtgccgggaggaaaaccaattctgtgtcctcggaggaccacagcccagttgggccccaggcgaaacccagcctggagcttgcaggcaggacgactgttcagcacgcagaccgccgaggacaaggaggaacccctgcactcgattatcagcagcacagagagcgtgcagggttccacttccaaacatgagttccaggccgagacaaagaagcttttggacattgttgcccggtccctgtactcagaaaaagaggtgtttatacgggagctgatctccaatgccagcgatgccttggaaaaactgcgtcacaaactggtgtctgacggccaagcactgccagaaatggagattcacttgcagaccaatgccgagaaaggcaccatcaccatccaggatactggtatcgggatgacacaggaagagctggtgtccaacctggggacgattgccagatcggggtcaaaggccttcctggatgctctgcagaaccaggctgaggccagcagcaagatcatcggccagtttggagtgggtttctactcagctttcatggtggctgacagagtggaggtctattcccgctcggcagccccggggagcctgggttaccagtggctttcagatggttctggagtgtttgaaatcgccgaagcttcgggagttagaaccgggacaaaaatcatcatccacctgaaatccgactgcaaggagttttccagcgaggcccgggtgcgagatgtggtaacgaagtacagcaacttcgtcagcttccccttgtacttgaatggaaggcggatgaacaccttgcaggccatctggatgatggaccccaaggatgtccgtgagtggcaacatgaggagttctaccgctacgtcgcgcaggctcacgacaagccccgctacaccctgcactataagacggacgcaccgctcaacatccgcagcatcttctacgtgcccgacatgaaaccgtccatgtttgatgtgagccgggagctgggctccagcgttgcactgtacagccgcaaagtcctcatccagaccaaggccacggacatcctgcccaagtggctgcgcttcatccgaggtgtggtggacagtgaggacattcccctgaacctcagccgggagctgctgcaggagagcgcactcatcaggaaactccgggacgttttacagcagaggctgatcaaattcttcattgaccagagtaaaaaagatgctgagaagtatgcaaagttttttgaagattacggcctgttcatgcgggagggcattgtgaccgccaccgagcaggaggtcaaggaggacatagcaaagctgctgcgctacgagtcctcggcgctgccctccgggcagctaaccagcctctcagaatacgccagccgcatgcgggccggcacccgcaacatctactacctgtgcgcccccaaccgtcacctggcagagcactcaccctactatgaggccatgaagaagaaagacacagaggttctcttctgctttgagcagtttgatgagctcaccctgctgcaccttcgtgagtttgacaagaagaagctgatctctgtggagacggacatagtcgtggatcactacaaggaggagaagtttgaggacaggtccccagccgccgagtgcctatcagagaaggagacggaggagctcatggcctggatgagaaatgtgctggggtcgcgtgtcaccaacgtgaaggtgaccctccgactggacacccaccctgccatggtcaccgtgctggagatgggggctgcccgccacttcctgcgcatgcagcagctggccaagacccaggaggagcgcgcacagctcctgcagcccacgctggagatcaaccccaggcacgcgctcatcaagaagctgaatcagctgcgcgcaagcgagcctggcctggctcagctgctggtggatcagatatacgagaacgccatgattgctgctggacttgttgacgaccctagggccatggtgggccgcttgaatgagctgcttgtcaaggccctggagcgacactgacagccagggggccagaaggactgacaccacagatgacagccccacctccttgagctttatttacctaaatttaaaggtatttcttaacccga

SEQ ID NO: 191543 - DNA, 2052 bp, Homo sapiens
  Payload ID: 17836
  Gene Name: TNF receptor-associated protein 1
  Uniprot ID: Q12931
  ENST ID: ENST00000538171
  CDS Start-End: 6-1961
acgacatggcgcgcgagctgcgggcgctgctgctgtggggccgccgcctgcggcctttgctgcgggcgccggcgctggcggccgtgccgggaggttccacttccaaacatgagttccaggccgagacaaagaagcttttggacattgttgcccggtccctgtactcagaaaaagaggtgtttatacgggagctgatctccaatgccagcgatgccttggaaaaactgcgtcacaaactggtgtctgacggccaagcactgccagaaatggagattcacttgcagaccaatgccgagaaaggcaccatcaccatccaggatactggtatcgggatgacacaggaagagctggtgtccaacctggggacgattgccagatcggggtcaaaggccttcctggatgctctgcagaaccaggctgaggccagcagcaagatcatcggccagtttggagtgggtttctactcagctttcatggtggctgacagagtggaggtctattcccgctcggcagccccggggagcctgggttaccagtggctttcagatggttctggagtgtttgaaatcgccgaagcttcgggagttagaaccgggacaaaaatcatcatccacctgaaatccgactgcaaggagttttccagcgaggcccgggtgcgagatgtggtaacgaagtacagcaacttcgtcagcttccccttgtacttgaatggaaggcggatgaacaccttgcaggccatctggatgatggaccccaaggatgtccgtgagtggcaacatgaggagttctaccgctacgtcgcgcaggctcacgacaagccccgctacaccctgcactataagacggacgcaccgctcaacatccgcagcatcttctacgtgcccgacatgaaaccgtccatgtttgatgtgagccgggagctgggctccagcgttgcactgtacagccgcaaagtcctcatccagaccaaggccacggacatcctgcccaagtggctgcgcttcatccgaggtgtggtggacagtgaggacattcccctgaacctcagccgggagctgctgcaggagagcgcactcatcaggaaactccgggacgttttacagcagaggctgatcaaattcttcattgaccagagtaaaaaagatgctgagaagtatgcaaagttttttgaagattacggcctgttcatgcgggagggcattgtgaccgccaccgagcaggaggtcaaggaggacatagcaaagctgctgcgctacgagtcctcggcgctgccctccgggcagctaaccagcctctcagaatacgccagccgcatgcgggccggcacccgcaacatctactacctgtgcgcccccaaccgtcacctggcagagcactcaccctactatgaggccatgaagaagaaagacacagaggttctcttctgctttgagcagtttgatgagctcaccctgctgcaccttcgtgagtttgacaagaagaagctgatctctgtggagacggacatagtcgtggatcactacaaggaggagaagtttgaggacaggtccccagccgccgagtgcctatcagagaaggagacggaggagctcatggcctggatgagaaatgtgctggggtcgcgtgtcaccaacgtgaaggtgaccctccgactggacacccaccctgccatggtcaccgtgctggagatgggggctgcccgccacttcctgcgcatgcagcagctggccaagacccaggaggagcgcgcacagctcctgcagcccacgctggagatcaaccccaggcacgcgctcatcaagaagctgaatcagctgcgcgcaagcgagcctggcctggctcagctgctggtggatcagatatacgagaacgccatgattgctgctggacttgttgacgaccctagggccatggtgggccgcttgaatgagctgcttgtcaaggccctggagcgacactgacagccagggggccagaaggactgacaccacagatgacagccccacctccttgagctttatttacctaaatttaaaggtatttcttaacccg

SEQ ID NO: 191544 - DNA, 2309 bp, Homo sapiens
  Payload ID: 17836
  Gene Name: TNF receptor-associated protein 1
  ENST ID: ENST00000575671
  CDS Start-End: 731-2218
gtgctcctcagctgcacaggccacattgcaggtgctcggcaggctgtcgcattgcacctggcagaacgttcctgttgttggagaaagttccatcggacaacgtgggccagggcagtgggcgtgtgtattttacttgactttggccttaggacctttggcagtattatagtagaaaaatgaagtgctgtgcggtgcttacagacgcatgcgcgtgatttctactctttttcccacaaagtgtagagtccaggagacttgaatatggaagccagtttggagcctctcctcactcctggccttcctatggaaggagcttattcaagggaaagagcttattcaagctgctctttccccacccccaggtgtgacccacaggcctccacctgtctgggacaggcaggactgtgagctttgggaatcaaatggaaaacacacttgtcccactgctgccagctggttgtcctagggctaatgtgtcacctctctgtgacttagctcttcacgtgtagaatggggtggaaaagtactcggtgtggctgttttcaggatgaaggggtcttagcggtgctcgcagaagagccacggtgttgggagtgtctgctctctggaggggaggctgcctcactaactggcctctgccccacaggccttcctggatgctctgcagaaccaggctgaggccagcagcaagatcatcggccagtttggagtgggtttctactcagctttcatggtggctgacagagtggaggtctattcccgctcggcagccccggggagcctgggttaccagtggctttcagatggttctggagtgtttgaaatcgccgaagcttcgggagttagaaccgggacaaaaatcatcatccacctgaaatccgactgcaaggagttttccagcgaggcccgggtgcgagatgtggtaacgaagtacagcaacttcgtcagcttccccttgtacttgaatggaaggcggatgaacaccttgcaggccatctggatgatggaccccaaggatgtccgtgagtggcaacatgaggagttctaccgctacgtcgcgcaggctcacgacaagccccgctacaccctgcactataagacggacgcaccgctcaacatccgcagcatcttctacgtgcccgacatgaaaccgtccatgtttgatgtgagccgggagctgggctccagcgttgcactgtacagccgcaaagtcctcatccagaccaaggccacggacatcctgcccaagtggctgcgcttcatccgaggtgtggtggacagtgaggacattcccctgaacctcagccgggagctgctgcaggagagcgcactcatcaggaaactccgggacgttttacagcagaggctgatcaaattcttcattgaccagagtaaaaaagatgctgagaagtatgcaaagttttttgaagattacggcctgttcatgcgggagggcattgtgaccgccaccgagcaggaggtcaaggaggacatagcaaagctgctgcgctacgagtcctcggcgctgccctccgggcagctaaccagcctctcagaatacgccagccgcatgcgggccggcacccgcaacatctactacctgtgcgcccccaaccgtcacctggcagagcactcaccctactatgaggccatgaagaagaaagacacagaggttctcttctgctttgagcagtttgatgagctcaccctgctgcaccttcgtgagtttgacaagaagaagctgatctctgtggagacggacatagtcgtggatcactacaaggaggagaagtttgaggacaggtccccagccgccgagtgcctatcagagaaggagacggaggagctcatggcctggatgagaaatgtgctggggtcgcgtgtcaccaacgtgaaggtgaccctccgactggacacccaccctgccatggtcaccgtgctggagatgggggctgcccgccacttcctgcgcatgcagcagctggccaagacccaggaggagcgcgcacagctcctgcagcccacgctggagatcaaccccaggcacgcgctcatcaagaagctgaatcagctgcgcgcaagcgagcctggcctggctcagctgctggtggatcagatatacgagaacgccatgattgctgctggacttgttgacgaccctagggccatggtgggccgcttgaatgagctgcttgtcaaggccctggagcgacactgacagccagggggccagaaggactgacaccacagatgacagccccacctccttgagctttatttacctaaatttaaaggtatttcttaacccg

SEQ ID NO: 191545 - DNA, 587 bp, Homo sapiens
  Payload ID: 17836
  Gene Name: TNF receptor-associated protein 1
  ENST ID: ENST00000571538
  CDS Start-End: 481-587
atttggtcctgtggatttctctttcagcaacagcccgacttagagatgtccacgctagcttctgctagacacccttgatgggacgaattaccatattgtttctcgtgtcttcctaattctcattctttctgcatatttgtcttttcaggaaaaccaattctgtgtcctcggaggaccacagcccagttgggccccaggcgaaacccagcctggagcttgcaggcaggacgactgttcagcacgcagaccgccgaggacaaggaggaacccctgcactcgattatcagcagcacagagagcgtgcagggttccacttccaaacatgagttccaggccgagacaaagaagcttttggacattgttgcccggtccctgtactcagaaaaagaggtgtttatacgggagctgatctccaatgccagcgatgccttggaaaaactgcgtcacaaactggtgtctgacggccaagcactgccagaaatggagattcacttgcagaccaatgccgagaaaggcaccatcaccatccaggatactggtatcgggatgacacaggaagagctggtgtccaacctggggacgattgc

SEQ ID NO: 191546 - DNA, 645 bp, Homo sapiens
  Payload ID: 17836
  Gene Name: TNF receptor-associated protein 1
  ENST ID: ENST00000576335
  CDS Start-End: 1-645
tccctgtactcagaaaaagaggtctattcccgctcggcagccccggggagcctgggttaccagtggctttcagatggttctggagtgtttgaaatcgccgaagcttcgggagttagaaccgggacaaaaatcatcatccacctgaaatccgactgcaaggagttttccagcgaggcccgggtgcgagatgtggtaacgaagtacagcaacttcgtcagcttccccttgtacttgaatggaaggcggatgaacaccttgcaggccatctggatgatggaccccaaggatgtccgtgagtggcaacatgaggagttctaccgctacgtcgcgcaggctcacgacaagccccgctacaccctgcactataagacggacgcaccgctcaacatccgcagcatcttctacgtgcccgacatgaaaccgtccatgtttgatgtgagccgggagctgggctccagcgttgcactgtacagccgcaaagtcctcatccagaccaaggccacggacatcctgcccaagtggctgcgcttcatccgaggtgtggtggacagtgaggacattcccctgaacctcagccgggagctgctgcaggagagcgcactcatcaggaaactccgggacgttttacagcagaggctgatcaaa

SEQ ID NO: 191547 - DNA, 785 bp, Homo sapiens
  Payload ID: 17836
  Gene Name: TNF receptor-associated protein 1
  ENST ID: ENST00000575707
  CDS Start-End: 1-179
ccaggcacgcgctcatcaagaagctgaatcagctgcgcgcaagcgagcctggcctggctcagctgctggtggatcagatatacgagaacgccatgattgctgctggacttgttgacgaccctagggccatggtgggccgcttgaatgagctgcttgtcaaggccctggagcgacactgacagccagggggccagaaggactgacaccacagatgacagccccacctccttgagctttatttacctaaatttaaaggaactcccaggcatagtgcccctgcttcctctacctgccagaaggaaggctggaacttgggcctcgcttgtacaaatggcgagtgctgcctgctgtgtggctgccctcaggacgggctttggtgagggcagcacagccctggaggagcctggtctgacatggggcccgtctgggatcactgttgggccttcaaccgtctggagcctctatgtcttcctctgatagattcccagaacaatcatttcaccttctaagaagccatcctgcccctgcagcctgtggcttgtggagtctccagcactctcacttctccctcgtggatctcttttctgtctgtgtcagtcaatgctgccatgtaacagccacctgcaaactcagtgtatacacatgcatttctctcacactgccaggtctgctggggtggctctgctgcctgggcctcgtcctggggctgggctggagagactgcagctccctgggcaccctcttcccacagtgtggaaggtggaggctcccagggcacaagcaga

SEQ ID NO: 191548 - DNA, 535 bp, Homo sapiens
  Payload ID: 17836
  Gene Name: TNF receptor-associated protein 1
  ENST ID: ENST00000574175
  CDS Start-End: 1-326
tggctgacagagtggaggtctattcccgctcggcagccccggggagcctgggttaccagtggctttcagatggttctggagtgtttgaaatcgccgaagcttcgggagttagaaccgggacaaaaatcatcatccacctgaaatccgactgcaaggagttttccagcgaggcccgggtgcgagatgtggtaacgaagtacagcaacttcgtcagcttccccttgtacttgaatggaaggcggatgaacaccttgcaggagcctgtccagggccaggcgctgcactggctcaggcctgcacggtggtggagaagacgtgcgtggtgaacacgacgccctccccgccgatctccgtttccaggccatctggatgatggaccccaaggatgtccgtgagtggcaacatgaggagttctaccgctacgtcgcgcaggctcacgacaagccccgctacaccctgcactataagacggacgcaccgctcaacatccgcagcatcttctacgtgcccgacatgaaaccgtccatgtttgatg

SEQ ID NO: 191549 - DNA, 480 bp, Homo sapiens
  Payload ID: 17836
  Gene Name: TNF receptor-associated protein 1
  ENST ID: ENST00000571011
  CDS Start-End: 17-277
gctctgggagtacgacatggcgcgcgagctgcgggcgctgctgctgtggggccgccgcctgcggcctttgctgcgggcgccggcgctggcggccgtgccgggaggaaaaccaattctgtgtcctcggaggaccacagcccagttgggccccaggcgaaacccagcctggagcttgcaggcaggacgactgttcagcacgcagaccgccgaggacaaggaggaacccctgcactcgattatcagcagcacagagagcgtgcagggccgagtgctgtagtgcaatcatggctcactgaagcctcgacctccctggctcaagtgatcctcccacctcagccccctgagtcactgggaccacaagttccacttccaaacatgagttccaggccgagacaaagaagcttttggacattgttgcccggtccctgtactcagaaaaagaggtgtttatacgggagctgatctccaatgccagcgatg

SEQ ID NO: 191550 - DNA, 521 bp, Homo sapiens
  Payload ID: 17836
  Gene Name: TNF receptor-associated protein 1
  ENST ID: ENST00000570403
  CDS Start-End: 5-118
cgacatggcgcgcgagctgcgggcgctgctgctgtggggccgccgcctgcggcctttgctgcgggcgccggcgctggcggccgtgccgggaggctcccgtagggccattgaaatgtgaagaatccttcgtctatgaagtgtccccacatcaaaactgcattagtcgtgctgtcgcctaggctcgagtgcagagatgcaatttcagctcactgaacctctgcctcccaggttcaagcgattctagtgcgttggtctcgcgagtagctaagattacaggaaaaccaattctgtgtcctcggaggaccacagcccagttgggccccaggcgaaacccagcctggagcttgcaggcaggacgactgttcagcacgcagaccgccgaggacaaggaggaacccctgcactcgattatcagcagcacagagagcgtgcagggttccacttccaaacatgagttccaggccgagacaaagaagcttttggacattgttgcccggtccctgtactcagaaaaagaggtg

SEQ ID NO: 191551 - DNA, 781 bp, Homo sapiens
  Payload ID: 17836
  Gene Name: TNF receptor-associated protein 1
  ENST ID: ENST00000571804
  CDS Start-End: 9-122
agtacgacatggcgcgcgagctgcgggcgctgctgctgtggggccgccgcctgcggcctttgctgcgggcgccggcgctggcggccgtgccgggaggctcccgtagggccattgaaatgtgaagaatccttcgtctatgaagtgtccccacatcaaaactgcattgaaaaccaattctgtgtcctcggaggaccacagcccagttgggccccaggcgaaacccagcctggagcttgcaggcaggacgactgttcagcacgcagaccgccgaggacaaggaggaacccctgcactcgattatcagcagcacagagagcgtgcagggttccacttccaaacatgagttccaggccgagacaaagaagcttttggacattgttgcccggtccctgtactcagaaaaagaggtgtttatacgggagctgatctccaatgccagcgatgccttggaaaaactgcgtcacaaactggtgtctgacggccaagcactgccagaaatggagattcacttgcagaccaatgccgagaaaggcaccatcaccatccaggatactggtatcgggatgacacaggaagagctggtgtccaacctggggacgattgccagatcggggtcaaaggccttcctggatgctctgcagaaccaggctgaggccagcagcaagatcatcggccagtttggagtgggtttctactcagctttcatggtggctgacagagtggaggtctattcccgctcggcagccccggggagcctgggttaccagtggctttcagatgg

SEQ ID NO: 191552 - DNA, 2785 bp, Homo sapiens
  Payload ID: 17837
  Gene Name: TNFAIP3 interacting protein 1
  Uniprot ID: Q15025
  ENST ID: ENST00000315050
  CDS Start-End: 111-2021
agtgagccgaggagccttcatagggacagccgcccctggtgcacacaccctcgtattctcctgcccttccccagccaggcgggcaccacggcaggggctgagctaccctcatggaagggagaggaccgtaccggatctacgaccctgggggcagcgtgccctcaggagaggcatccgcagcttttgagcgcctagtgaaggagaattcccggctgaaggaaaaaatgcaagggataaagatgttaggggagcttttggaagagtcccagatggaagcgaccaggctccggcagaaggcagaggagctagtgaaggacaacgagctgctcccaccaccttctccctccttgggctccttcgaccccctggctgagctcacaggaaaggactcaaatgtcacagcatctcccacagcccctgcatgccccagtgacaagccagcaccagtccagaagcctccatccagtggcacctcctctgaatttgaagtggtcactcctgaggagcagaattcaccagagagcagcagccatgccaatgcgatggcgctgggccccctgccccgtgaggacggcaacctgatgctgcacctgcagcgcctggagaccacgctgagtgtgtgtgccgaggagccggaccacggccagctcttcacccacctgggccgcatggccctggagttcaaccgactggcatccaaggtgcacaagaatgagcagcgcacctccattctgcagaccctgtgtgagcagcttcggaaggagaacgaggctctgaaggccaagttggataagggcctggaacagcgggatcaggctgccgagaggctgcgggaggaaaatttggagctcaagaagttgttgatgagcaatggcaacaaagagggtgcgtctgggcggccaggctcaccgaagatggaagggacaggcaagaaggcagtggctggacagcagcaggctagtgtgacggcaggtaaggtcccagaggtggtggccttgggcgcagccgagaagaaggtgaagatgctggagcagcagcgcagtgagctgctggaagtgaacaagcagtgggaccagcatttccggtccatgaagcagcagtatgagcagaagatcactgagctgcgtcagaagctggctgatttgcagaagcaggtgactgacctggaggccgagcgggagcagaagcagcgtgactttgaccgcaagctcctcctggccaagtccaagattgaaatggaggagaccgacaaggagcagctgacagcagaggccaaggagctgcgccaaaaggtcaagtacctgcaggatcagctgagcccactcacccgacagcgtgagtaccaggaaaaggagatccagcggctcaacaaggccctggaggaagcactgagcatccaaaccccgccatcatctccaccaacagcatttgggagcccagaaggagcaggggccctcctaaggaaacaggagctggtcacgcagaatgagttgctgaaacagcaggtgaagatcttcgaggaggacttccagagggagcgcagtgatcgtgagcgcatgaatgaggagaaggaagagctgaagaagcaagtggagaagctgcaggcccaggtcaccctgtcaaatgcccagctaaaagcattcaaagatgaggagaaggcaagagaagccctcagacagcagaagaggaaagcaaaggcctcaggagagcgttaccatgtggagccccacccagaacatctctgcggggcctacccctacgcctacccgcccatgccagccatggtgccacaccatggcttcgaggactggtcccagatccgctacccccctccccccatggccatggagcacccgcccccactccccaactcgcgcctcttccatctgccggaatacacctggcgtctaccctgtggaggggttcgaaatccaaatcagagctcccaagtgatggaccctcccacagccaggcctacagaaccagagtctccaaaaaatgaccgtgaggggcctcagtgagaccagattgtgtcatttggctccaccttcatcttgcagagccagctgatctcagattgccaagaaactagaagccacttgcacggtgtggccagagcctcagctggatgagaggctgagatgggtggccagcttgtacaccagtccctgaactgagctgtttacaggactggggaggctccacccagaaggctttcatttgtactctgctgggagtgactgggaaaaactccttccctgctgctgagtggagagaggcctcatccggctttgacccaccatccgttgcagaagcctccaggagcagcaatcctaagagtgggaggcagccaagacccccttccttcaaaacctcccggaagtggtttcaggccctctagttgccatgaccaatttgtgtgtgtgtttaatttttgcttcaagctctgtagcaggacctgccccacgcacacccctacccctctgtgaggagctgtgggaagtgtgggtttgtctccagaacagaagagaatgatggatattctggctctggggccctctccaccaccactcacagtagccttgctgaagccatcacagatgggagaaggccatgccagccacgtccgccgaggggcgccagcctgaagctgccaggccctgaggttcagaccctggaccccatagctggaggcctgtggtgccagaagcccagattagggtggctgtccatccctggatagctatttgcacgaatcatggacataaatccaagttgaagaaga

SEQ ID NO: 191553 - DNA, 2935 bp, Homo sapiens
  Payload ID: 17837
  Gene Name: TNFAIP3 interacting protein 1
  ENST ID: ENST00000389378
  CDS Start-End: 242-2101
agtctccggggactttcccaggggtggggcggcccggccaggcccccggcacttcctcgtcctcggcccgggtgccctgcccccgtccaggagccctaggagtgctacggggggccggagccttgcccgggccgctgccccgtccctggattcggggctggacgcagcaagcggggcgctgtgtccccaagctccccgtcctcggccaggcgggcaccacggcaggggctgagctaccctcatggaagggagaggaccgtaccggatctacgaccctgggggcagcgtgccctcaggagaggcatccgcagcttttgagcgcctagtgaaggagaattcccggctgaaggaaaaaatgcaagggataaagatgttaggggagcttttggaagagtcccagatggaagcgaccaggctccggcagaaggcagaggagctagtgaaggacaacgagctgctcccaccaccttctccctccttgggctccttcgaccccctggctgagctcacaggaaaggactcaaatgtcacagcatctcccacagcccctgcatgccccagtgacaagccagcaccagtccagaagcctccatccagtggcacctcctctgaatttgaagtggtcactcctgaggagcagaattcaccagagagcagcagccatgccaatgcgatggcgctgggccccctgccccgtgaggacggcaacctgatgctgcacctgcagcgcctggagaccacgctgagtgtgtgtgccgaggagccggaccacggccagctcttcacccacctgggccgcatggccctggagttcaaccgactggcatccaaggtgcacaagaatgagcagcgcacctccattctgcagaccctgtgtgagcagcttcggaaggagaacgaggctctgaaggccaagttggataagggcctggaacagcgggatcaggctgccgagaggctgcgggaggaaaatttggagctcaagaagttgttgatgagcaatggcaacaaagagggtgcgtctgggcggccaggctcaccgaagatggaagggacaggcaagaaggcagtggctggacagcagcaggctagtgtgacggcaggtaaggtcccagaggtggtggccttgggcgcagccgagaagaaggtgaagatgctggagcagcagcgcagtgagctgctggaagtgaacaagcagtgggaccagcatttccggtccatgaagcagcagtatgagcagaagatcactgagctgcgtcagaagctggctgatttgcagaagcaggtgactgacctggaggccgagcgggagcagaagcagcgtgactttgaccgcaagctcctcctggccaagtccaagattgaaatggaggagaccgacaaggagcagctgacagcagaggccaaggagctgcgccaaaaggtcaagtacctgcaggatcagctgagcccactcacccgacagcgtgagtaccaggaaaaggagatccagcggctcaacaaggccctggaggaagcactgagcatccaaaccccgccatcatctccaccaacagcatttgggagcccagaaggagcaggggccctcctaaggaaacaggagctggtcacgcagaatgagttgctgaaacagcaggtgaagatcttcgaggaggacttccagagggagcgcagtgatcgtgagcgcatgaatgaggagaaggaagagctgaagaagcaagtggagaagctgcaggcccaggtcaccctgtcaaatgcccagctaaaagcattcaaagatgaggagaaggcaagagaagccctcagacagcagaagaggaaagcaaaggcctcaggagagcgttaccatgtggagccccacccagaacatctctgcggggcctacccctacgcctacccgcccatgccagccatggtgccacaccatggcttcgaggactggtcccagatccgctacccccctccccccatggccatggagcacccgcccccactccccaactcgcgcctcttccatctgcaccagttttgtcgcagccggaatacacctggcgtctaccctgtggaggggttcgaaatccaaatcagagctcccaagtgatggaccctcccacagccaggcctacagaaccagagtctccaaaaaatgaccgtgaggggcctcagtgagaccagattgtgtcatttggctccaccttcatcttgcagagccagctgatctcagattgccaagaaactagaagccacttgcacggtgtggccagagcctcagctggatgagaggctgagatgggtggccagcttgtacaccagtccctgaactgagctgtttacaggactggggaggctccacccagaaggctttcatttgtactctgctgggagtgactgggaaaaactccttccctgctgctgagtggagagaggcctcatccggctttgacccaccatccgttgcagaagcctccaggagcagcaatcctaagagtgggaggcagccaagacccccttccttcaaaacctcccggaagtggtttcaggccctctagttgccatgaccaatttgtgtgtgtgtttaatttttgcttcaagctctgtagcaggacctgccccacgcacacccctacccctctgtgaggagctgtgggaagtgtgggtttgtctccagaacagaagagaatgatggatattctggctctggggccctctccaccaccactcacagtagccttgctgaagccatcacagatgggagaaggccatgccagccacgtccgccgaggggcgccagcctgaagctgccaggccctgaggttcagaccctggaccccatagctggaggcctgtggtgccagaagcccagattagggtggctgtccatccctggatagctatttgcacgaatcatggacataaatccaagttgaagaagatc

SEQ ID NO: 191554 - DNA, 1815 bp, Homo sapiens
  Payload ID: 17837
  Gene Name: TNFAIP3 interacting protein 1
  ENST ID: ENST00000519339
  CDS Start-End: 24-1502
gggagcttttggaagagtcccagatggaagcgaccaggctccggcagaaggcagaggagctagtgaaggacaacgagctgctcccaccaccttctccctccttgggctccttcgaccccctggctgagctcacaggaaaggactcaaatgtcacagcatctcccacagcccctgcatgccccagtgacaagccagcaccagtccagaagcctccatccagtggcacctcctctgaatttgaagtggtcactcctgaggagcagaattcaccagagagcagcagccatgccaatgcgatggcgctgggccccctgccccgtgaggacggcaacctgatgctgcacctgcagcgcctggagaccacgctgagtgtgtgtgccgaggagccggaccacggccagctcttcacccacctgggccgcatggccctggagttcaaccgactggcatccaaggtgcacaagaatgagcagcgcacctccattctgcagaccctgtgtgagcagcttcggaaggagaacgaggctctgaaggccaagttggataagggcctggaacagcgggatcaggctgccgagaggctgcgggaggaaaatttggagctcaagaagttgttgatgagcaatggcaacaaagagggtgcgtctgggcggccaggctcaccgaagatggaagggacaggcaagaaggcagtggctggacagcagcaggctagtgtgacggcaggtaaggtcccagaggtggtggccttgggcgcagccgagaagaaggtgaagatgctggagcagcagcgcagtgagctgctggaagtgaacaagcagtgggaccagcatttccggtccatgaagcagcagtatgagcagaagatcactgagctgcgtcagaagctggctgatttgcagaagcaggtgactgacctggaggccgagcgggagcagaagcagcgtgactttgaccgcaagctcctcctggccaagtccaagattgaaatggaggagaccgacaaggagcagctgacagcagaggccaaggagctgcgccaaaaggtcaagtacctgcaggatcagctgagcccactcacccgacagcgtgagtaccaggaaaaggagatccagcggctcaacaaggccctggaggaagcactgagcatccaaaccccgccatcatctccaccaacagcatttgggagcccagaaggagcaggggccctcctaaggaaacaggagctggtcacgcagaatgagttgctgaaacagcaggtgaagatcttcgaggaggacttccagagggagcgcagtgatcgtgagcgcatgaatgaggagaaggaagagctgaagaagcaagtggagaagctgcaggcccaggtcaccctgtcaaatgcccagctaaaagcattcaaagatgaggagaaggcaagagaagccctcagacagcagaagaggaaagcaaagggcacacacagaggctgccccagacaccttccagagaggaaggttaagtgaggggttcagaaactgcatccttctgaactaaacagcaccgtggtggcagccggaatacacctggcgtctaccctgtggaggggttcgaaatccaaatcagagctcccaagtgatggaccctcccacagccaggcctacagaaccagagtctccaaaaaatgaccgtgaggggcctcagtgagaccagattgtgtcatttggctccaccttcatcttgcagagccagctgatctcagattgccaagaaactagaagccacttgcacggtgtggccagagcctcagctggatgagaggctgagatgggtggccag

SEQ ID NO: 191555 - DNA, 2238 bp, Homo sapiens
  Payload ID: 17837
  Gene Name: TNFAIP3 interacting protein 1
  Uniprot ID: Q15025
  ENST ID: ENST00000522226
  CDS Start-End: 107-2017
atgcaccaaggaaggagtgggccccttcttcactatggatggagaagcctcagagagtaagtggcaacagccaggcgggcaccacggcaggggctgagctaccctcatggaagggagaggaccgtaccggatctacgaccctgggggcagcgtgccctcaggagaggcatccgcagcttttgagcgcctagtgaaggagaattcccggctgaaggaaaaaatgcaagggataaagatgttaggggagcttttggaagagtcccagatggaagcgaccaggctccggcagaaggcagaggagctagtgaaggacaacgagctgctcccaccaccttctccctccttgggctccttcgaccccctggctgagctcacaggaaaggactcaaatgtcacagcatctcccacagcccctgcatgccccagtgacaagccagcaccagtccagaagcctccatccagtggcacctcctctgaatttgaagtggtcactcctgaggagcagaattcaccagagagcagcagccatgccaatgcgatggcgctgggccccctgccccgtgaggacggcaacctgatgctgcacctgcagcgcctggagaccacgctgagtgtgtgtgccgaggagccggaccacggccagctcttcacccacctgggccgcatggccctggagttcaaccgactggcatccaaggtgcacaagaatgagcagcgcacctccattctgcagaccctgtgtgagcagcttcggaaggagaacgaggctctgaaggccaagttggataagggcctggaacagcgggatcaggctgccgagaggctgcgggaggaaaatttggagctcaagaagttgttgatgagcaatggcaacaaagagggtgcgtctgggcggccaggctcaccgaagatggaagggacaggcaagaaggcagtggctggacagcagcaggctagtgtgacggcaggtaaggtcccagaggtggtggccttgggcgcagccgagaagaaggtgaagatgctggagcagcagcgcagtgagctgctggaagtgaacaagcagtgggaccagcatttccggtccatgaagcagcagtatgagcagaagatcactgagctgcgtcagaagctggctgatttgcagaagcaggtgactgacctggaggccgagcgggagcagaagcagcgtgactttgaccgcaagctcctcctggccaagtccaagattgaaatggaggagaccgacaaggagcagctgacagcagaggccaaggagctgcgccaaaaggtcaagtacctgcaggatcagctgagcccactcacccgacagcgtgagtaccaggaaaaggagatccagcggctcaacaaggccctggaggaagcactgagcatccaaaccccgccatcatctccaccaacagcatttgggagcccagaaggagcaggggccctcctaaggaaacaggagctggtcacgcagaatgagttgctgaaacagcaggtgaagatcttcgaggaggacttccagagggagcgcagtgatcgtgagcgcatgaatgaggagaaggaagagctgaagaagcaagtggagaagctgcaggcccaggtcaccctgtcaaatgcccagctaaaagcattcaaagatgaggagaaggcaagagaagccctcagacagcagaagaggaaagcaaaggcctcaggagagcgttaccatgtggagccccacccagaacatctctgcggggcctacccctacgcctacccgcccatgccagccatggtgccacaccatggcttcgaggactggtcccagatccgctacccccctccccccatggccatggagcacccgcccccactccccaactcgcgcctcttccatctgccggaatacacctggcgtctaccctgtggaggggttcgaaatccaaatcagagctcccaagtgatggaccctcccacagccaggcctacagaaccagagtctccaaaaaatgaccgtgaggggcctcagtgagaccagattgtgtcatttggctccaccttcatcttgcagagccagctgatctcagattgccaagaaactagaagccacttgcacggtgtggccagagcctcagctggatgagaggctgagatgggtggccagcttgtacaccagtccctgaactgagctgtttacaggactggggaggctccacccagaaggctttcatttgtactctgctgggagtgact

SEQ ID NO: 191556 - DNA, 2711 bp, Homo sapiens
  Payload ID: 17837
  Gene Name: TNFAIP3 interacting protein 1
  Uniprot ID: Q15025
  ENST ID: ENST00000523338
  CDS Start-End: 111-2018
agtgagccgaggagccttcatagggacagccgcccctggtgcacacaccctcgtattctcctgcccttccccagccaggcgggcaccacggcaggggctgagctaccctcatggaagggagaggaccgtaccggatctacgaccctgggggcagcgtgccctcaggagaggcatccgcagcttttgagcgcctagtgaaggagaattcccggctgaaggaaaaaatgcaagggataaagatgttaggggagcttttggaagagtcccagatggaagcgaccaggctccggcagaaggcagaggagctagtgaaggacaacgagctgctcccaccaccttctccctccttgggctccttcgaccccctggctgagctcacaggaaaggactcaaatgtcacagcatctcccacagcccctgcatgccccagtgacaagccagcaccagtccagaagcctccatccagtggcacctcctctgaatttgaagtggtcactcctgaggagcagaattcaccagagagcagcagccatgccaatgcgatggcgctgggccccctgccccgtgaggacggcaacctgatgctgcacctgcagcgcctggagaccacgctgagtgtgtgtgccgaggagccggaccacggccagctcttcacccacctgggccgcatggccctggagttcaaccgactggcatccaaggtgcacaagaatgagcagcgcacctccattctgcagaccctgtgtgagcagcttcggaaggagaacgaggctctgaaggccaagttggataagggcctggaacagcgggatcaggctgccgagaggctgcgggaggaaaatttggagctcaagaagttgttgatgagcaatggcaacaaagagggtgcgtctgggcggccaggctcaccgaagatggaagggacaggcaagaaggcagtggctggacagcagcaggctagtgtgacggcaggtaaggtcccagaggtggtggccttgggcgcagccgagaagaaggtgaagatgctggagcagcagcgcagtgagctgctggaagtgaacaagcagtgggaccagcatttccggtccatgaagcagcagtatgagcagaagatcactgagctgcgtcagaagctggctgatttgcagaagcaggtgactgacctggaggccgagcgggagcagaagcagcgtgactttgaccgcaagctcctcctggccaagtccaagattgaaatggaggagaccgacaaggagcagctgacagcagaggccaaggagctgcgccaaaaggtcaagtacctgcaggatcagctgagcccactcacccgacagcgtgagtaccaggaaaaggagatccagcggctcaacaaggccctggaggaagcactgagcatccaaaccccgccatcatctccaccaacagcatttgggagcccagaaggagcaggggccctcctaaggaaacaggagctggtcacgcagaatgagttgctgaaacagcaggtgaagatcttcgaggaggacttccagagggagcgcagtgatcgtgagcgcatgaatgaggagaaggaagagctgaagaagcaagtggagaagctgcaggcccaggtcaccctgtcaaatgcccagctaaaagcattcaaagatgaggagaaggcaagagaagccctcagacagcagaagaggaaagcaaaggcctcaggagagcgttaccatgtggagccccacccagaacatctctgcggggcctacccctacgcctacccgcccatgccagccatggtgccacaccatggcttcgaggactggtcccagatccgctacccccctccccccatggccatggagcacccgcccccactccccaactcgcgcctcttccatctgccggaatacacctggcgtctaccctgtggaggggttcgaaatccaaatcagagctcccaagtgatggaccctcccacagccaggcctacagaaccagagccagctgatctcagattgccaagaaactagaagccacttgcacggtgtggccagagcctcagctggatgagaggctgagatgggtggccagcttgtacaccagtccctgaactgagctgtttacaggactggggaggctccacccagaaggctttcatttgtactctgctgggagtgactgggaaaaactccttccctgctgctgagtggagagaggcctcatccggctttgacccaccatccgttgcagaagcctccaggagcagcaatcctaagagtgggaggcagccaagacccccttccttcaaaacctcccggaagtggtttcaggccctctagttgccatgaccaatttgtgtgtgtgtttaatttttgcttcaagctctgtagcaggacctgccccacgcacacccctacccctctgtgaggagctgtgggaagtgtgggtttgtctccagaacagaagagaatgatggatattctggctctggggccctctccaccaccactcacagtagccttgctgaagccatcacagatgggagaaggccatgccagccacgtccgccgaggggcgccagcctgaagctgccaggccctgaggttcagaccctggaccccatagctggaggcctgtggtgccagaagcccagattagggtggctgtccatccctggatagctatttgcacgaatcatggacataaatccaagttgaagaaga

SEQ ID NO: 191557 - DNA, 575 bp, Homo sapiens
  Payload ID: 17837
  Gene Name: TNFAIP3 interacting protein 1
  ENST ID: ENST00000521001
  CDS Start-End: 177-575
atacatactgttctgtgactccccgaaagagggattctctctacattctgaaatttgttgtccctatcctggtattgagaagtcaccttcctgatacaaaaagaaggaacaagttgggagaccacagtgactcaacgacaccaggcgggcaccacggcaggggctgagctaccctcatggaagggagaggaccgtaccggatctacgaccctgggggcagcgtgccctcaggagaggcatccgcagcttttgagcgcctagtgaaggagaattcccggctgaaggaaaaaatgcaagggataaagatgttaggggagcttttggaagagtcccagatggaagcgaccaggctccggcagaaggcagaggagctagtgaaggacaacgagctgctcccaccaccttctccctccttgggctccttcgaccccctggctgagctcacaggaaaggactcaaatgtcacagcatctcccacagcccctgcatgccccagtgacaagccagcaccagtccagaagcctccatccagtggcacctcctctgaatttgaagtggtcactcctgaggagcag

SEQ ID NO: 191558 - DNA, 877 bp, Homo sapiens
  Payload ID: 17837
  Gene Name: TNFAIP3 interacting protein 1
  ENST ID: ENST00000522100
  CDS Start-End: 106-877
agaagcacagtgagccgaggagccttcatagggacagccgcccctggtgcacacaccctcgtattctcctgcccttccccaggggagcttttggaagagtcccagatggaagcgaccaggctccggcagaaggcagaggagctagtgaaggacaacgagctgctcccaccaccttctccctccttgggctccttcgaccccctggctgagctcacaggaaaggactcaaatgtcacagcatctcccacagcccctgcatgccccagtgacaagccagcaccagtccagaagcctccatccagtggcacctcctctgaatttgaagtggtcactcctgaggagcagaattcaccagagagcagcagccatgccaatgcgatggcgctgggccccctgccccgtgaggacggcaacctgatgctgcacctgcagcgcctggagaccacgctgagtgtgtgtgccgaggagccggaccacggccagctcttcacccacctgggccgcatggccctggagttcaaccgactggcatccaaggtgcacaagaatgagcagcgcacctccattctgcagaccctgtgtgagcagcttcggaaggagaacgaggctctgaaggccaagttggataagggcctggaacagcgggatcaggctgccgagaggctgcgggaggaaaatttggagctcaagaagttgttgatgagcaatggcaacaaagagggtgcgtctgggcggccaggctcaccgaagatggaagggacaggcaagaaggcagtggctggacagcagcaggctagtgtgacggcaggtaaggtcccagaggtggtggccttgggcgcagccgagaagaaggtgaagatgctggagcagcagcgca

SEQ ID NO: 191559 - DNA, 2680 bp, Homo sapiens
  Payload ID: 17837
  Gene Name: TNFAIP3 interacting protein 1
  Uniprot ID: Q15025
  ENST ID: ENST00000520931
  CDS Start-End: 161-1912
cgggtgccctgcccccgtccaggagccctaggagtgctacggggggccggagccttgcccgggccgctgccccgtccctggattcggggctggacgcagcaagcggggcgctgtgtccccaagctccccgtcctcgggggagcttttggaagagtcccagatggaagcgaccaggctccggcagaaggcagaggagctagtgaaggacaacgagctgctcccaccaccttctccctccttgggctccttcgaccccctggctgagctcacaggaaaggactcaaatgtcacagcatctcccacagcccctgcatgccccagtgacaagccagcaccagtccagaagcctccatccagtggcacctcctctgaatttgaagtggtcactcctgaggagcagaattcaccagagagcagcagccatgccaatgcgatggcgctgggccccctgccccgtgaggacggcaacctgatgctgcacctgcagcgcctggagaccacgctgagtgtgtgtgccgaggagccggaccacggccagctcttcacccacctgggccgcatggccctggagttcaaccgactggcatccaaggtgcacaagaatgagcagcgcacctccattctgcagaccctgtgtgagcagcttcggaaggagaacgaggctctgaaggccaagttggataagggcctggaacagcgggatcaggctgccgagaggctgcgggaggaaaatttggagctcaagaagttgttgatgagcaatggcaacaaagagggtgcgtctgggcggccaggctcaccgaagatggaagggacaggcaagaaggcagtggctggacagcagcaggctagtgtgacggcaggtaaggtcccagaggtggtggccttgggcgcagccgagaagaaggtgaagatgctggagcagcagcgcagtgagctgctggaagtgaacaagcagtgggaccagcatttccggtccatgaagcagcagtatgagcagaagatcactgagctgcgtcagaagctggctgatttgcagaagcaggtgactgacctggaggccgagcgggagcagaagcagcgtgactttgaccgcaagctcctcctggccaagtccaagattgaaatggaggagaccgacaaggagcagctgacagcagaggccaaggagctgcgccaaaaggtcaagtacctgcaggatcagctgagcccactcacccgacagcgtgagtaccaggaaaaggagatccagcggctcaacaaggccctggaggaagcactgagcatccaaaccccgccatcatctccaccaacagcatttgggagcccagaaggagcaggggccctcctaaggaaacaggagctggtcacgcagaatgagttgctgaaacagcaggtgaagatcttcgaggaggacttccagagggagcgcagtgatcgtgagcgcatgaatgaggagaaggaagagctgaagaagcaagtggagaagctgcaggcccaggtcaccctgtcaaatgcccagctaaaagcattcaaagatgaggagaaggcaagagaagccctcagacagcagaagaggaaagcaaaggcctcaggagagcgttaccatgtggagccccacccagaacatctctgcggggcctacccctacgcctacccgcccatgccagccatggtgccacaccatggcttcgaggactggtcccagatccgctacccccctccccccatggccatggagcacccgcccccactccccaactcgcgcctcttccatctgccggaatacacctggcgtctaccctgtggaggggttcgaaatccaaatcagagctcccaagtgatggaccctcccacagccaggcctacagaaccagagtctccaaaaaatgaccgtgaggggcctcagtgagaccagattgtgtcatttggctccaccttcatcttgcagagccagctgatctcagattgccaagaaactagaagccacttgcacggtgtggccagagcctcagctggatgagaggctgagatgggtggccagcttgtacaccagtccctgaactgagctgtttacaggactggggaggctccacccagaaggctttcatttgtactctgctgggagtgactgggaaaaactccttccctgctgctgagtggagagaggcctcatccggctttgacccaccatccgttgcagaagcctccaggagcagcaatcctaagagtgggaggcagccaagacccccttccttcaaaacctcccggaagtggtttcaggccctctagttgccatgaccaatttgtgtgtgtgtttaatttttgcttcaagctctgtagcaggacctgccccacgcacacccctacccctctgtgaggagctgtgggaagtgtgggtttgtctccagaacagaagagaatgatggatattctggctctggggccctctccaccaccactcacagtagccttgctgaagccatcacagatgggagaaggccatgccagccacgtccgccgaggggcgccagcctgaagctgccaggccctgaggttcagaccctggaccccatagctggaggcctgtggtgccagaagcccagattagggtggctgtccatccctggatagctatttgcacgaatcatggacataaatccaagttgaagaagatcaa

SEQ ID NO: 191560 - DNA, 1716 bp, Homo sapiens
  Payload ID: 17837
  Gene Name: TNFAIP3 interacting protein 1
  Uniprot ID: Q15025
  ENST ID: ENST00000524280
  CDS Start-End: 1-1671
atggaagggagaggaccgtaccggatctacgaccctgggggcagcgtgccctcaggagaggcatccgcagcttttgagcgcctagtgaaggagaattcccggctgaaggaaaaaatgcaagggataaagatgttaggggagcttttggaagagtcccagatggaagcgaccaggctccggcagaaggcagaggagctagtgaaggacaacgagctgctcccaccaccttctccctccttgggctccttcgaccccctggctgagctcacaggaaaggactcaaatgtcacagcatctcccacagcccctgcatgccccagtgacaagccagcaccagtccagaagcctccatccagtggcacctcctctgaatttgaagtggtcactcctgaggagcagaattcaccagagagcagcagccatgccaatgcgatggcgctgggccccctgccccgtgaggacggcaacctgatgctgcacctgcagcgcctggagaccacgctgagtgtgtgtgccgaggagccggaccacggccagctcttcacccacctgggccgcatggccctggagttcaaccgactggcatccaaggtgcacaagaatgagcagcgcacctccattctgcagaccctgtgtgagcagcttcggaaggagaacgaggctctgaaggccaagttggataagggcctggaacagcgggatcaggctgccgagaggctgcgggaggaaaatttggagctcaagaagttgttgatgagcaatggcaacaaagagggtgcgtctgggcggccaggctcaccgaagatggaagggacaggcaagaaggcagtggctggacagcagcaggctagtgtgacggcaggtaaggtcccagaggtggtggccttgggcgcagccgagaagaaggtgaagatgctggagcagcagcgcagtgagctgctggaagtgaacaagcagtgggaccagcatttccggtccatgaagcagcagtatgagcagaagatcactgagctgcgtcagaagctggctgatttgcagaagcaggtgactgacctggaggccgagcgggagcagaagcagcgtgactttgaccgcaagctcctcctggccaagtccaagattgaaatggaggagaccgacaaggagcagctgacagcagaggccaaggagctgcgccaaaaggtcaagtacctgcaggatcagctgagcccactcacccgacagcgtgagtaccaggaaaaggagatccagcggctcaacaaggccctggaggaagcactgagcatccaaaccccgccatcatctccaccaacagcatttgggagcccagaaggagcaggggccctcctaaggaaacaggagctggtcacgcagaatgagttgctgaaacagcaggtgaagatcttcgaggaggacttccagagggagcgcagtgatcgtgagcgcatgaatgaggagaaggaagagctgaagaagcaagtggagaagctgcaggcccaggtcaccctgtcaaatgcccagctaaaagcattcaaagatgaggagaaggcaagagaagccctcagacagcagaagaggaaagcaaagagtctccaaaaaatgaccgtgaggggcctcagtgagaccagattgtgtcatttggctccaccttcatcttgcagagccagctgatctcagattgccaagaaactagaagccacttgcacggtgtggcca

SEQ ID NO: 191561 - DNA, 658 bp, Homo sapiens
  Payload ID: 17837
  Gene Name: TNFAIP3 interacting protein 1
  ENST ID: ENST00000520695
  CDS Start-End: 228-658
acttcctcgtcctcggcccgggtgccctgcccccgtccaggagccctaggagtgctacggggggccggagccttgcccgggccgctgccccgtccctggattcggggctggacgcagcaagcggggcgctgtgtccccaagctccccgtcctcgggaaaccgaggtacttggagcttgaggtcacacagctccaggcgggcaccacggcaggggctgagctaccctcatggaagggagaggaccgtaccggatctacgaccctgggggcagcgtgccctcaggagaggcatccgcagcttttgagcgcctagtgaaggagaattcccggctgaaggaaaaaatgcaagggataaagatgttaggggagcttttggaagagtcccagatggaagcgaccaggctccggcagaaggcagaggagctagtgaaggacaacgagctgctcccaccaccttctccctccttgggctccttcgaccccctggctgagctcacaggaaaggactcaaatgtcacagcatctcccacagcccctgcatgccccagtgacaagccagcaccagtccagaagcctccatccagtggcacctcctctgaatttgaagtggtcactcctgaggagcagaattcaccagagagcagcagccatgccaatgc

SEQ ID NO: 191562 - DNA, 562 bp, Homo sapiens
  Payload ID: 17837
  Gene Name: TNFAIP3 interacting protein 1
  ENST ID: ENST00000517504
  CDS Start-End: 1-441
gccaaggagctgcgccaaaaggtcaagtacctgcaggatcagctgagcccactcacccgacagcgtgagtaccaggaaaaggagatccagcggctcaacaaggccctggaggaagcactgagcatccaaaccccgccatcatctccaccaacagcatttgggagcccagaaggagcaggggccctcctaaggaaacaggagctggtcacgcagaatgagttgctgaaacagcaggtgaagatcttcgaggaggacttccagagggagcgcagtgatcgtgagcgcatgaatgaggagaaggaagagctgaagaagcaagtggagaagctgcaggcccaggtcaccctgtcaaatgcccagctaaaagcattcaaagatgaggagaaggccatgccagccacgtccgccgaggggcgccagcctgaagctgccaggccctgaggttcagaccctggaccccatagctggaggcctgtggtgccagaagcccagattagggtggctgtccatccctggatagctatttgcacgaatcatggacataaatccaagttgaagaaga

SEQ ID NO: 191563 - DNA, 2274 bp, Homo sapiens
  Payload ID: 17837
  Gene Name: TNFAIP3 interacting protein 1
  Uniprot ID: Q15025
  ENST ID: ENST00000521591
  CDS Start-End: 232-2142
gactttcccaggggtggggcggcccggccaggcccccggcacttcctcgtcctcggcccgggtgccctgcccccgtccaggagccctaggagtgctacggggggccggagccttgcccgggccgctgccccgtccctggattcggggctggacgcagcaagcggggcgctgtgtccccaagctccccgtcctcggccaggcgggcaccacggcaggggctgagctaccctcatggaagggagaggaccgtaccggatctacgaccctgggggcagcgtgccctcaggagaggcatccgcagcttttgagcgcctagtgaaggagaattcccggctgaaggaaaaaatgcaagggataaagatgttaggggagcttttggaagagtcccagatggaagcgaccaggctccggcagaaggcagaggagctagtgaaggacaacgagctgctcccaccaccttctccctccttgggctccttcgaccccctggctgagctcacaggaaaggactcaaatgtcacagcatctcccacagcccctgcatgccccagtgacaagccagcaccagtccagaagcctccatccagtggcacctcctctgaatttgaagtggtcactcctgaggagcagaattcaccagagagcagcagccatgccaatgcgatggcgctgggccccctgccccgtgaggacggcaacctgatgctgcacctgcagcgcctggagaccacgctgagtgtgtgtgccgaggagccggaccacggccagctcttcacccacctgggccgcatggccctggagttcaaccgactggcatccaaggtgcacaagaatgagcagcgcacctccattctgcagaccctgtgtgagcagcttcggaaggagaacgaggctctgaaggccaagttggataagggcctggaacagcgggatcaggctgccgagaggctgcgggaggaaaatttggagctcaagaagttgttgatgagcaatggcaacaaagagggtgcgtctgggcggccaggctcaccgaagatggaagggacaggcaagaaggcagtggctggacagcagcaggctagtgtgacggcaggtaaggtcccagaggtggtggccttgggcgcagccgagaagaaggtgaagatgctggagcagcagcgcagtgagctgctggaagtgaacaagcagtgggaccagcatttccggtccatgaagcagcagtatgagcagaagatcactgagctgcgtcagaagctggctgatttgcagaagcaggtgactgacctggaggccgagcgggagcagaagcagcgtgactttgaccgcaagctcctcctggccaagtccaagattgaaatggaggagaccgacaaggagcagctgacagcagaggccaaggagctgcgccaaaaggtcaagtacctgcaggatcagctgagcccactcacccgacagcgtgagtaccaggaaaaggagatccagcggctcaacaaggccctggaggaagcactgagcatccaaaccccgccatcatctccaccaacagcatttgggagcccagaaggagcaggggccctcctaaggaaacaggagctggtcacgcagaatgagttgctgaaacagcaggtgaagatcttcgaggaggacttccagagggagcgcagtgatcgtgagcgcatgaatgaggagaaggaagagctgaagaagcaagtggagaagctgcaggcccaggtcaccctgtcaaatgcccagctaaaagcattcaaagatgaggagaaggcaagagaagccctcagacagcagaagaggaaagcaaaggcctcaggagagcgttaccatgtggagccccacccagaacatctctgcggggcctacccctacgcctacccgcccatgccagccatggtgccacaccatggcttcgaggactggtcccagatccgctacccccctccccccatggccatggagcacccgcccccactccccaactcgcgcctcttccatctgccggaatacacctggcgtctaccctgtggaggggttcgaaatccaaatcagagctcccaagtgatggaccctcccacagccaggcctacagaaccagagtctccaaaaaatgaccgtgaggggcctcagtgagaccagattgtgtcatttggctccaccttcatcttgcagagccagctgatctcagattgccaagaaactagaagccacttgcacggtgtggccagagcctcagctggatgagaggctgagatgggtggccag

SEQ ID NO: 191564 - DNA, 2200 bp, Homo sapiens
  Payload ID: 17837
  Gene Name: TNFAIP3 interacting protein 1
  Uniprot ID: Q15025
  ENST ID: ENST00000518977
  CDS Start-End: 232-2139
gactttcccaggggtggggcggcccggccaggcccccggcacttcctcgtcctcggcccgggtgccctgcccccgtccaggagccctaggagtgctacggggggccggagccttgcccgggccgctgccccgtccctggattcggggctggacgcagcaagcggggcgctgtgtccccaagctccccgtcctcggccaggcgggcaccacggcaggggctgagctaccctcatggaagggagaggaccgtaccggatctacgaccctgggggcagcgtgccctcaggagaggcatccgcagcttttgagcgcctagtgaaggagaattcccggctgaaggaaaaaatgcaagggataaagatgttaggggagcttttggaagagtcccagatggaagcgaccaggctccggcagaaggcagaggagctagtgaaggacaacgagctgctcccaccaccttctccctccttgggctccttcgaccccctggctgagctcacaggaaaggactcaaatgtcacagcatctcccacagcccctgcatgccccagtgacaagccagcaccagtccagaagcctccatccagtggcacctcctctgaatttgaagtggtcactcctgaggagcagaattcaccagagagcagcagccatgccaatgcgatggcgctgggccccctgccccgtgaggacggcaacctgatgctgcacctgcagcgcctggagaccacgctgagtgtgtgtgccgaggagccggaccacggccagctcttcacccacctgggccgcatggccctggagttcaaccgactggcatccaaggtgcacaagaatgagcagcgcacctccattctgcagaccctgtgtgagcagcttcggaaggagaacgaggctctgaaggccaagttggataagggcctggaacagcgggatcaggctgccgagaggctgcgggaggaaaatttggagctcaagaagttgttgatgagcaatggcaacaaagagggtgcgtctgggcggccaggctcaccgaagatggaagggacaggcaagaaggcagtggctggacagcagcaggctagtgtgacggcaggtaaggtcccagaggtggtggccttgggcgcagccgagaagaaggtgaagatgctggagcagcagcgcagtgagctgctggaagtgaacaagcagtgggaccagcatttccggtccatgaagcagcagtatgagcagaagatcactgagctgcgtcagaagctggctgatttgcagaagcaggtgactgacctggaggccgagcgggagcagaagcagcgtgactttgaccgcaagctcctcctggccaagtccaagattgaaatggaggagaccgacaaggagcagctgacagcagaggccaaggagctgcgccaaaaggtcaagtacctgcaggatcagctgagcccactcacccgacagcgtgagtaccaggaaaaggagatccagcggctcaacaaggccctggaggaagcactgagcatccaaaccccgccatcatctccaccaacagcatttgggagcccagaaggagcaggggccctcctaaggaaacaggagctggtcacgcagaatgagttgctgaaacagcaggtgaagatcttcgaggaggacttccagagggagcgcagtgatcgtgagcgcatgaatgaggagaaggaagagctgaagaagcaagtggagaagctgcaggcccaggtcaccctgtcaaatgcccagctaaaagcattcaaagatgaggagaaggcaagagaagccctcagacagcagaagaggaaagcaaaggcctcaggagagcgttaccatgtggagccccacccagaacatctctgcggggcctacccctacgcctacccgcccatgccagccatggtgccacaccatggcttcgaggactggtcccagatccgctacccccctccccccatggccatggagcacccgcccccactccccaactcgcgcctcttccatctgccggaatacacctggcgtctaccctgtggaggggttcgaaatccaaatcagagctcccaagtgatggaccctcccacagccaggcctacagaaccagagccagctgatctcagattgccaagaaactagaagccacttgcacggtgtggccagagcctcagctggatgagaggctgagatgggtggccag

SEQ ID NO: 191565 - DNA, 1743 bp, Homo sapiens
  Payload ID: 17837
  Gene Name: TNFAIP3 interacting protein 1
  Uniprot ID: Q15025
  ENST ID: ENST00000523200
  CDS Start-End: 1-1719
atggaagggagaggaccgtaccggatctacgaccctgggggcagcgtgccctcaggagaggcatccgcagcttttgagcgcctagtgaaggagaattcccggctgaaggaaaaaatgcaagggataaagatgttaggggagcttttggaagagtcccagatggaagcgaccaggctccggcagaaggcagaggagctagtgaaggacaacgagctgctcccaccaccttctccctccttgggctccttcgaccccctggctgagctcacaggaaaggactcaaatgtcacagcatctcccacagcccctgcatgccccagtgacaagccagcaccagtccagaagcctccatccagtggcacctcctctgaatttgaagtggtcactcctgaggagcagaattcaccagagagcagcagccatgccaatgcgatggcgctgggccccctgccccgtgaggacggcaacctgatgctgcacctgcagcgcctggagaccacgctgagtgtgtgtgccgaggagccggaccacggccagctcttcacccacctgggccgcatggccctggagttcaaccgactggcatccaaggtgcacaagaatgagcagcgcacctccattctgcagaccctgtgtgagcagcttcggaaggagaacgaggctctgaaggccaagttggataagggcctggaacagcgggatcaggctgccgagaggctgcgggaggaaaatttggagctcaagaagttgttgatgagcaatggcaacaaagagggtgcgtctgggcggccaggctcaccgaagatggaagggacaggcaagaaggcagtggctggacagcagcaggctagtgtgacggcaggtaaggtcccagaggtggtggccttgggcgcagccgagaagaaggtgaagatgctggagcagcagcgcagtgagctgctggaagtgaacaagcagtgggaccagcatttccggtccatgaagcagcagtatgagcagaagatcactgagctgcgtcagaagctggctgatttgcagaagcaggtgactgacctggaggccgagcgggagcagaagcagcgtgactttgaccgcaagctcctcctggccaagtccaagattgaaatggaggagaccgacaaggagcagctgacagcagaggccaaggagctgcgccaaaaggtcaagtacctgcaggatcagctgagcccactcacccgacagcgtgagtaccaggaaaaggagatccagcggctcaacaaggccctggaggaagcactgagcatccaaaccccgccatcatctccaccaacagcatttgggagcccagaaggagcaggggccctcctaaggaaacaggagctggtcacgcagaatgagttgctgaaacagcaggtgaagatcttcgaggaggacttccagagggagcgcagtgatcgtgagcgcatgaatgaggagaaggaagagctgaagaagcaagtggagaagctgcaggcccaggtcaccctgtcaaatgcccagctaaaagcattcaaagatgaggagaaggcaagagaagccctcagacagcagaagaggaaagcaaagccggaatacacctggcgtctaccctgtggaggggttcgaaatccaaatcagagctcccaagtgatggaccctcccacagccaggcctacagaaccagagtctccaaaaaatgaccgtgaggggcctcagtgagaccagattgtgtcatttggctcc

SEQ ID NO: 191566 - DNA, 2726 bp, Homo sapiens
  Payload ID: 17837
  Gene Name: TNFAIP3 interacting protein 1
  Uniprot ID: Q15025
  ENST ID: ENST00000610535
  CDS Start-End: 242-1960
agtctccggggactttcccaggggtggggcggcccggccaggcccccggcacttcctcgtcctcggcccgggtgccctgcccccgtccaggagccctaggagtgctacggggggccggagccttgcccgggccgctgccccgtccctggattcggggctggacgcagcaagcggggcgctgtgtccccaagctccccgtcctcggccaggcgggcaccacggcaggggctgagctaccctcatggaagggagaggaccgtaccggatctacgaccctgggggcagcgtgccctcaggagaggcatccgcagcttttgagcgcctagtgaaggagaattcccggctgaaggaaaaaatgcaagggataaagatgttaggggagcttttggaagagtcccagatggaagcgaccaggctccggcagaaggcagaggagctagtgaaggacaacgagctgctcccaccaccttctccctccttgggctccttcgaccccctggctgagctcacaggaaaggactcaaatgtcacagcatctcccacagcccctgcatgccccagtgacaagccagcaccagtccagaagcctccatccagtggcacctcctctgaatttgaagtggtcactcctgaggagcagaattcaccagagagcagcagccatgccaatgcgatggcgctgggccccctgccccgtgaggacggcaacctgatgctgcacctgcagcgcctggagaccacgctgagtgtgtgtgccgaggagccggaccacggccagctcttcacccacctgggccgcatggccctggagttcaaccgactggcatccaaggtgcacaagaatgagcagcgcacctccattctgcagaccctgtgtgagcagcttcggaaggagaacgaggctctgaaggccaagttggataagggcctggaacagcgggatcaggctgccgagaggctgcgggaggaaaatttggagctcaagaagttgttgatgagcaatggcaacaaagagggtgcgtctgggcggccaggctcaccgaagatggaagggacaggcaagaaggcagtggctggacagcagcaggctagtgtgacggcaggtaaggtcccagaggtggtggccttgggcgcagccgagaagaaggtgaagatgctggagcagcagcgcagtgagctgctggaagtgaacaagcagtgggaccagcatttccggtccatgaagcagcagtatgagcagaagatcactgagctgcgtcagaagctggctgatttgcagaagcaggtgactgacctggaggccgagcgggagcagaagcagcgtgactttgaccgcaagctcctcctggccaagtccaagattgaaatggaggagaccgacaaggagcagctgacagcagaggccaaggagctgcgccaaaaggtcaagtacctgcaggatcagctgagcccactcacccgacagcgtgagtaccaggaaaaggagatccagcggctcaacaaggccctggaggaagcactgagcatccaaaccccgccatcatctccaccaacagcatttgggagcccagaaggagcaggggccctcctaaggaaacaggagctggtcacgcagaatgagttgctgaaacagcaggtgaagatcttcgaggaggacttccagagggagcgcagtgatcgtgagcgcatgaatgaggagaaggaagagctgaagaagcaagtggagaagctgcaggcccaggtcaccctgtcaaatgcccagctaaaagcattcaaagatgaggagaaggcaagagaagccctcagacagcagaagaggaaagcaaagccggaatacacctggcgtctaccctgtggaggggttcgaaatccaaatcagagctcccaagtgatggaccctcccacagccaggcctacagaaccagagtctccaaaaaatgaccgtgaggggcctcagtgagaccagattgtgtcatttggctccaccttcatcttgcagagccagctgatctcagattgccaagaaactagaagccacttgcacggtgtggccagagcctcagctggatgagaggctgagatgggtggccagcttgtacaccagtccctgaactgagctgtttacaggactggggaggctccacccagaaggctttcatttgtactctgctgggagtgactgggaaaaactccttccctgctgctgagtggagagaggcctcatccggctttgacccaccatccgttgcagaagcctccaggagcagcaatcctaagagtgggaggcagccaagacccccttccttcaaaacctcccggaagtggtttcaggccctctagttgccatgaccaatttgtgtgtgtgtttaatttttgcttcaagctctgtagcaggacctgccccacgcacacccctacccctctgtgaggagctgtgggaagtgtgggtttgtctccagaacagaagagaatgatggatattctggctctggggccctctccaccaccactcacagtagccttgctgaagccatcacagatgggagaaggccatgccagccacgtccgccgaggggcgccagcctgaagctgccaggccctgaggttcagaccctggaccccatagctggaggcctgtggtgccagaagcccagattagggtggctgtccatccctggatagctatttgcacgaatcatggacataaatccaagttgaagaagatc

SEQ ID NO: 191567 - DNA, 2629 bp, Homo sapiens
  Payload ID: 17837
  Gene Name: TNFAIP3 interacting protein 1
  Uniprot ID: Q15025
  ENST ID: ENST00000610874
  CDS Start-End: 242-1912
agtctccggggactttcccaggggtggggcggcccggccaggcccccggcacttcctcgtcctcggcccgggtgccctgcccccgtccaggagccctaggagtgctacggggggccggagccttgcccgggccgctgccccgtccctggattcggggctggacgcagcaagcggggcgctgtgtccccaagctccccgtcctcggccaggcgggcaccacggcaggggctgagctaccctcatggaagggagaggaccgtaccggatctacgaccctgggggcagcgtgccctcaggagaggcatccgcagcttttgagcgcctagtgaaggagaattcccggctgaaggaaaaaatgcaagggataaagatgttaggggagcttttggaagagtcccagatggaagcgaccaggctccggcagaaggcagaggagctagtgaaggacaacgagctgctcccaccaccttctccctccttgggctccttcgaccccctggctgagctcacaggaaaggactcaaatgtcacagcatctcccacagcccctgcatgccccagtgacaagccagcaccagtccagaagcctccatccagtggcacctcctctgaatttgaagtggtcactcctgaggagcagaattcaccagagagcagcagccatgccaatgcgatggcgctgggccccctgccccgtgaggacggcaacctgatgctgcacctgcagcgcctggagaccacgctgagtgtgtgtgccgaggagccggaccacggccagctcttcacccacctgggccgcatggccctggagttcaaccgactggcatccaaggtgcacaagaatgagcagcgcacctccattctgcagaccctgtgtgagcagcttcggaaggagaacgaggctctgaaggccaagttggataagggcctggaacagcgggatcaggctgccgagaggctgcgggaggaaaatttggagctcaagaagttgttgatgagcaatggcaacaaagagggtgcgtctgggcggccaggctcaccgaagatggaagggacaggcaagaaggcagtggctggacagcagcaggctagtgtgacggcaggtaaggtcccagaggtggtggccttgggcgcagccgagaagaaggtgaagatgctggagcagcagcgcagtgagctgctggaagtgaacaagcagtgggaccagcatttccggtccatgaagcagcagtatgagcagaagatcactgagctgcgtcagaagctggctgatttgcagaagcaggtgactgacctggaggccgagcgggagcagaagcagcgtgactttgaccgcaagctcctcctggccaagtccaagattgaaatggaggagaccgacaaggagcagctgacagcagaggccaaggagctgcgccaaaaggtcaagtacctgcaggatcagctgagcccactcacccgacagcgtgagtaccaggaaaaggagatccagcggctcaacaaggccctggaggaagcactgagcatccaaaccccgccatcatctccaccaacagcatttgggagcccagaaggagcaggggccctcctaaggaaacaggagctggtcacgcagaatgagttgctgaaacagcaggtgaagatcttcgaggaggacttccagagggagcgcagtgatcgtgagcgcatgaatgaggagaaggaagagctgaagaagcaagtggagaagctgcaggcccaggtcaccctgtcaaatgcccagctaaaagcattcaaagatgaggagaaggcaagagaagccctcagacagcagaagaggaaagcaaagagtctccaaaaaatgaccgtgaggggcctcagtgagaccagattgtgtcatttggctccaccttcatcttgcagagccagctgatctcagattgccaagaaactagaagccacttgcacggtgtggccagagcctcagctggatgagaggctgagatgggtggccagcttgtacaccagtccctgaactgagctgtttacaggactggggaggctccacccagaaggctttcatttgtactctgctgggagtgactgggaaaaactccttccctgctgctgagtggagagaggcctcatccggctttgacccaccatccgttgcagaagcctccaggagcagcaatcctaagagtgggaggcagccaagacccccttccttcaaaacctcccggaagtggtttcaggccctctagttgccatgaccaatttgtgtgtgtgtttaatttttgcttcaagctctgtagcaggacctgccccacgcacacccctacccctctgtgaggagctgtgggaagtgtgggtttgtctccagaacagaagagaatgatggatattctggctctggggccctctccaccaccactcacagtagccttgctgaagccatcacagatgggagaaggccatgccagccacgtccgccgaggggcgccagcctgaagctgccaggccctgaggttcagaccctggaccccatagctggaggcctgtggtgccagaagcccagattagggtggctgtccatccctggatagctatttgcacgaatcatggacataaatccaagttgaagaagatc

SEQ ID NO: 191568 - DNA, 1974 bp, Homo sapiens
  Payload ID: 17838
  Gene Name: TNFAIP3 interacting protein 2
  Uniprot ID: Q8NFZ5
  ENST ID: ENST00000315423
  CDS Start-End: 88-1377
ggaaagttccgggaagggcggcagccggcggggcccgggcgcggaagttgccggcggccgcgcggcctcccgggcgggcctacagccatgtcccgggacccggggtcgggcggctgggaggaggccccgcgcgcagctgccgcgctctgcaccctgtaccacgaggccggacagcggctgcgccgcctgcaggaccagctcgctgcccgcgacgccctcatcgctcgcctccgcgcccgcctggccgcgctggagggggacgccgcgccgtccctagtggacgcgctgctggagcaggttgcgcgcttccgggagcagctgcgaaggcaggagggcggcgccgccgaggcccagatgcgccaggaaattgagaggctgactgagcgactagaagaaaaagagagggagatgcagcagctgctgagccagccccaacacgagcgagagaaggaagtcgtcctgctacggaggagcatggcagaaggggagcgcgcccgggccgccagtgacgtcctgtgccgctccttggccaacgagacccatcagctgcggaggacgctgaccgccaccgcccacatgtgtcagcatctggccaagtgtctggatgaacgacagcatgcacaaaggaatgtgggggagagaagtcctgaccagtcggaacacacagatgggcacacctctgtccagagtgttattgagaagttgcaggaagaaaatcgactgttaaaacagaaggtgactcacgttgaagacctcaatgccaagtggcagcgctacaacgccagcagggacgaatacgtgagggggctccatgcgcagctcagggggctgcagatcccccacgagcccgagctgatgaggaaggagatctcccggctcaacagacagttggaagagaaaataaatgactgtgccgaagtgaagcaggagctggcggcctccaggacggcccgggatgctgcgttggagcgggtgcagatgctggaacagcagattctcgcttacaaggatgacttcatgtcagaaagggccgatcgggaacgggctcaaagtaggattcaagaactggaggaaaaggtcgcctctttgctgcaccaggtgtcctggagacaggattctcgagagccagacgccggccggattcacgctgggagcaaaactgccaagtatttggccgccgacgcattagagcttatggtgcctggtggctggaggcctgggactgggtcccagcagccagaaccccctgcagagggcgggcatcctggcgcggcccagagaggccagggggaccttcagtgccctcactgcctgcagtgcttcagtgacgagcaaggggaagagctcctcaggcatgtggctgagtgctgccagtgaccgagactcacccgtgcccttgcggcctcctggcccggtgcagctgccctcagggacagggtgggtgctctcagatgccatgggttgagctctactgagagccaaggcccctagaatagttgcggggcactctgatcgttcactttggtccctttggctatggaacaggctgggtcacagggaactgccagtgaggctggaggctggaggtggagatggggtcaggaacatctggcagagggaggtcccagtctgtgtctccatcaggcttaagccagagctatctggtgctggtgtgccagcccctcccccagcctgcctagaaaggggtggctgcctgagggagtcacttgtatggtccccagggtgggagccccatcctgttctatggaataaagcgtcgcctctctgcctcgaaccagtcaaatggagtattgcggctgcacgtcacactagggtggccacccccgccattgcgagccacatgtctgcactgagaaactgcatttcagtagcatttgtcatccagccggaagttaaagcacacttactttattcacctatttttataataaacgttcttgctgctgtgactgc

SEQ ID NO: 191569 - DNA, 1653 bp, Homo sapiens
  Payload ID: 17838
  Gene Name: TNFAIP3 interacting protein 2
  ENST ID: ENST00000503235
  CDS Start-End: 54-1094
ccgggcgcggaagttgccggcggccgcgcggcctcccgggcgggcctacagccatgtcccgggacccggggtcgggcggctgggaggaggccccgcgcgcagctgccgcgctctgcaccctgtaccacgaggccggacagcggctgcgccgcctgcaggaccagctcgctgcccgcgacgccctcatcgctcgcctccgcgcccgcctggccgcgctggagggggacgccgcgccgtccctagtggacgcgctgctggagcaggttgcgcgcttccgggagcagctgcgaaggcaggagggcggcgccgccgaggcccagatgcgccaggaaattgagaggctgactgagcgactagaagaaaaagagagggagatgcagcagctgctgagccagccccaacacgagcgagagaaggaagtcgtcctgctacggaggagcatggcagaaggggagcgcgcccgggccgccagtgacgtcctgtgccgctccttggccaacgagacccatcagctgcggaggacgctgaccgccaccgcccacatgtgtcagcatctggccaagtgtctggatgaacgacagcatgcacaaaggaatgtgggggagagaagtcctgaccagtcggaacacacagatgggcacacctctgtccagagtgttattgagaagttgcaggaagaaaatcgactgttaaaacagaaggtgactcacattctcgcttacaaggatgacttcatgtcagaaagggccgatcgggaacgggctcaaagtaggattcaagaactggaggaaaaggtcgcctctttgctgcaccaggtgtcctggagacaggattctcgagagccagacgccggccggattcacgctgggagcaaaactgccaagtatttggccgccgacgcattagagcttatggtgcctggtggctggaggcctgggactgggtcccagcagccagaaccccctgcagagggcgggcatcctggcgcggcccagagaggccagggggaccttcagtgccctcactgcctgcagtgcttcagtgacgagcaaggggaagagctcctcaggcatgtggctgagtgctgccagtgaccgagactcacccgtgcccttgcggcctcctggcccggtgcagctgccctcagggacagggtgggtgctctcagatgccatgggttgagctctactgagagccaaggcccctagaatagttgcggggcactctgatcgttcactttggtccctttggctatggaacaggctgggtcacagggaactgccagtgaggctggaggctggaggtggagatggggtcaggaacatctggcagagggaggtcccagtctgtgtctccatcaggcttaagccagagctatctggtgctggtgtgccagcccctcccccagcctgcctagaaaggggtggctgcctgagggagtcacttgtatggtccccagggtgggagccccatcctgttctatggaataaagcgtcgcctctctgcctcgaaccagtcaaatggagtattgcggctgcacgtcacactagggtggccacccccgccattgcgagccacatgtctgcactgagaaactgcatttcagtagcatttgtcatccagccggaagttaaagcacacttactttattca

SEQ ID NO: 191570 - DNA, 2006 bp, Homo sapiens
  Payload ID: 17838
  Gene Name: TNFAIP3 interacting protein 2
  Uniprot ID: Q8NFZ5
  ENST ID: ENST00000510267
  CDS Start-End: 429-1397
agttgccggcggccgcgcggcctcccgggcgggcctacagccatgtcccgggacccggggtcgggcggctgggaggaggccccgcgcgcagctgccgcgctctgcaccctgtaccacgaggccggacagcggctgcgccgcctgcaggaccagctcgctgcccgcgacgccctcatcgctcgcctccgcgcccgcctggccgcgctggagggggacgccgcgccgtccctagtggacgcgctgctggagcaggttgcgcgcttccgggagcagctgcgaaggcaggagggcggcgccgccgaggcccagatgcgccaggtacgagggcgggtaccagaggagctgcgggagcgagagtgcgtgtggcggccgccgggtcctgggaaattgagaggctgactgagcgactagaagaaaaagagagggagatgcagcagctgctgagccagccccaacacgagcgagagaaggaagtcgtcctgctacggaggagcatggcagaaggggagcgcgcccgggccgccagtgacgtcctgtgccgctccttggccaacgagacccatcagctgcggaggacgctgaccgccaccgcccacatgtgtcagcatctggccaagtgtctggatgaacgacagcatgcacaaaggaatgtgggggagagaagtcctgaccagtcggaacacacagatgggcacacctctgtccagagtgttattgagaagttgcaggaagaaaatcgactgttaaaacagaaggtgactcacgttgaagacctcaatgccaagtggcagcgctacaacgccagcagggacgaatacgtgagggggctccatgcgcagctcagggggctgcagatcccccacgagcccgagctgatgaggaaggagatctcccggctcaacagacagttggaagagaaaataaatgactgtgccgaagtgaagcaggagctggcggcctccaggacggcccgggatgctgcgttggagcgggtgcagatgctggaacagcagattctcgcttacaaggatgacttcatgtcagaaagggccgatcgggaacgggctcaaagtaggattcaagaactggaggaaaaggtcgcctctttgctgcaccaggtgtcctggagacaggattctcgagagccagacgccggccggattcacgctgggagcaaaactgccaagtatttggccgccgacgcattagagcttatggtgcctggtggctggaggcctgggactgggtcccagcagccagaaccccctgcagagggcgggcatcctggcgcggcccagagaggccagggggaccttcagtgccctcactgcctgcagtgcttcagtgacgagcaaggggaagagctcctcaggcatgtggctgagtgctgccagtgaccgagactcacccgtgcccttgcggcctcctggcccggtgcagctgccctcagggacagggtgggtgctctcagatgccatgggttgagctctactgagagccaaggcccctagaatagttgcggggcactctgatcgttcactttggtccctttggctatggaacaggctgggtcacagggaactgccagtgaggctggaggctggaggtggagatggggtcaggaacatctggcagagggaggtcccagtctgtgtctccatcaggcttaagccagagctatctggtgctggtgtgccagcccctcccccagcctgcctagaaaggggtggctgcctgagggagtcacttgtatggtccccagggtgggagccccatcctgttctatggaataaagcgtcgcctctctgcctcgaaccagtcaaatggagtattgcggctgcacgtcacactagggtggccacccccgccattgcgagccacatgtctgcactgagaaactgcatttcagtagcatttgtcatccagccggaagttaaagcacacttactttattcacctatttttataataaacgttcttgctgctgtgactgctctgagaatttg

SEQ ID NO: 191571 - DNA, 2416 bp, Homo sapiens
  Payload ID: 17839
  Gene Name: TNFAIP3 interacting protein 3
  Uniprot ID: Q96KP6
  ENST ID: ENST00000057513
  CDS Start-End: 216-1193
ttgcagtgcttataactttattctgtgtaattcctatccacagtcacttctgttcatttttaatgaaaacctattgctgttattttctattatgagttaacggtgatgtgtgttttttaaattttgtatacttgctctcaccctaaaatataccttaagagacttttcccctgtttttctttctgctttccaagactccaggaaaaacagcttccatggcacattttgtacagggcacatctagaatgattgccgcagaaagttctacggagcataaagagtgtgctgaaccatcaacaagaaagaacttgatgaattctcttgaacaaaagataaggtgtttggaaaaacaaagaaaagagctcctggaagttaaccagcaatgggatcagcaatttagaagtatgaaagagttatatgaaagaaaggtagcagagctgaagacgaaactggacgccgcggaaagattcctcagcacgcgggagaaggatccgcatcagaggcagagaaaggacgacaggcagagagaggacgacaggcagcgcgacctgacccgggaccggctgcagcgggaggagaaggaaaaggaacgcctaaatgaagaattacatgaattgaaagaagagaataaacttttaaagggaaaaaatactcttgcgaacaaggaaaaggaacattacgaatgtgaaataaaacgcctcaataaggctcttcaggatgccttgaatatcaagtgttcattttccgaggactgtttgaggaagtctcgagtggaattctgccatgaggagatgagaacagaaatggaagttctgaagcagcaggtgcaaatatacgaagaagacttcaaaaaggaacgatcggatcgagagagacttaatcaagagaaagaggagctacagcaaattaatgaaacttcccaatcccagttgaacaggctgaattcccagataaaagcttgtcagatggagaaagaaaaactagaaaagcaattaaaacagatgtattgcccaccctgtaactgcggcttggttttccacctgcaagatccatgggtaccaacaggccctggagctgtgcagaagcaacgggagcacccaccagactatcagtggtatgctcttgaccagcttccgccagatgtacaacacaaggcaaatggtttatcctcagtaaagaaagtccatccgtagaagtacacactaacagagagagacaacaggcaacgagggagcgtggctgaggaccctcttctttgtttatactgaggcttgtttctgccacaaaggcacatcatctaccctgttatttgtgcctggtcatgttttcctttggtatgaatacaggaaaaggcttctgacagctaagatcctgatcaaattggaggagccagttattatacaaccaaatacaacttccagtttccttgaaatgagacttggcagatggatgatgcacgactccctgaaaatctcttcagcatattgctgttggatgcacaaaaatgattctatgatttaggcaactcagtgtttgctgcagggatattgtatgttgatttaaagtgcatatgtgtgtgtgtgtgtgtgtgtgtgtgtgtgtgtgtgtgtttcctggggtaaaaatttctgcagttgtaaacgtttaacattgctcccattcttcttccacagggccttagttctttagctatttgactacatattgttgacctcagtgatcctaaacgtagaattgaagaggtgtatatacctcattaaattaaataagtggttcaatctgaataagatggttaattggaagctattccttagacagatcatttctttaagatgatgagaaattgtgcgcctgcatcacaagacttgattatgaaagataaagtcttgggctgggtgcagtggctcatgcctataatcccagcactttgggaggctgaggcaggtggattgctttgaggccaggagttctagaccagcctggccagcatggtgaaaccccatctctactataaatacaaaaattagccaggctcgtggcacacacctataaacccagctactcaggaggcttgaggcgggaggatcacttgagcccagggaggcagaggttgctgtaagttgagatcgccactgcactccagcctgggaaatagagtgagcaagactcagtgccccctacccacccactccacaccaccaaaaaaaaaaaaaaaaaaaaaaggaagacaaagtcctgatgggatgatgatggctatatggctatgctgtgtccatatatacttacagaaatatttcagacatatggatttatagttaaatctgtgtttttccttcccttggatttgattaattttaatgaaaaacttaattctgacttctcaagccaattaaaatgaaaatggaatttattgaaa

SEQ ID NO: 191572 - DNA, 712 bp, Homo sapiens
  Payload ID: 17839
  Gene Name: TNFAIP3 interacting protein 3
  ENST ID: ENST00000515036
  CDS Start-End: 1-261
tgtaactgcggcttggttttccacctgcaagatccatgggtaccaacaggccctggagctgtgcagaagcaacgggagcacccaccagactatcagtggtatgctcttgaccagcttccgccagatgtacaacacaaggcaaatgaatctgctatactttctactgcttgtttctatggtcttgtgaggccacccagaagcgggctgtataaactgagctataatcaaaatcccacttctattctcatcaagtatacataatcaaaagttagaaatgtctgctacatgtttaaagtctcatatgacacacacctgggactctaacttgttaatttccaaagatttgaatctatctaaaaatgctgaagatgagctatgtagtctaatttcaggccattcttgaaatttgatctcgtttgaagtcagagctgagatcacagaaatctagtttttaatacaaggagtctgttatggagtgtaaatagggagtcagggacaccacatgtagttttgcaggttgtgaactttacaagtctgaggggctcatcatggtactctatgtgaatggagcctgctgaagtacaatacgcaatctggacagctgtacacagcagcaatgggagtgacaaaggccatagattacaacagcatcatagaaaagaaatatgaaatgtgagaattccataataaaatatccaggtatttatcaaaa

SEQ ID NO: 191573 - DNA, 1575 bp, Homo sapiens
  Payload ID: 17839
  Gene Name: TNFAIP3 interacting protein 3
  Uniprot ID: Q96KP6
  ENST ID: ENST00000509841
  CDS Start-End: 80-1210
aagagtcttaaagacaggtctccgtattagaccttgtaatacgcttacctagatctgagaaggactttcaggatagaacatgattccatgtggatggctcatgaacaaaaatgagaaacacgacgataaactggtaatgttcaccaatcaatctgaagattctgaaagatgtgaaagcatggagctggacaaaaaaatccaggatctgattgagagaaatgcgtctcctcatccaaaacggttcaccccagaggccatgccaactcacagaaatctatgttctctgaagactccaggaaaaacagcttccatggcacattttgtacagggcacatctagaatgattgccgcagaaagttctacggagcataaagagtgtgctgaaccatcaacaagaaagaacttgatgaattctcttgaacaaaagataaggtgtttggaaaaacaaagaaaagagctcctggaagttaaccagcaatgggatcagcaatttagaagtatgaaagagttatatgaaagaaaggtagcagagctgaagacgaaactggacgccgcggaaagattcctcagcacgcgggagaaggatccgcatcagaggcagagaaaggacgacaggcagagagaggacgacaggcagcgcgacctgacccgggaccggctgcagcgggaggagaaggaaaaggaacgcctaaatgaagaattacatgaattgaaagaagagaataaacttttaaagggaaaaaatactcttgcgaacaaggaaaaggaacattacgaatgtgaaataaaacgcctcaataaggctcttcaggatgccttgaatatcaagtgttcattttccgaggactgtttgaggaagtctcgagtggaattctgccatgaggagatgagaacagaaatggaagttctgaagcagcaggtgcaaatatacgaagaagacttcaaaaaggaacgatcggatcgagagagacttaatcaagagaaagaggagctacagcaaattaatgaaacttcccaatcccagttgaacaggctgaattcccagataaaagcttgtcagatggagaaagaaaaactagaaaagcaattaaaacagatgtattgcccaccctgtaactgcggcttggttttccacctgcaagatccatgggtaccaacaggccctggagctgtgcagaagcaacgggagcacccagtttatcctcagtaaagaaagtccatccgtagaagtacacactaacagagagagacaacaggcaacgagggagcgtggctgaggaccctcttctttgtttatactgaggcttgtttctgccacaaaggcacatcatctaccctgttatttgtgcctggtcatgttttcctttggtatgaatacaggaaaaggcttctgacagctaagatcctgatcaaattggaggagccagttattatacaaccaaatacaacttccagtttccttgaaatgagacttggcagatggatgatgcacgactccctgaaaatctcttcagcatattgctgttggatgcacaaaaatgattctatgatttaggcaactcagtgtttgctgca

SEQ ID NO: 191574 - DNA, 1778 bp, Homo sapiens
  Payload ID: 17839
  Gene Name: TNFAIP3 interacting protein 3
  Uniprot ID: Q96KP6
  ENST ID: ENST00000507879
  CDS Start-End: 61-1170
gagaataaaaacatggcttttgatgaaaaatgcatttaacagattccatgtggatggctcatgaacaaaaatgagaaacacgacgataaactggtaatgttcaccaatcaatctgaagattctgaaagatgtgaaagcatggagctggacaaaaaaatccaggatctgattgagagaaatgcgtctcctcatccaaaacggttcaccccagaggccatgccaactcacagaaatctatgttctctgaagactccaggaaaaacagcttccatggcacattttgtacagggcacatctagaatgattgccgcagaaagttctacggagcataaagagtgtgctgaaccatcaacaagaaagaacttgatgaattctcttgaacaaaagataaggtgtttggaaaaacaaagaaaagagctcctggaagttaaccagcaatgggatcagcaatttagaagtatgaaagagttatatgaaagaaaggtagcagagctgaagacgaaactggacgccgcggaaagattcctcagcacgcgggagaaggatccgcatcagaggcagagaaaggacgacaggcagagagaggacgacaggcagcgcgacctgacccgggaccggctgcagcgggaggagaaggaaaaggaacgcctaaatgaagaattacatgaattgaaagaagagaataaacttttaaagggaaaaaatactcttgcgaacaaggaaaaggaacattacgaatgtgaaataaaacgcctcaataaggctcttcaggatgccttgaatatcaagtgttcattttccgaggactgtttgaggaagtctcgagtggaattctgccatgaggagatgagaacagaaatggaagttctgaagcagcaggtgcaaatatacgaagaagacttcaaaaaggaacgatcggatcgagagagacttaatcaagagaaagaggagctacagcaaattaatgaaacttcccaatcccagttgaacaggctgaattcccagataaaagcttgtcagatggagaaagaaaaactagaaaagcaattaaaacagatgtattgcccaccctgtaactgcggcttggttttccacctgcaagatccatgggtaccaacaggccctggagctgtgcagaagcaacgggagcacccagtttatcctcagtaaagaaagtccatccgtagaagtacacactaacagagagagacaacaggcaacgagggagcgtggctgaggaccctcttctttgtttatactgaggcttgtttctgccacaaaggcacatcatctaccctgttatttgtgcctggtcatgttttcctttggtatgaatacaggaaaaggcttctgacagctaagatcctgatcaaattggaggagccagttattatacaaccaaatacaacttccagtttccttgaaatgagacttggcagatggatgatgcacgactccctgaaaatctcttcagcatattgctgttggatgcacaaaaatgattctatgatttaggcaactcagtgtttgctgcagggatattgtatgttgatttaaagtgcatatgtgtgtgtgtgtgtgtgtgtgtgtgtgtgtgtgtgtgtttcctggggtaaaaatttctgcagttgtaaacgtttaacattgctcccattcttcttccacagggccttagttctttagctatttgactacatattgttgacctcagtgatcctaaacgtagaattgaagaggtgtatatacctcattaaattaaataagtggttcaatctgaa

SEQ ID NO: 191575 - DNA, 1877 bp, Homo sapiens
  Payload ID: 17840
  Gene Name: TNFRSF1A-associated via death domain
  Uniprot ID: Q15628
  ENST ID: ENST00000345057
  CDS Start-End: 470-1408
agatacgttcggccgggcttgtacctgggacccatgggcaccccgttttgagtgcccactggtagcagcgatcttgaagccggatccccaggggtaccagaaaattctggtctccagggggcgcccccttgatttaccgaagtctggcagctgtagctcttacgagccccccgcctcgtaagaatcgcaaacccccaaagtcgggtcttcctgccgtctaaccttgggcgctggtgtcttacctgctcggcggaccagatgggctttgcccggggcaggggactggcagcagaggacagcggacgggaagcagccaccgggagcccgcggggcgggacgcgcgggcggacggggcggctcgggctagggcaccgccccagcgcctccgcgcacacccggaagcggcggagtagagcggagcctggcgggcgtgggaacccaggccccgccgaggcggccaggaggtgagatggcagctgggcaaaatgggcacgaagagtgggtgggcagcgcatacctgtttgtggagtcctcgctggacaaggtggtcctgtcggatgcctacgcgcacccccagcagaaggtggcagtgtacagggctctgcaggctgccttggcagagagcggcgggagcccggacgtgctgcagatgctgaagatccaccgcagcgacccgcagctgatcgtgcagctgcgattctgcgggcggcagccctgtggccgcttcctccgcgcctaccgcgagggggcgctgcgcgccgcgctgcagaggagcctggcggccgcgctcgcccagcactcggtgccgctgcaactggagctgcgcgccggcgccgagcggctggacgctttgctggcggacgaggagcgctgtttgagttgcatcctagcccagcagcccgaccggctccgggatgaagaactggctgagctggaggatgcgctgcgaaatctgaagtgcggctcgggggcccggggtggcgacggggaggtcgcttcggcccccttgcagcccccggtgccctctctgtcggaggtgaagccgccgccgccgccgccacctgcccagacttttctgttccagggtcagcctgtagtgaatcggccgctgagcctgaaggaccaacagacgttcgcgcgctctgtgggtctcaaatggcgcaaggtggggcgctcactgcagcgaggctgccgggcgctgcgggacccggcgctggactcgctggcctacgagtacgagcgcgagggactgtacgagcaggccttccagctgctgcggcgcttcgtgcaggccgagggccgccgcgccacgctgcagcgcctggtggaggcactcgaggagaacgagctcaccagcctggcagaggacttgctgggcctgaccgatcccaatggcggcctggcctagaccaggggtgcagccagcttttggagaacctggatggccttagggttccttctgcggctattgctgaacccctgtccatccacgggaccctgaaactccacttggcctatctgctggacctgctggggcagagttgattgccttccccaggagccagaccactgggggtgcatcattggggattctgcctcaggtactttgatagagtgtggggtgggggggacctgctttggagatcagcctcaccttctcccatcccagaagcggggcttacagccagcccttacagtttcactcatgaagcaccttgatctttggtgtcctggacttcatcctgggtgctgcagatactgcagtgaagtaaaacaggaatcaatcttgcctgcccccagctcacactcagcgtgggaccccgaatgttaagcaatgataataaagtataacacggattttgatgtgagaaatacaa

SEQ ID NO: 191576 - DNA, 1833 bp, Homo sapiens
  Payload ID: 17840
  Gene Name: TNFRSF1A-associated via death domain
  Uniprot ID: Q15628
  ENST ID: ENST00000486556
  CDS Start-End: 625-1383
ctttctactaattgtggatgtctctctcctcttttcctctcttactgcagcactccttgctcaagacccctccccagtacctacccttccaggcccccctttcccatctcagggcagaggccacaggaggctgaagcgggttgggggatctgttcgtggcctcagagcggcgagagcccctcttcttcccgagcagtgggagtcgcgcttggtggaggccgaagacctgagacctctcgccctcctctgccctgctggccgcctacccagacggcttgtttgcccagggcacacgcccccttttctgtgcttcgaagtccctctcttttgccaaccctcatttggggcgtgagagcgggggttaggtggcacccactctgtcttagggtgctccctgtgacagatcctggtcttctttctgggttattgctgtttgtatcccaattttgcttcccagctgggtactctggggtaactgcaccctaggtcaggggatgggacgcggggcttcaccacgggcttcgcccctcctccggccgtttggagaacggccgagcttggggaccgcccggcgcctgaccgcccgcctccgcagagagcggcgggagcccggacgtgctgcagatgctgaagatccaccgcagcgacccgcagctgatcgtgcagctgcgattctgcgggcggcagccctgtggccgcttcctccgcgcctaccgcgagggggcgctgcgcgccgcgctgcagaggagcctggcggccgcgctcgcccagcactcggtgccgctgcaactggagctgcgcgccggcgccgagcggctggacgctttgctggcggacgaggagcgctgtttgagttgcatcctagcccagcagcccgaccggctccgggatgaagaactggctgagctggaggatgcgctgcgaaatctgaagtgcggctcgggggcccggggtggcgacggggaggtcgcttcggcccccttgcagcccccggtgccctctctgtcggaggtgaagccgccgccgccgccgccacctgcccagacttttctgttccagggtcagcctgtagtgaatcggccgctgagcctgaaggaccaacagacgttcgcgcgctctgtgggtctcaaatggcgcaaggtggggcgctcactgcagcgaggctgccgggcgctgcgggacccggcgctggactcgctggcctacgagtacgagcgcgagggactgtacgagcaggccttccagctgctgcggcgcttcgtgcaggccgagggccgccgcgccacgctgcagcgcctggtggaggcactcgaggagaacgagctcaccagcctggcagaggacttgctgggcctgaccgatcccaatggcggcctggcctagaccaggggtgcagccagcttttggagaacctggatggccttagggttccttctgcggctattgctgaacccctgtccatccacgggaccctgaaactccacttggcctatctgctggacctgctggggcagagttgattgccttccccaggagccagaccactgggggtgcatcattggggattctgcctcaggtactttgatagagtgtggggtgggggggacctgctttggagatcagcctcaccttctcccatcccagaagcggggcttacagccagcccttacagtttcactcatgaagcaccttgatctttggtgtcctggacttcatcctgggtgctgcagatactgcagtgaagtaaaacaggaatcaatcttgcctgcccccagctcacactcagcgtgggaccccgaatgttaagcaatgataataaagtataacacggat

SEQ ID NO: 191577 - DNA, 1816 bp, Homo sapiens
  Payload ID: 17841
  Gene Name: TNFSF12-TNFSF13 readthrough
  ENST ID: ENST00000293826
  CDS Start-End: 56-1048
atccctcgggtcccgggatgggggggcggtgaggcaggcacagccccccgcccccatggccgcccgtcggagccagaggcggagggggcgccggggggagccgggcaccgccctgctggtcccgctcgcgctgggcctgggcctggcgctggcctgcctcggcctcctgctggccgtggtcagtttggggagccgggcatcgctgtccgcccaggagcctgcccaggaggagctggtggcagaggaggaccaggacccgtcggaactgaatccccagacagaagaaagccaggatcctgcgcctttcctgaaccgactagttcggcctcgcagaagtgcacctaaaggccggaaaacacgggctcgaagagcgatcgcagcccattatgaagttcatccacgacctggacaggacggagcgcaggcaggtgtggacgggacagtgagtggctgggaggaagccagaatcaacagctccagccctctgcgctacaaccgccagatcggggagtttatagtcacccgggctgggctctactacctgtactgtcagagttccgatgccctggaagcctgggagaatggggagagatcccggaaaaggagagcagtgctcacccaaaaacagaagaagcagcactctgtcctgcacctggttcccattaacgccacctccaaggatgactccgatgtgacagaggtgatgtggcaaccagctcttaggcgtgggagaggcctacaggcccaaggatatggtgtccgaatccaggatgctggagtttatctgctgtatagccaggtcctgtttcaagacgtgactttcaccatgggtcaggtggtgtctcgagaaggccaaggaaggcaggagactctattccgatgtataagaagtatgccctcccacccggaccgggcctacaacagctgctatagcgcaggtgtcttccatttacaccaaggggatattctgagtgtcataattccccgggcaagggcgaaacttaacctctctccacatggaaccttcctggggtttgtgaaactgtgattgtgttataaaaagtggctcccagcttggaagaccagggtgggtacatactggagacagccaagagctgagtatataaaggagagggaatgtgcaggaacagaggcgtcttcctgggtttggctccccgttcctcacttttcccttttcattcccaccccctagactttgattttacggatatcttgcttctgttccccatggagctccgaattcttgcgtgtgtgtagatgaggggcgggggacgggcgccaggcattgtccagacctggtcggggcccactggaagcatccagaacagcaccaccatctagcggccgctcgagggaagcacccgccggttggccgaagtccacgaagccgccctctgctagggaaaacccctggttctccatgccacacctctctccaggtgccctctgcctcttcaccccacaagaagccttatcctacgtccttctctccatctatcggaccccagtttccatcactatctccagagatgtagctattatgcgcccgtctacagggggtgcccgacgatgacggtgccttcgcagtcaaattactcttcgggtcccaaggtttggctttcacgcgctccattgccccggcgtggcaggccattccaagcccttccgggctggaactggtgtcggaggagcctcgggtgtatcgtacgccctggtgttggtgttgcctcactcctctgagctcttctttctgatcaagccctgcttaaagttaaataaaatagaatgaatgata

SEQ ID NO: 191578 - DNA, 3001 bp, Homo sapiens
  Payload ID: 17842
  Gene Name: TNNI3 interacting kinase
  Uniprot ID: Q59H18
  ENST ID: ENST00000326637
  CDS Start-End: 52-2559
aatcttataacttgaagaactgccctggagaaaggaagaaacttataataaatgggaaattataaatctagaccaacccaaacttgtactgatgaatggaagaaaaaagtcagtgaatcatatgttatcacaatagaaagattagaagatgacctgcagatcaaggaaaaagaactgacagaactaaggaatatatttggctctgatgaagccttcagtaaagtcaatttaaattaccgcactgaaaatgggctgtctctacttcatttatgttgcatttgtggaggcaagaaatcacatattcgaactcttatgttgaaagggctccgcccatctcgactgacaagaaatggatttacagccttgcatttagcagtttacaaggataatgcagaattgatcacttctctgcttcacagtggagctgatatacagcaggttggatacggtggcctcactgccctccatattgctacaatagctggccacctagaggctgctgatgtgctgttgcaacatggagctaatgtcaatattcaagatgcagtttttttcactccattgcatattgcagcgtactatggacatgaacaggtaactcgccttcttttgaaatttggtgctgatgtaaatgtaagtggtgaagttggagatagacccctccacctagcatctgcaaaaggattcttgaatattgcaaaactcttgatggaagaaggcagcaaagcagatgtgaatgctcaagataatgaagaccatgtcccactccatttctgttctcgatttggacaccatgatatagttaagtatctgctgcaaagtgatttggaagttcaacctcatgttgttaatatctatggagatacccccttacacctggcatgctacaatggcaaatttgaagttgccaaggaaatcatccaaatatcaggaacagaaagtctgactaaggaaaacatcttcagtgaaacagcttttcatagtgcttgtacctatggcaagagcattgacctagtcaaatttcttcttgatcagaatgtcataaacatcaaccaccaaggaagggatgggcacactggattacactctgcttgctaccacggtcacattcgcctggttcagttcttactggataatggagctgatatgaatctagtggcttgtgatcccagcaggtctagtggtgaaaaagatgagcagacatgtttgatgtgggcttatgaaaaagggcatgatgccattgtcacactcctgaagcattataagagaccacaagatgaattgccctgtaatgaatattctcagcctggaggagatggctcctatgtgtctgttccatcacccttggggaagattaaaagcatgacaaaagagaaggcagatattctcctcctaagagctggattgccttcacatttccatcttcagctctcagaaattgagttccatgagattattggctcaggttcttttgggaaagtatataaaggacgatgcagaaataaaatagtggctataaaacgttatcgagccaatacctactgctccaagtcagatgtggatatgttttgccgagaggtgtccattctctgccagctcaatcatccctgcgtaattcagtttgtgggtgcttgcttgaatgatcccagccagtttgccattgtcactcaatacatatcagggggttctctgttctccctccttcatgagcagaagaggattcttgatttgcagtctaaattaattattgcagtagatgttgccaaaggcatggagtaccttcacaacctgacacagccaattatacatcgtgacttgaacagtcacaatattcttctctatgaggatgggcatgctgtggtggcagattttggagaatcaagatttctacagtctctggatgaagacaacatgacaaaacaacctgggaacctccgttggatggctcctgaggtgttcacgcagtgcactcggtacaccatcaaagcagatgtcttcagctatgctctgtgtctgtgggaaattctcactggcgaaattccattcgctcatctcaagccagcggctgcggcagcagacatggcttaccaccacatcagacctcccattggctattccattcccaagcccatatcatctctgctgatacgagggtggaacgcatgtcctgaaggaagacccgaattttctgaagttgtcatgaagttagaagagtgtctctgcaacattgagctgatgtctcctgcatcaagtaacagcagtgggtctctctcaccttcttcttcttctgattgcctggtgaaccggggaggacctggccggagtcatgtggcagcattaagaagtcgtttcgaattggaatatgctctaaatgcaaggtcctatgctgctttgtcccaaagtgctggacaatattcctctcaaggtctgtctttggaggagatgaaaagaagtcttcaatacacacccattgacaaatatggctatgtatccgatcccatgagctcaatgcattttcattcttgccgaaatagtagcagctttgaggacagcagctgacagcattcggcgtatacctaaggagagttttttccccgaactgacagcaacgattccaaccacggcaagctggcttccaactataacattttactctcaaaggtctccttaaattgggcttgtttttacttgtcctatttaattccccactattagcaggctttggatttgtgcctaaggaataatatgcaaaagaaccaagacagaatgtatatgaagaattgtttttaattttgtaaattaaaaaaaaatttagatcgttacttggaaatggagcctaagtctgtggtggacagataataattatgttttcctgggctgaattatgtagacttgtgtttgacagctatgggtttatttcttagaacattgttcattttcttttctcattatgttacttctagtgttcacctctgtgattaaagattctttggtgaaatag

SEQ ID NO: 191579 - DNA, 696 bp, Homo sapiens
  Payload ID: 17842
  Gene Name: TNNI3 interacting kinase
  ENST ID: ENST00000526236
  CDS Start-End: 1-452
cacatttccatcttcagctctcagaaattgagttccatgagattattggctcaggttcttttgggaaagtatataaaggacgatgcagaaataaaatagtggctataaaacgttatcgagccaatacctactgctccaagtcagatgtggatatgttttgccgagaggtgtccattctctgccagctcaatcatccctgcgtaattcagtttgtgggtgcttgcttgaatgatcccagccagtttgccattgtcactcaatacatatcagggggttctctgttctccctccttcatgagcagaagaggattcttgatttgcagtctaaattaattattgcagtagatgttgccaaaggcatggagtaccttcacaacctgacacagccaattatacatcgtgacttgaacagatgctgtacaggatggctcagctgctaccacccagactgataaactgggtcatctggtctcctggccccaggagactgactcagcatcaagaggacaactttgacaccctatgatatcatctccaacccaaccaatcagcagtccccactttcagacccctacccaccaagttttccttaaaacccccatcctcaagtttttgagaagactgatttgagtaataataacactcttctctcctgtacagctggctgtgcgtgaattaaacttttctctattgcaa

SEQ ID NO: 191580 - DNA, 510 bp, Homo sapiens
  Payload ID: 17842
  Gene Name: TNNI3 interacting kinase
  ENST ID: ENST00000525480
  CDS Start-End: 1-341
gatgcagaaataaaatagtggctataaaacgttatcgagccaatacctactgctccaagtcagatgtggatatgttttgccgagaggtgtccattctctgccagctcaatcatccctgcgtaattcagtttgtgggtgcttgcttgaatgatcccagccagtttgccattgtcactcaatacatatcagggggttctctgttctccctccttcatgagcagaagaggattcttgatttgcagtctaaattaattattgcagtagatgttgccaaaggcatggagtaccttcacaacctgacacagccaattatacatcgtgacttgaacagggcttcctgaactatgtatgtgattgctagagctcaagcagccatctttgaacatgaggcagtgcatcagaaagagcagagcagcaagaaagaaggcatctcagttcctaacgaatgaagtcaccacatcagccatagaagcctgcctctaggactctgaaataaaaaagagaaataaa

SEQ ID NO: 191581 - DNA, 566 bp, Homo sapiens
  Payload ID: 17842
  Gene Name: TNNI3 interacting kinase
  ENST ID: ENST00000534020
  CDS Start-End: 1-566
gtatataaaggacgatgcagaaataaaatagtggctataaaacgttatcgagccaatacctactgctccaagtcagatgtggatatgttttgccgagaggtgtccattctctgccagctcaatcatccctgcgtaattcagtttgtgggtgcttgcttgaatgatcccagccagtttgccattgtcactcaatacatatcagggggttctctgttctccctccttcatgagcagaagaggattcttgatttgcagtctaaattaattattgcagtagatgttgccaaaggcatggagtaccttcacaacctgacacagccaattatacatcgtgacttgaacaggtctgccattacctctaggatctggatcacccatagtatttgcatctggaggggagctcattactttaacagggaagaatgcaatttcaggtgtatgcttacttctgccatcctaaaagaatcaagatttctacagtctctggatgaagacaacatgacaaaacaacctgggaacctccgttggatggctcctgaggtgttcacgcagtgcactcggtacac

SEQ ID NO: 191582 - DNA, 2338 bp, Homo sapiens
  Payload ID: 17843
  Gene Name: tocopherol (alpha) transfer protein
  Uniprot ID: P49638
  ENST ID: ENST00000260116
  CDS Start-End: 33-869
gggtagctgcggccgcagcagcggcggcgggcatggcagaggcgcgatcccagccctcggcggggccgcagctcaacgcgctaccggaccactctccgttgctgcagccgggcctggcggcgctgcggcgccgggcccgggaagctggcgtcccgctcgcgccgctgccgctcaccgactccttcctgctgcggttcctgcgcgcccgggatttcgatctggacctggcctggcggttactaaaaaactattataagtggagagcagaatgtccagaaataagtgcagatctacaccctagaagtattattggcctcctaaaggctggctaccatggagtcctgagatccagggatcccactggcagcaaagttcttatttacagaatcgcacactgggaccccaaagtttttacagcttatgacgtatttcgagtaagtctaatcacatccgagcttattgtacaggaggtagaaactcagcggaatggaatcaaggctatctttgatctggaaggttggcagttttctcatgcttttcaaatcactccatccgtagccaagaagattgctgctgtacttacggattcatttccattgaaagttcgtggcatccatttgataaatgaaccagtaattttccatgctgtcttttccatgatcaaaccattcctgactgaaaaaattaaggaacggattcacatgcatgggaacaactacaaacaaagcttgcttcagcatttcccagacattcttcctctggaatatggtggtgaagaattctccatggaggacatttgtcaggaatggacaaattttataatgaagtctgaagattatctcagcagcatttctgagagcattcaatgagaagttatgtcatgtgaatggcttcctaactaaaaatacatgagtgatatccaacctggttaaatgaatgaaagaaaaggagcaaatcttttaaactaatgcttgcctgaactttaaaaatgtagaaatcttctgacatgagcaacacaggtgtttggaaagattttttactttttaaatgcttttttctctacttttgaagtaattaaatgtcagtacattttaagagcataaaaatcggcgattttgtacttgaagagaacatgaaagttattgctaaagtagctgctcatgtgcatctttgtatgtttctagaaagttatattttaaacaagttctctgattaaattggtttagaaaaaaatttagaaatattccgcttaaaaatactagcacaagtcagctaatgataaaaaaattaacacttgttttaagtggatgtcagattaaattataattcattataattaaaatctgaatagagttttatggttattcctgtggaccagcaagacatttcatctcagggaaattttattttagtatattaacacgatagaaactttttttttttttttcagacagagtcttgctctgtcgcccaggctagagtgcagtagtgagatctcagctcactgcaacctctgctaggattacatgtgcacaccaccactcctggctaagttttgtattttatatagagatggggttttgccacgttggccaagctggtctcaaactcctgaactcaagtaatttgcctgcttcggcctcccagagtcctgggattacagtcgtgagccatcgcgcctggccgtgatagaaactttcagctgaggagtctatatgccatactactctatgtggcatctttaggtctctgtgaaatcatgttgatgtaattgattaacaaaaataatttagaaaatacgtcaggcacagttgatggcttctcaatatctgctttgcatttttaaacaaatcaagaatgtaattttaacttttgcttatggtcattcttatgactacacggaaagggatggaatcatacttacttgtcttatacatggactgtttttagttaacaataacgtaactacacaaaggaaaggaaatgtttacattttaaaaaattactgtcaattacatctggtatttttcagattatgcataaaataatatgagtttgactattgtatcagaatattttaatcaaatcctgcaatttatattaacttaaaaaaacatctggtaaagactgggtgtggcagctcacacctgtaatcccagcactttgggaggccgaggctggatggatgattgcttgagcgcaggagttctagaccagcctgggcaatacagggagaccctgtctctatttcaaaaataaataaataggccccggtgtgtgatgttccccttcctgtgtccatgtgttctcaaaaaaaattaaaaaataaaaataaaaa

SEQ ID NO: 191583 - DNA, 6212 bp, Homo sapiens
  Payload ID: 17844
  Gene Name: tocopherol (alpha) transfer protein-like
  Uniprot ID: Q9BTX7
  ENST ID: ENST00000262605
  CDS Start-End: 122-1150
gcgagaggccgggcaggccgggcagggagtgcgggtcggttctgcgtgcgctgccggacgaggctcccgccgccgattgacccgcgctccgcccgtagtcgggccgggaccttggtagctaatgtccgaagaaagtgactctctgagaaccagcccttctgtggcctcactctctgaaaatgagctgccaccaccacctgagcctccgggctatgtgtgctcactgacagaagacctggtcaccaaagcccgggaagagctgcaggaaaagccggaatggagacttcgagatgtgcaggcccttcgtgacatggtgcggaaggagtaccccaacctgagcacatccctcgacgatgccttcctgctgcgcttcctccgagcccgcaagtttgattacgaccgggccctgcagctcctcgtcaactaccacagctgtagaagaagctggcccgaagtcttcaataacttgaagccatcagccttaaaagatgtccttgcttccgggttcctcaccgtgctgccccacactgaccccaggggctgccatgtcgtctgcatccgcccagacagatggataccaagcaactatccaattactgaaaacatccgagccatatacttgaccttagaaaaactcattcagtctgaagaaacccaggtgaatggaattgtaattcttgcagactacaaaggagtgagtttatcaaaagcatctcactttggcccttttatagccaaaaaggtgattggcatcctccaggatggtttccccattcggataaaagcagtccatgtggtgaatgaacctcgaatatttaaaggcatttttgccatcataaaaccatttctaaaggagaaaatagcaaacagattcttcctccatgggtctgacttgaactctctccacacaaaccttccaagaagcatcctccccaaggagtatgggggcacggctggggagctggacactgccacctggaacgcggtactgctggcttcagaagacgattttgtgaaagagttctgccaacctgttcctgcctgtgacagcatcctgggccagacgctgctgcccgagggcctgacctcagatgcacagtgtgacgactccttgcgagctgtgaagtcacagctgtactcctgctactagcccgtcccccagggtcaccatctttaattcttttccttcttttctttggagaggcacaaggagaatttaagggtccatggattcagtcttgctccttgtaattaaactgcaggatggaggaacagcctgagatatgagcatgagcccattttggggtaagcctttggttactttaattactccatggaagacatggaaaatgtccccactgattcttaaacatttggaatcccagtctgcaactattaatctggaggctatatctattttgttttgctttttggttggggggtggtgatctggttcttacacatcttggaagcaagaacaatcaggaccaaagtcactttgatcccacttttccaggagaaaaaccacctgtttggccagtgagaactacttgtatgaaataatttggccaaaccttcagtgtgaccaaatgtgagactgggagtttgtgtttttcacaggaaccctaagtatagacctctgctgctcatcaggaaacttactggagatgaaggccccagctgttgtcaccgggtttggaaagcaccttaactgaatcatgtaagcatcaggacataagcagcactttgtggtcaaatgtggaagccggagacttcaaagcacctctgggacccactggttgaagtttgcaatagaaacttaagttttcccaaatccataaagccttagccctggttctcaatagaatcagggacctagcaggaaatgattttactcaacctaaaatgctggatcccaggcccgtgtagctataagaattctggcctggatcccaggtgtacaactatggacaagatatgggcctctactttctcctctataaaatgaggctggatgaaatgtcagctagggccattttggctgctgaggctctgggatttggtttagttactgaatgttagattttctgcctagaaagataactatctagatacaagtggttggatcctgtttttgtttgtggtacatgtgtctttccaagagagatgtgtcaccaattagccctgcctttaaagaaactattatgtgtattcctgggactcactgacaccaattttctttttatagtgatggttcaattttgaaaagatggcttttgtgaggccaggttaaggtgaccaggatcttgtatgatgaattccttccatccctgagactctggtactatattgtaaacctggctacagtagttaattacttgagattctttaattttggtctctgagctgggcgtggtggttcatgcctgtaatcccagcactttgggaggccaaggtgtgcggatcacaaggtcaggagttcgagacccgcctggccaagatggtgaaaccccatctctactaaaaatacaaaaattagctgggcgtggtggcgggctcctgtagtcccagctactcgggaggctgaggcagaagaatcacgtgaacccaggaggcagaagtggcagtgagccaagatcgcaccactgcactccagcctgggcgacagagcaagactctgcctcaaaaaaaaaaaaaaaaaaaaaaaatttttttttttttggtctctggaaatgaacacaagggcaggttattcctgggtcacttctgggcccccctgccctcccagccccacttgagtttctctctctggtgtgggtgaaccagtcagcctgaatgttctgcatttcagcactttagaacctccctgtgaagattttagccttagcccaaacatcaaattagacggttcacatgatggtttttgacctatttcctttctaatgtattccacatgatcatggtgttaaatagtgaaaagtactgtgttgtgtgtgcaccttctccgtgcatttattagactaaccagtcaagcagacagctcagttagggagaaaacaatactctgaaatttgaaggccaatctgttgttactaagctgtttatctctattgcctttttaaatgtctggataagttgttggtggaaattaagttacttaacctcattaataccaattctagagaaagttcttttcaccatggatagtaaccctggatcctctacggtactggctgagctggaagtgccaaaaagcactcctggctgcttctggttccatctgatgatgatgtgacacacactgctgaaaaggcccaagcagggcaagtgggatggctgaaggagggaaggagggggttcagaacccactggcctggatgggagaactgggtggaggcttccccaagagggaagacagataaacaaaacaaaacaaaaactgggtaaagaggaatgaatcactcagccctgatgtttcaattctacactgcattcctggccagtcgcatttgttttaatgcaggcatggccacagctctcctagagaattatctcaaagaccagaagggacctggagaggcctatttcttaggtttttccagttggacaaggaaggagtggtttcactcagcttctagaaggagttggagcctaagtttatctgcctccgggagctgcttgctttgttttggctccgaagaggtatcagatagttttgacacctcaggaaacttgaaccaagctgtgaaaccaagacctccctgcgtgaaaatcaaggtggtctccttgtggcttcaccaggatgtttgtgtcaggctgtctcagcagggtggggaatgaccagccagggagcacagtgagccttactcagcactggggagcgcactggtgaggcaaacccatgaacctcaagaactgggagtatgttccttcagggagaagttctggcccattgcacaaacacttggaaattaacttttccctaaattcaagatagtgtggtgtcggaaggaaatgggacagtaaattaggagacgcgggctccacctttaccttactacgtggcctttgatgagctggcttaacatccctgagtgattccatgatagagatctatactccaaactttattcctggtatctagttggcttcactgccacagacactgtactctctctttttagaagtttttttccttttttttccccctcaattggcttatttagtaaatttaggtctgaatgaattggtacctaaaagcttccaaatctatacatttcagaatatgggaattttcttcctcttcttcccccatatcccaacatggaattctggaaaactgtgcctcttcccctgttctgccttcatgggggagagactggatgaaatctacaaaaacagccaaaagtgccaccctggcttcatgtcttgaatttctaacttgctcttggcaaaggtcgctttattttttaatttttttccttgcattttcttttttattctattgctgctgcaaaaattaaggcaaaagtagctttcgatctttcatatttcatcctggtttcacaaggagtcacttatcttaggaggtctgtaagtcaggttacaaggccgggagcggtggctcacacctgtaatcccaacactttgagcggctgaggtgggtgtatcacctgaagtccggagtttgagaccagcctggccaacatggtgaaaccccgtctctactaaaaatacaaaaaattggctgggcatggtggtgggtgcctgtaatcccagctacttgggaagctgaagcaggagaatcacttaaacccaggtggcggaggttgcagtgagccgacatcgcgccattgcactccagcctgggtgacgagtgaaactccatctcaaaaataaaaattgaaaaatcaggttacaaaacaccatttttcccgaaataagacaataagaggcttttctctgaattcctttatattgagcctttcagaattctccctgggtgggcaatttctttaaatagtatttgaccctcagatcaatcctgggaatttttttcatttgggtagcaaaagctagagtattgctgtggcgattataatacttttaaaaagttttaccattttaaagttgccaacatttaattaaggttttcctttgaagcctcctttaatttagggagtaaaatgttagctaaaccaattatatactatatactatacactgtatctcctgtggccatgagaggtgtggctataccgaacagaaacatgcctactgttcaggaaagatgtcagttctggtaacacctctctgtattgggatctgttaattttgtaaatctaaattcttctgctcttggccaggtgcagtagttcatgccctgtaatcctagaactttgggaggctgaagggggggcggatcatttgaggtcaggagtttgagaccagcctggccaacatggtgaaaccccatctctactaaaaagtacaaaaattagctgggtgtggtggtgcgtgcctgtaatcccaactacttgggaggctgaggcaggagaatcgcttgaacctgggaggcagcggttgcagtaagccaagactatgccactgcactcccgcctgggtgacaaagcaatattctgtgtcaaataaataaattcattcttctgctctcctgacttagagaaatggtttgcttaaaatgctagtaacaaacatcacagtcaacaggagcttgcttcatgcgaaggatcaatgtgatttgtggatggagatgatagtgatgaaattcctgtttcatggggctgtttttcttttcatctcactgggcagcaggtttagtgaggcagtgagatgctgctgctgtggattcttgtagctatgcctcggcttcttggcatatcaggtaggaacctgttacaagtgaaatacttgaaacctctctgaccaagagcctctgatggagtgggaggtgagctaattctctgaccagcttggggcactgtttcagccactggtcacattccttgcttcaaactgaaattcagtttggctttgagtatagggatacatggtggattcatgtacttcagtgtttgttttgaccaaagtttatttttctagtgcattttctaagtcaaagtggtgaaaatatgtaataattttagtatgcatgactcagtctgaaacaataaaaatctctgaaaaatgtg

SEQ ID NO: 191584 - DNA, 6234 bp, Homo sapiens
  Payload ID: 17844
  Gene Name: tocopherol (alpha) transfer protein-like
  Uniprot ID: Q9BTX7
  ENST ID: ENST00000372904
  CDS Start-End: 144-1172
gagaggccgggcaggccgggcagggagtgcgggtcggttctgcgtgcgctgccggacgaggctcccgccgccgattgacccgcgctccgcccgtagtcgggccgttctgttccaagagataaccattgggaccttggtagctaatgtccgaagaaagtgactctctgagaaccagcccttctgtggcctcactctctgaaaatgagctgccaccaccacctgagcctccgggctatgtgtgctcactgacagaagacctggtcaccaaagcccgggaagagctgcaggaaaagccggaatggagacttcgagatgtgcaggcccttcgtgacatggtgcggaaggagtaccccaacctgagcacatccctcgacgatgccttcctgctgcgcttcctccgagcccgcaagtttgattacgaccgggccctgcagctcctcgtcaactaccacagctgtagaagaagctggcccgaagtcttcaataacttgaagccatcagccttaaaagatgtccttgcttccgggttcctcaccgtgctgccccacactgaccccaggggctgccatgtcgtctgcatccgcccagacagatggataccaagcaactatccaattactgaaaacatccgagccatatacttgaccttagaaaaactcattcagtctgaagaaacccaggtgaatggaattgtaattcttgcagactacaaaggagtgagtttatcaaaagcatctcactttggcccttttatagccaaaaaggtgattggcatcctccaggatggtttccccattcggataaaagcagtccatgtggtgaatgaacctcgaatatttaaaggcatttttgccatcataaaaccatttctaaaggagaaaatagcaaacagattcttcctccatgggtctgacttgaactctctccacacaaaccttccaagaagcatcctccccaaggagtatgggggcacggctggggagctggacactgccacctggaacgcggtactgctggcttcagaagacgattttgtgaaagagttctgccaacctgttcctgcctgtgacagcatcctgggccagacgctgctgcccgagggcctgacctcagatgcacagtgtgacgactccttgcgagctgtgaagtcacagctgtactcctgctactagcccgtcccccagggtcaccatctttaattcttttccttcttttctttggagaggcacaaggagaatttaagggtccatggattcagtcttgctccttgtaattaaactgcaggatggaggaacagcctgagatatgagcatgagcccattttggggtaagcctttggttactttaattactccatggaagacatggaaaatgtccccactgattcttaaacatttggaatcccagtctgcaactattaatctggaggctatatctattttgttttgctttttggttggggggtggtgatctggttcttacacatcttggaagcaagaacaatcaggaccaaagtcactttgatcccacttttccaggagaaaaaccacctgtttggccagtgagaactacttgtatgaaataatttggccaaaccttcagtgtgaccaaatgtgagactgggagtttgtgtttttcacaggaaccctaagtatagacctctgctgctcatcaggaaacttactggagatgaaggccccagctgttgtcaccgggtttggaaagcaccttaactgaatcatgtaagcatcaggacataagcagcactttgtggtcaaatgtggaagccggagacttcaaagcacctctgggacccactggttgaagtttgcaatagaaacttaagttttcccaaatccataaagccttagccctggttctcaatagaatcagggacctagcaggaaatgattttactcaacctaaaatgctggatcccaggcccgtgtagctataagaattctggcctggatcccaggtgtacaactatggacaagatatgggcctctactttctcctctataaaatgaggctggatgaaatgtcagctagggccattttggctgctgaggctctgggatttggtttagttactgaatgttagattttctgcctagaaagataactatctagatacaagtggttggatcctgtttttgtttgtggtacatgtgtctttccaagagagatgtgtcaccaattagccctgcctttaaagaaactattatgtgtattcctgggactcactgacaccaattttctttttatagtgatggttcaattttgaaaagatggcttttgtgaggccaggttaaggtgaccaggatcttgtatgatgaattccttccatccctgagactctggtactatattgtaaacctggctacagtagttaattacttgagattctttaattttggtctctgagctgggcgtggtggttcatgcctgtaatcccagcactttgggaggccaaggtgtgcggatcacaaggtcaggagttcgagacccgcctggccaagatggtgaaaccccatctctactaaaaatacaaaaattagctgggcgtggtggcgggctcctgtagtcccagctactcgggaggctgaggcagaagaatcacgtgaacccaggaggcagaagtggcagtgagccaagatcgcaccactgcactccagcctgggcgacagagcaagactctgcctcaaaaaaaaaaaaaaaaaaaaaaaatttttttttttttggtctctggaaatgaacacaagggcaggttattcctgggtcacttctgggcccccctgccctcccagccccacttgagtttctctctctggtgtgggtgaaccagtcagcctgaatgttctgcatttcagcactttagaacctccctgtgaagattttagccttagcccaaacatcaaattagacggttcacatgatggtttttgacctatttcctttctaatgtattccacatgatcatggtgttaaatagtgaaaagtactgtgttgtgtgtgcaccttctccgtgcatttattagactaaccagtcaagcagacagctcagttagggagaaaacaatactctgaaatttgaaggccaatctgttgttactaagctgtttatctctattgcctttttaaatgtctggataagttgttggtggaaattaagttacttaacctcattaataccaattctagagaaagttcttttcaccatggatagtaaccctggatcctctacggtactggctgagctggaagtgccaaaaagcactcctggctgcttctggttccatctgatgatgatgtgacacacactgctgaaaaggcccaagcagggcaagtgggatggctgaaggagggaaggagggggttcagaacccactggcctggatgggagaactgggtggaggcttccccaagagggaagacagataaacaaaacaaaacaaaaactgggtaaagaggaatgaatcactcagccctgatgtttcaattctacactgcattcctggccagtcgcatttgttttaatgcaggcatggccacagctctcctagagaattatctcaaagaccagaagggacctggagaggcctatttcttaggtttttccagttggacaaggaaggagtggtttcactcagcttctagaaggagttggagcctaagtttatctgcctccgggagctgcttgctttgttttggctccgaagaggtatcagatagttttgacacctcaggaaacttgaaccaagctgtgaaaccaagacctccctgcgtgaaaatcaaggtggtctccttgtggcttcaccaggatgtttgtgtcaggctgtctcagcagggtggggaatgaccagccagggagcacagtgagccttactcagcactggggagcgcactggtgaggcaaacccatgaacctcaagaactgggagtatgttccttcagggagaagttctggcccattgcacaaacacttggaaattaacttttccctaaattcaagatagtgtggtgtcggaaggaaatgggacagtaaattaggagacgcgggctccacctttaccttactacgtggcctttgatgagctggcttaacatccctgagtgattccatgatagagatctatactccaaactttattcctggtatctagttggcttcactgccacagacactgtactctctctttttagaagtttttttccttttttttccccctcaattggcttatttagtaaatttaggtctgaatgaattggtacctaaaagcttccaaatctatacatttcagaatatgggaattttcttcctcttcttcccccatatcccaacatggaattctggaaaactgtgcctcttcccctgttctgccttcatgggggagagactggatgaaatctacaaaaacagccaaaagtgccaccctggcttcatgtcttgaatttctaacttgctcttggcaaaggtcgctttattttttaatttttttccttgcattttcttttttattctattgctgctgcaaaaattaaggcaaaagtagctttcgatctttcatatttcatcctggtttcacaaggagtcacttatcttaggaggtctgtaagtcaggttacaaggccgggagcggtggctcacacctgtaatcccaacactttgagcggctgaggtgggtgtatcacctgaagtccggagtttgagaccagcctggccaacatggtgaaaccccgtctctactaaaaatacaaaaaattggctgggcatggtggtgggtgcctgtaatcccagctacttgggaagctgaagcaggagaatcacttaaacccaggtggcggaggttgcagtgagccgacatcgcgccattgcactccagcctgggtgacgagtgaaactccatctcaaaaataaaaattgaaaaatcaggttacaaaacaccatttttcccgaaataagacaataagaggcttttctctgaattcctttatattgagcctttcagaattctccctgggtgggcaatttctttaaatagtatttgaccctcagatcaatcctgggaatttttttcatttgggtagcaaaagctagagtattgctgtggcgattataatacttttaaaaagttttaccattttaaagttgccaacatttaattaaggttttcctttgaagcctcctttaatttagggagtaaaatgttagctaaaccaattatatactatatactatacactgtatctcctgtggccatgagaggtgtggctataccgaacagaaacatgcctactgttcaggaaagatgtcagttctggtaacacctctctgtattgggatctgttaattttgtaaatctaaattcttctgctcttggccaggtgcagtagttcatgccctgtaatcctagaactttgggaggctgaagggggggcggatcatttgaggtcaggagtttgagaccagcctggccaacatggtgaaaccccatctctactaaaaagtacaaaaattagctgggtgtggtggtgcgtgcctgtaatcccaactacttgggaggctgaggcaggagaatcgcttgaacctgggaggcagcggttgcagtaagccaagactatgccactgcactcccgcctgggtgacaaagcaatattctgtgtcaaataaataaattcattcttctgctctcctgacttagagaaatggtttgcttaaaatgctagtaacaaacatcacagtcaacaggagcttgcttcatgcgaaggatcaatgtgatttgtggatggagatgatagtgatgaaattcctgtttcatggggctgtttttcttttcatctcactgggcagcaggtttagtgaggcagtgagatgctgctgctgtggattcttgtagctatgcctcggcttcttggcatatcaggtaggaacctgttacaagtgaaatacttgaaacctctctgaccaagagcctctgatggagtgggaggtgagctaattctctgaccagcttggggcactgtttcagccactggtcacattccttgcttcaaactgaaattcagtttggctttgagtatagggatacatggtggattcatgtacttcagtgtttgttttgaccaaagtttatttttctagtgcattttctaagtcaaagtggtgaaaatatgtaataattttagtatgcatgactcagtctgaaacaataaaaatctctgaaaaatgtg

SEQ ID NO: 191585 - DNA, 1139 bp, Homo sapiens
  Payload ID: 17844
  Gene Name: tocopherol (alpha) transfer protein-like
  ENST ID: ENST00000372906
  CDS Start-End: 121-585
cgggcagggagtgcgggtcggttctgcgtgcgctgccggacgaggctcccgccgccgattgacccgcgctccgcccgtagtcgggccgggcttctctgttggcagggaccttggtagctaatgtccgaagaaagtgactctctgagaaccagcccttctgtggcctcactctctgaaaatgagctgccaccaccacctgagcctccgggctatgtgtgctcactgacagaagacctggtcaccaaagcccgggaagagctgcaggaaaagccggaatggagacttcgagatgtgcaggcccttcgtgacatggtgcggaaggagtaccccaacctgagcacatccctcgacgatgccttcctgctgcgcttcctccgagcccgcaagtttgattacgaccgggccctgcagctcctcgtcaactaccacagctgtagaagaagctggcccgaagtcttcaataacttgaagccatcagccttaaaagatgtccttgcttccgggttcctcaccgtgctgccccacactgaccccaggggctgccatgtcgtctgcatccgcccagttcttcctccatgggtctgacttgaactctctccacacaaaccttccaagaagcatcctccccaaggagtatgggggcacggctggggagctggacactgccacctggaacgcggtactgctggcttcagaagacgattttgtgaaagagttctgccaacctgttcctgcctgtgacagcatcctgggccagacgctgctgcccgagggcctgacctcagatgcacagtgtgacgactccttgcgagctgtgaagtcacagctgtactcctgctactagcccgtcccccagggtcaccatctttaattcttttccttcttttctttggagaggcacaaggagaatttaagggtccatggattcagtcttgctccttgtaattaaactgcaggatggaggaacagcctgagatatgagcatgagcccattttggggtaagcctttggttactttaattactccatggaagacatggaaaatgtccccactgattcttaaacatttggaatcccagtctgcaactattaatctggaggctatatctattttgttttgctttttggttggggggtgg

SEQ ID NO: 191586 - DNA, 926 bp, Homo sapiens
  Payload ID: 17844
  Gene Name: tocopherol (alpha) transfer protein-like
  ENST ID: ENST00000456317
  CDS Start-End: 88-926
gtcggttctgcgtgcgctgccggacgaggctcccgccgccgattgacccgcgctccgcccgtagtcgggccgggaccttggtagctaatgtccgaagaaagtgactctctgagaaccagcccttctgtggcctcactctctgaaaatgagctgccaccaccacctgagcctccgggctatgtgtgctcactgacagaagacctggtcaccaaagcccgggaagagctgcaggaaaagccggaatggagacttcgagatgtgcaggcccttcgtgacatggtgcggaaggagtaccccaacctgagcacatccctcgacgatgccttcctgctgcgcttcctccgagcccgcaagtttgattacgaccgggccctgcagctcctcgtcaactaccacagctgtagaagaagctggcccgaagtcttcaataacttgaagccatcagccttaaaagatgtccttgcttccgggttcctcaccgtgctgccccacactgaccccaggggctgccatgtcgtctgcatccgcccagacagatggataccaagcaactatccaattactgaaaacatccgagccatatacttgaccttagaaaaactcattcagtctgaagaaacccaggatggtttccccattcggataaaagcagtccatgtggtgaatgaacctcgaatatttaaaggcatttttgccatcataaaaccatttctaaaggagaaaatagcaaacagattcttcctccatgggtctgacttgaactctctccacacaaaccttccaagaagcatcctccccaaggagtatgggggcacggctggggagctggacactgccacctggaacgcggtactgctggcttcagaagacgattttgtgaaagagttctgccaacctgttcctgcctgtgacagcatcctgggcca

SEQ ID NO: 191587 - DNA, 2283 bp, Homo sapiens
  Payload ID: 17845
  Gene Name: toll interacting protein
  ENST ID: ENST00000263646
  CDS Start-End: 157-897
gcggtgccgggggcggggcgcggcggctgtcagctgactgtggcggcggcggcctcgaggtgacaactgtctccgtcgcaggctccggcgggggcgcaggaggtcgcccggcgcgtcactgtcgggtcggcgagccacgggggccgccgcagcaccatggcgaccaccgtccagctggacgcccaggcggcccagcagctgcagtacggaggcgcagtgggcaccgtgggccgactgaacatcacggtggtacaggcaaagttggccaagaattacggcatgacccgcatggacccctactgccgactgcgcctgggctacgcggtgtacgagacgcccacggcacacaatggcgccaagaatccccgctggaataaggtcatccactgcacggtgcccccaggcgtggactctttctatctcgagatcttcgatgagagagccttctccatggacgaccgcattgcctggacccacatcaccatcccggagtccctgaggcagggcaaggtggaggacaagtggtacagcctgagcgggaggcagggggacgacaaggagggcatgatcaacctcgtcatgtcctacgcgctgcttccagctgccatggtgatgccaccccagcccgtggtcctgatgccaacagtgtaccagcagggcgttggctatgtgcccatcacagggatgcccgctgtctgtagccccggcatggtgcccgtggccctgcccccggccgccgtgaacgcccagccccgctgtagcgaggaggacctgaaagccatccaggacatgttccccaacatggaccaggaggtgatccgctccgtgctggaagcccagcgagggaacaaggatgccgccatcaactccctgctgcagatgggggaggagccatagagcctctgcctcgatgccgttttgcccccgctctttggacacgccgacccggcgctccccaaggaatgctgtcccaacaagattcccgtgaaagagcacccgtgtcgccccctcccgtggacttctgtgccgccccgtccacacctgttcttgggtgcatgtgggttttcggttcctggcggtccaggacggggcgggggctcccctcccatctcgtgctgggaggtctcagcgcgctctcctgtccctgggacgtgcgtctctccttctcatgccgttctggaaaatgctcttgctgtagagagcagctgcttctgccagggtgttggaggtggtggagcgccttccgattccattcatggcattttgtgatgtgatgtaattggaatagagctgttgatttaaggcacacacaatccctcacactgtgggttttttttagaacttcccagacgaaaactcacgcccttgccctaacgcgctttgctgtgagcctggcccctgcccagggcttgggtctggtgagctgagcagcttcctgtggatggtgtggggccggcctctggcctggctcacctggccactgtccagccagccttgtgacagactccggcctgaaggcagaatgaacccacacctggagtgaggaagggggcctggcacggttggccaggctctgcctgattgccagccagcgggcatctgaagccgggtccttcgcccgccggaggctgccgtccgtctctcctgctgcgctcgtgccagctccgtgggtgtcctcccagggagcttctcttctcaacaggccttgcgaggctggggtgagaggtgatagaggcagcactgtgcatgattccgagagggtgtggtggcactgccagccgactgctgacagcttgggagctgctgtgcccaggacgtgggttcagcgtgggcgaggaaagcctggcgagcgtggccctgtaaaagctttctgaggcgggaggcgctcacttacctctgactgcctgggcgctgcgtgtagcatcttggcctacaggacagattttaggtgacacctggttatgacagtcagaaatttgagaagcttctcacaagtgatgcactttaaataatctgcatgccattgagacacctgcatgtctggtgtttgtggttcaagtgtcttgccgccggccttcggatgtaaacccactgataacggacagaaagagaatgcccacaagtgggtcttctgtggaagatgcagaaggaggaagttagtgcttacattttagtctttttctccctcaaaaaaataggttaagtttcagtgccagctagaaaatactgctttctgccatcgattgggggtggtttttgtcaaatatactgttgataaatatt

SEQ ID NO: 191588 - DNA, 3617 bp, Homo sapiens
  Payload ID: 17845
  Gene Name: toll interacting protein
  Uniprot ID: Q9H0E2
  ENST ID: ENST00000317204
  CDS Start-End: 125-949
gctgactgtggcggcggcggcctcgaggtgacaactgtctccgtcgcaggctccggcgggggcgcaggaggtcgcccggcgcgtcactgtcgggtcggcgagccacgggggccgccgcagcaccatggcgaccaccgtcagcactcagcgcgggccggtgtacatcggtgagctcccgcaggacttcctccgcatcacgcccacacagcagcagcggcaggtccagctggacgcccaggcggcccagcagctgcagtacggaggcgcagtgggcaccgtgggccgactgaacatcacggtggtacaggcaaagttggccaagaattacggcatgacccgcatggacccctactgccgactgcgcctgggctacgcggtgtacgagacgcccacggcacacaatggcgccaagaatccccgctggaataaggtcatccactgcacggtgcccccaggcgtggactctttctatctcgagatcttcgatgagagagccttctccatggacgaccgcattgcctggacccacatcaccatcccggagtccctgaggcagggcaaggtggaggacaagtggtacagcctgagcgggaggcagggggacgacaaggagggcatgatcaacctcgtcatgtcctacgcgctgcttccagctgccatggtgatgccaccccagcccgtggtcctgatgccaacagtgtaccagcagggcgttggctatgtgcccatcacagggatgcccgctgtctgtagccccggcatggtgcccgtggccctgcccccggccgccgtgaacgcccagccccgctgtagcgaggaggacctgaaagccatccaggacatgttccccaacatggaccaggaggtgatccgctccgtgctggaagcccagcgagggaacaaggatgccgccatcaactccctgctgcagatgggggaggagccatagagcctctgcctcgatgccgttttgcccccgctctttggacacgccgacccggcgctccccaaggaatgctgtcccaacaagattcccgtgaaagagcacccgtgtcgccccctcccgtggacttctgtgccgccccgtccacacctgttcttgggtgcatgtgggttttcggttcctggcggtccaggacggggcgggggctcccctcccatctcgtgctgggaggtctcagcgcgctctcctgtccctgggacgtgcgtctctccttctcatgccgttctggaaaatgctcttgctgtagagagcagctgcttctgccagggtgttggaggtggtggagcgccttccgattccattcatggcattttgtgatgtgatgtaattggaatagagctgttgatttaaggcacacacaatccctcacactgtgggttttttttagaacttcccagacgaaaactcacgcccttgccctaacgcgctttgctgtgagcctggcccctgcccagggcttgggtctggtgagctgagcagcttcctgtggatggtgtggggccggcctctggcctggctcacctggccactgtccagccagccttgtgacagactccggcctgaaggcagaatgaacccacacctggagtgaggaagggggcctggcacggttggccaggctctgcctgattgccagccagcgggcatctgaagccgggtccttcgcccgccggaggctgccgtccgtctctcctgctgcgctcgtgccagctccgtgggtgtcctcccagggagcttctcttctcaacaggccttgcgaggctggggtgagaggtgatagaggcagcactgtgcatgattccgagagggtgtggtggcactgccagccgactgctgacagcttgggagctgctgtgcccaggacgtgggttcagcgtgggcgaggaaagcctggcgagcgtggccctgtaaaagctttctgaggcgggaggcgctcacttacctctgactgcctgggcgctgcgtgtagcatcttggcctacaggacagattttaggtgacacctggttatgacagtcagaaatttgagaagcttctcacaagtgatgcactttaaataatctgcatgccattgagacacctgcatgtctggtgtttgtggttcaagtgtcttgccgccggccttcggatgtaaacccactgataacggacagaaagagaatgcccacaagtgggtcttctgtggaagatgcagaaggaggaagttagtgcttacattttagtctttttctccctcaaaaaaataggttaagtttcagtgccagctagaaaatactgctttctgccatcgattgggggtggtttttgtcaaatatactgttgataaatatttatttttgtaaacttgaagtgtgtggtggccgtgggggagggacatgctggcagcaggcgccttcttcagctgtgggtcctaaaggcctttgatcctttgaagaagaaagacatggtatttgttcagcagacgccgaccactcagacggaggggcccctgggattccctgtctcagatggcctggtcttacgcctgtgtagatttcttctccattgggaatgaaggtgtcaggcgggactggaacgttctagatggtatgttccgtgatattaacaactctaacccaggacagaccacaagccacactcagaggcctcactgtgctgggggcttcggtgtccaggcgcccaggtgtggccaccagcaccggtttctgccttcgcgttgctggggtgcagtgagactgccacacgcgtgcacatgtggctctgtgggtgtctcctagagaggacgtggcccctgctgccagcccttgagcagcccgtgtgggggcccgagggacccacacagtgggggccagcctcgctggagggagagcaaccctttgccgatgaccacgcttgccgccatctcttagttttctttttcacaagcgctttatttttttaatagacaaatcacattttgcaaggcctttaattaaataagattcttctttccttcattttatgctttatttcctgtttgaaggcttactgtagaagtggcttactgtagaagcagcttgctgagcccctccgagcggtccccagaattagctggttcacaacccccaccctcccccgcccccgcctgtgtcaggtgtggatgaggtcgtcacactcagaaggacaggcttgtctgccagctcacaaggggaggctgcagtgggtttgggagctgggtttaggcccctggtgtctgagggcccaggccttgccagcctctgctgctcctgctcctgggtttgaagatgcaggccgatcgccagctccgtggcagcggtcactaaggacagcctgactgtgccatcttggagcctcaggcggggctccggagatagaagacaggtcgccggaggctccccctcctctcctctcccctctgcagatgctccctgggcgctaccctgcagggtgccaggcaggagtggtctcagaacgtgcgcttctgattattttactggggtccattgtccagatttttctttgattgtaaaatatatttttactttttagtcttctaatttaataaatgatccatataaaaatagagaaataaagtcctttaagggaaggttta

SEQ ID NO: 191589 - DNA, 3429 bp, Homo sapiens
  Payload ID: 17845
  Gene Name: toll interacting protein
  ENST ID: ENST00000525159
  CDS Start-End: 122-763
gactgtggcggcggcggcctcgaggtgacaactgtctccgtcgcaggctccggcgggggcgcaggaggtcgcccggcgcgtcactgtcgggtcggcgagccacgggggccgccgcagcaccatggcgaccaccgtcagcactcagcgcgggccggtgtacatcggtgagctcccgcaggacttcctccgcatcacgcccacacagcagcagcggcaggtccagctggacgcccaggcggcccagcagctgcagtacggaggcgcagtgggcaccgtgggccgactgaacatcacggtggtacagagagccttctccatggacgaccgcattgcctggacccacatcaccatcccggagtccctgaggcagggcaaggtggaggacaagtggtacagcctgagcgggaggcagggggacgacaaggagggcatgatcaacctcgtcatgtcctacgcgctgcttccagctgccatggtgatgccaccccagcccgtggtcctgatgccaacagtgtaccagcagggcgttggctatgtgcccatcacagggatgcccgctgtctgtagccccggcatggtgcccgtggccctgcccccggccgccgtgaacgcccagccccgctgtagcgaggaggacctgaaagccatccaggacatgttccccaacatggaccaggaggtgatccgctccgtgctggaagcccagcgagggaacaaggatgccgccatcaactccctgctgcagatgggggaggagccatagagcctctgcctcgatgccgttttgcccccgctctttggacacgccgacccggcgctccccaaggaatgctgtcccaacaagattcccgtgaaagagcacccgtgtcgccccctcccgtggacttctgtgccgccccgtccacacctgttcttgggtgcatgtgggttttcggttcctggcggtccaggacggggcgggggctcccctcccatctcgtgctgggaggtctcagcgcgctctcctgtccctgggacgtgcgtctctccttctcatgccgttctggaaaatgctcttgctgtagagagcagctgcttctgccagggtgttggaggtggtggagcgccttccgattccattcatggcattttgtgatgtgatgtaattggaatagagctgttgatttaaggcacacacaatccctcacactgtgggttttttttagaacttcccagacgaaaactcacgcccttgccctaacgcgctttgctgtgagcctggcccctgcccagggcttgggtctggtgagctgagcagcttcctgtggatggtgtggggccggcctctggcctggctcacctggccactgtccagccagccttgtgacagactccggcctgaaggcagaatgaacccacacctggagtgaggaagggggcctggcacggttggccaggctctgcctgattgccagccagcgggcatctgaagccgggtccttcgcccgccggaggctgccgtccgtctctcctgctgcgctcgtgccagctccgtgggtgtcctcccagggagcttctcttctcaacaggccttgcgaggctggggtgagaggtgatagaggcagcactgtgcatgattccgagagggtgtggtggcactgccagccgactgctgacagcttgggagctgctgtgcccaggacgtgggttcagcgtgggcgaggaaagcctggcgagcgtggccctgtaaaagctttctgaggcgggaggcgctcacttacctctgactgcctgggcgctgcgtgtagcatcttggcctacaggacagattttaggtgacacctggttatgacagtcagaaatttgagaagcttctcacaagtgatgcactttaaataatctgcatgccattgagacacctgcatgtctggtgtttgtggttcaagtgtcttgccgccggccttcggatgtaaacccactgataacggacagaaagagaatgcccacaagtgggtcttctgtggaagatgcagaaggaggaagttagtgcttacattttagtctttttctccctcaaaaaaataggttaagtttcagtgccagctagaaaatactgctttctgccatcgattgggggtggtttttgtcaaatatactgttgataaatatttatttttgtaaacttgaagtgtgtggtggccgtgggggagggacatgctggcagcaggcgccttcttcagctgtgggtcctaaaggcctttgatcctttgaagaagaaagacatggtatttgttcagcagacgccgaccactcagacggaggggcccctgggattccctgtctcagatggcctggtcttacgcctgtgtagatttcttctccattgggaatgaaggtgtcaggcgggactggaacgttctagatggtatgttccgtgatattaacaactctaacccaggacagaccacaagccacactcagaggcctcactgtgctgggggcttcggtgtccaggcgcccaggtgtggccaccagcaccggtttctgccttcgcgttgctggggtgcagtgagactgccacacgcgtgcacatgtggctctgtgggtgtctcctagagaggacgtggcccctgctgccagcccttgagcagcccgtgtgggggcccgagggacccacacagtgggggccagcctcgctggagggagagcaaccctttgccgatgaccacgcttgccgccatctcttagttttctttttcacaagcgctttatttttttaatagacaaatcacattttgcaaggcctttaattaaataagattcttctttccttcattttatgctttatttcctgtttgaaggcttactgtagaagtggcttactgtagaagcagcttgctgagcccctccgagcggtccccagaattagctggttcacaacccccaccctcccccgcccccgcctgtgtcaggtgtggatgaggtcgtcacactcagaaggacaggcttgtctgccagctcacaaggggaggctgcagtgggtttgggagctgggtttaggcccctggtgtctgagggcccaggccttgccagcctctgctgctcctgctcctgggtttgaagatgcaggccgatcgccagctccgtggcagcggtcactaaggacagcctgactgtgccatcttggagcctcaggcggggctccggagatagaagacaggtcgccggaggctccccctcctctcctctcccctctgcagatgctccctgggcgctaccctgcagggtgccaggcaggagtggtctcagaacgtgcgcttctgattattttactggggtccattgtccagatttttctttgattgtaaaatatatttttactttttagtcttctaatttaataaatgatccatataaaaatagagaaataaagtcctttaagggaaggtt

SEQ ID NO: 191590 - DNA, 549 bp, Homo sapiens
  Payload ID: 17845
  Gene Name: toll interacting protein
  ENST ID: ENST00000527938
  CDS Start-End: 126-368
agctgactgtggcggcggcggcctcgaggtgacaactgtctccgtcgcaggctccggcgggggcgcaggaggtcgcccggcgcgtcactgtcgggtcggcgagccacgggggccgccgcagcaccatggcgaccaccgtcagcactcagcgcgggccggtgtacatcggtgagctcccgcaggacttcctccgcatcacgcccacacagcagcagcggcaggtccagctggacgcccaggcggcccagcagctgcagtacggaggcgcagtgggcaccgtgggccgactgaacatcacggtggtacagggatgcccgctgtctgtagccccggcatggtgcccgtggccctgcccccggccgccgtgaacgcccagccccgctgtagcgaggaggacctgaaagccatccaggacatgttccccaacatggaccaggaggtgatccgctccgtgctggaagcccagcgagggaacaaggatgccgccatcaactccctgctgcagatgggggaggagccatagagcctctgcctcgatgccgttttgcc

SEQ ID NO: 191591 - DNA, 3666 bp, Homo sapiens
  Payload ID: 17845
  Gene Name: toll interacting protein
  Uniprot ID: Q9H0E2
  ENST ID: ENST00000527886
  CDS Start-End: 382-999
acactggcgtgggagctgccttgccaagagcagttgcatgaaatgccacttatttgctcaagggttgtttattgaacatgccagtgccaggagactggcgtggagcatgaggccgaggctggctggagtgggttttggggagtgtcaggaggctggtgtggagcgtgaggccgaggctggctggagtgccaggggctgcagggtcaggtgtacatcggtgagctcccgcaggacttcctccgcatcacgcccacacagcagcagcggcaggtccagctggacgcccaggcggcccagcagctgcagtacggaggcgcagtgggcaccgtgggccgactgaacatcacggtggtacaggcaaagttggccaagaattacggcatgacccgcatggacccctactgccgactgcgcctgggctacgcggtgtacgagacgcccacggcacacaatggcgccaagaatccccgctggaataaggtcatccactgcacggtgcccccaggcgtggactctttctatctcgagatcttcgatgagagagccttctccatggacgaccgcattgcctggacccacatcaccatcccggagtccctgaggcagggcaaggtggaggacaagtggtacagcctgagcgggaggcagggggacgacaaggagggcatgatcaacctcgtcatgtcctacgcgctgcttccagctgccatggtgatgccaccccagcccgtggtcctgatgccaacagtgtaccagcagggcgttggctatgtgcccatcacagggatgcccgctgtctgtagccccggcatggtgcccgtggccctgcccccggccgccgtgaacgcccagccccgctgtagcgaggaggacctgaaagccatccaggacatgttccccaacatggaccaggaggtgatccgctccgtgctggaagcccagcgagggaacaaggatgccgccatcaactccctgctgcagatgggggaggagccatagagcctctgcctcgatgccgttttgcccccgctctttggacacgccgacccggcgctccccaaggaatgctgtcccaacaagattcccgtgaaagagcacccgtgtcgccccctcccgtggacttctgtgccgccccgtccacacctgttcttgggtgcatgtgggttttcggttcctggcggtccaggacggggcgggggctcccctcccatctcgtgctgggaggtctcagcgcgctctcctgtccctgggacgtgcgtctctccttctcatgccgttctggaaaatgctcttgctgtagagagcagctgcttctgccagggtgttggaggtggtggagcgccttccgattccattcatggcattttgtgatgtgatgtaattggaatagagctgttgatttaaggcacacacaatccctcacactgtgggttttttttagaacttcccagacgaaaactcacgcccttgccctaacgcgctttgctgtgagcctggcccctgcccagggcttgggtctggtgagctgagcagcttcctgtggatggtgtggggccggcctctggcctggctcacctggccactgtccagccagccttgtgacagactccggcctgaaggcagaatgaacccacacctggagtgaggaagggggcctggcacggttggccaggctctgcctgattgccagccagcgggcatctgaagccgggtccttcgcccgccggaggctgccgtccgtctctcctgctgcgctcgtgccagctccgtgggtgtcctcccagggagcttctcttctcaacaggccttgcgaggctggggtgagaggtgatagaggcagcactgtgcatgattccgagagggtgtggtggcactgccagccgactgctgacagcttgggagctgctgtgcccaggacgtgggttcagcgtgggcgaggaaagcctggcgagcgtggccctgtaaaagctttctgaggcgggaggcgctcacttacctctgactgcctgggcgctgcgtgtagcatcttggcctacaggacagattttaggtgacacctggttatgacagtcagaaatttgagaagcttctcacaagtgatgcactttaaataatctgcatgccattgagacacctgcatgtctggtgtttgtggttcaagtgtcttgccgccggccttcggatgtaaacccactgataacggacagaaagagaatgcccacaagtgggtcttctgtggaagatgcagaaggaggaagttagtgcttacattttagtctttttctccctcaaaaaaataggttaagtttcagtgccagctagaaaatactgctttctgccatcgattgggggtggtttttgtcaaatatactgttgataaatatttatttttgtaaacttgaagtgtgtggtggccgtgggggagggacatgctggcagcaggcgccttcttcagctgtgggtcctaaaggcctttgatcctttgaagaagaaagacatggtatttgttcagcagacgccgaccactcagacggaggggcccctgggattccctgtctcagatggcctggtcttacgcctgtgtagatttcttctccattgggaatgaaggtgtcaggcgggactggaacgttctagatggtatgttccgtgatattaacaactctaacccaggacagaccacaagccacactcagaggcctcactgtgctgggggcttcggtgtccaggcgcccaggtgtggccaccagcaccggtttctgccttcgcgttgctggggtgcagtgagactgccacacgcgtgcacatgtggctctgtgggtgtctcctagagaggacgtggcccctgctgccagcccttgagcagcccgtgtgggggcccgagggacccacacagtgggggccagcctcgctggagggagagcaaccctttgccgatgaccacgcttgccgccatctcttagttttctttttcacaagcgctttatttttttaatagacaaatcacattttgcaaggcctttaattaaataagattcttctttccttcattttatgctttatttcctgtttgaaggcttactgtagaagtggcttactgtagaagcagcttgctgagcccctccgagcggtccccagaattagctggttcacaacccccaccctcccccgcccccgcctgtgtcaggtgtggatgaggtcgtcacactcagaaggacaggcttgtctgccagctcacaaggggaggctgcagtgggtttgggagctgggtttaggcccctggtgtctgagggcccaggccttgccagcctctgctgctcctgctcctgggtttgaagatgcaggccgatcgccagctccgtggcagcggtcactaaggacagcctgactgtgccatcttggagcctcaggcggggctccggagatagaagacaggtcgccggaggctccccctcctctcctctcccctctgcagatgctccctgggcgctaccctgcagggtgccaggcaggagtggtctcagaacgtgcgcttctgattattttactggggtccattgtccagatttttctttgattgtaaaatatatttttactttttagtcttctaatttaataaatgatccatataaaaatagagaaataaagtcctttaagggaaggttt

SEQ ID NO: 191592 - DNA, 684 bp, Homo sapiens
  Payload ID: 17845
  Gene Name: toll interacting protein
  ENST ID: ENST00000530541
  CDS Start-End: 126-684
agctgactgtggcggcggcggcctcgaggtgacaactgtctccgtcgcaggctccggcgggggcgcaggaggtcgcccggcgcgtcactgtcgggtcggcgagccacgggggccgccgcagcaccatggcgaccaccgtcagcactcagcgcgggccggcaaagttggccaagaattacggcatgacccgcatggacccctactgccgactgcgcctgggctacgcggtgtacgagacgcccacggcacacaatggcgccaagaatccccgctggaataaggtcatccactgcacggtgcccccaggcgtggactctttctatctcgagatcttcgatgagagagccttctccatggacgaccgcattgcctggacccacatcaccatcccggagtccctgaggcagggcaaggtggaggacaagtggtacagcctgagcgggaggcagggggacgacaaggagggcatgatcaacctcgtcatgtcctacgcgctgcttccagctgccatggtgatgccaccccagcccgtggtcctgatgccaacagtgtaccagcagggcgttggctatgtgcccatcacagggatgcccgctgtctgtagccccggcatggtgcccgtggccctgcccccggccgccgtgaacgcccagccccgctgtagcgaggaggacctgaaagcca

SEQ ID NO: 191593 - DNA, 1297 bp, Homo sapiens
  Payload ID: 17845
  Gene Name: toll interacting protein
  ENST ID: ENST00000530506
  CDS Start-End: 86-625
tccgtcgcaggctccggcgggggcgcaggaggtcgcccggcgcgtcactgtcgggtcggcgagccacgggggccgccgcagcaccatggcgaccaccgtcagcactcagcgcgggccggcaaagttggccaagaattacggcatgacccgcatggacccctactgccgactgcgcctgggctacgcggtgtacgagacgcccacggcacacaatggcgccaagaatccccgctggaataaggtcatccactgcacggtgcccccaggcgtggactctttctatctcgagatcttcgatgagagagccttctccatggacgaccgcattgcctggacccacatcaccatcccggagtccctgaggcagggcaaggtggaggacaagtggtacagcctgagcgggaggcagggggacgacaaggagggcatgatcaacctcgtcatgtcctacgcgctgcttccagctgccatggtgatgccaccccagcccgtggtcctgatgccaacagtgtaccagcagggcgttggctatgtgcccatcacagacattgtaaattttggaacagccccgcacttcatagaaaagttcccaaggagatgcaggaacatctgccagagcctgtgaggactcgtccacctgacgccccaccggagcccccagcccccatgcccaggcatgcgtttccaataagcaggggcgtccctggcacagtacggccatctagatgaagctgacactgacgcgttggggctgtaccctgcttggagcccgtctgagtccgcagcatccaggccggggtcactggccctccatggccttgcctcccttggcctggaggggtccccatcttgctcctaggggatgcccgctgtctgtagccccggcatggtgcccgtggccctgcccccggccgccgtgaacgcccagccccgctgtagcgaggaggacctgaaagccatccaggacatgttccccaacatggaccaggaggtgatccgctccgtgctggaagcccagcgagggaacaaggatgccgccatcaactccctgctgcagatgggggaggagccatagagcctctgcctcgatgccgttttgcccccgctctttggacacgccgacccggcgctccccaaggaatgctgtcccaacaagattcccgtgaaagagcacccgtgtcgccccctcccgtggacttctgtgccgccccgtccacacctgttcttgggtgcatgtgggttttcggttcctggcggtccaggacggggcgggggctcccctcccatctcgtgctgg

SEQ ID NO: 191594 - DNA, 1264 bp, Homo sapiens
  Payload ID: 17846
  Gene Name: toll-interleukin 1 receptor (TIR) domain containing adaptor protein
  Uniprot ID: P58753
  ENST ID: ENST00000392678
  CDS Start-End: 430-1137
cgcgcagtccgcgcagccctcatcgcaactgggcccgcgcgcagatccaccaaagagaaagcagccctgtgccagttgctctgccagcctttcacaggagaagtgtcactagaatactacagcccccacaggctctgctccacagaaacttaaggctgaaagagtgtccgccatcagggacatcctctgtcactacggtgggaaaagaacatggccttacataggaagtccttctaaagagctgcctgccagctgcccttccccagatcccgaatatcctcctggccaggtggagcagagaacagttcctcagctggtcatgctgagctcataccctgatggctgctccatgaggtcaagactgggtctcctccctcctcccccttcaccaatgcctggtctcacggggctagttttgacccccacgctatggcatcatcgacctccctcccagctcctggctctcggcctaagaagcctctaggcaagatggctgactggttcaggcagaccctgctgaagaagcccaagaagaggcccaactccccagaaagcacctccagcgatgcttcacagcctacctcacaggacagcccactacccccaagcctcagctcagtcacgtctcccagcctgccacccacacatgcgagtgacagtggcagtagtcgctggagcaaagactatgacgtctgcgtgtgccacagtgaggaagacctggtggccgcccaggacctggtctcctacttggaaggcagcactgccagcctgcgctgcttcctgcaactccgggatgcaaccccaggcggcgctatagtgtccgagctgtgccaggcactgagcagtagtcactgccgggtgctgctcatcacgccgggcttccttcaggacccctggtgcaagtaccagatgctgcaggccctgaccgaggctccaggggccgagggctgcaccatccccctgctgtcgggcctcagcagagctgcctacccacctgagctccgattcatgtactacgtcgatggcaggggccctgatggtggctttcgtcaagtcaaagaagctgtcatgcgttgtaagctactacaggagggagaaggggaacgggattcagctacagtatctgatctactttgacttttaggagacagccctgtagcctagtagttcaaagcgcagcttctggaaaaggctgtcggggtttgtatcctggctcctgcacttattaacccataaaaagtaacttggccaagttactcacccg

SEQ ID NO: 191595 - DNA, 2195 bp, Homo sapiens
  Payload ID: 17846
  Gene Name: toll-interleukin 1 receptor (TIR) domain containing adaptor protein
  Uniprot ID: P58753
  ENST ID: ENST00000392679
  CDS Start-End: 284-949
gcgctgctcttccccgcggagcccgcgcagtccgcgcagccctcatcgcaactgggcccgcgcgcaggccttacataggaagtccttctaaagagctgcctgccagctgcccttccccagatcccgaatatcctcctggccaggtggagcagagaacagttcctcagctggtcatgctgagctcataccctgatggctgctccatgaggtcaagactgggtctcctccctcctcccccttcaccaatgcctggtctcacggggctagttttgacccccacgctatggcatcatcgacctccctcccagctcctggctctcggcctaagaagcctctaggcaagatggctgactggttcaggcagaccctgctgaagaagcccaagaagaggcccaactccccagaaagcacctccagcgatgcttcacagcctacctcacaggacagcccactacccccaagcctcagctcagtcacgtctcccagcctgccacccacacatgcgagtgacagtggcagtagtcgctggagcaaagactatgacgtctgcgtgtgccacagtgaggaagacctggtggccgcccaggacctggtctcctacttggaaggcagcactgccagcctgcgctgcttcctgcaactccgggatgcaaccccaggcggcgctatagtgtccgagctgtgccaggcactgagcagtagtcactgccgggtgctgctcatcacgccgggcttccttcaggacccctggtgcaagtaccagatgctgcaggccctgaccgaggctccaggggccgagggctgcaccatccccctgctgtcgggcctcagcagagctgcctacccacctgagctccgattcatgtactacgtcgatggcaggggccctgatggtggctttcgtcaagtcaaagaagctgtcatgcgttatctgcagacactcagttgacacttgttatatcatgggaccccggaaattggagtgaagctagaaacagaaaacccatgcagggcctcggattcccacaaatgtgacaagaggtatagggagtgagtcacagcgctttgctcgtgaccctgggatcagagcacccatcaggcttccattactgtgggctccctaagaagaccatggagagcttggggactcccccaggaaggccgtgaagctggggattccccctaggaaagccatgaggaagctggggactccccaagaaggccatgaggaagccagaaattggaggtggtaggaagtggtactgatcaatgatggccagcaggactcatctcctgcctaactggacaggaagcctggcacccacttctgtcttcccctggaactgggcactggcgtacactggtatccctcctaaagaagtgactcacctgactgatcagcaagaagcctagattgcaggcctcaccatggatggtcttcctagttgcctggggaaaccctggaatgggcatcaggagaaagcaacaagaatccagtccttcacactcacactactctgttcctcttcccagagacatcgattcacttcaaagagctgtagggaagatgcagtcagcactgcactgtattttttatttattgcctaggtgccattaaagacacaaacctagaagcctagaggccattctgaatatgggggtggggtggtggagggagcaagtgaagagatgggaatccagggctcagggttcaatgccttcacctgagatcacaagcccatggatgctgtgacatctgggagcttcatcagtggtctggctaaagctgatactttcacagtcaccatcttcacctttggactgggaagaatcaccatttttcttctggcagatgactgtattccttataggacaggcaaggtttcattcatctgttctcagtaagtttgttgttgaactgaaatgaatttcattatttcctccaatgtgtacttttgtgcccccctctcacttctccctatcatgacccctcttttgctgaaaaaaatttttattattttttctatctctagttctagaaagagaaaatttattttttaaattataaactattttgccaggcgccatggctcacacctgtaatctcagcactttgggaggccgaggcaggtggatcacctgaggtcaggagttcaagactagcctggccaatatggtgaaaccctgtctctact

SEQ ID NO: 191596 - DNA, 2068 bp, Homo sapiens
  Payload ID: 17846
  Gene Name: toll-interleukin 1 receptor (TIR) domain containing adaptor protein
  Uniprot ID: P58753
  ENST ID: ENST00000392680
  CDS Start-End: 406-1071
ccgcgcagccctcatcgcaactgggcccgcgcgcagatccaccaaagagaaagcagccctgtgccagttgctctgccagcctttcacaggagaagtgtcactagaatactacagcccccacaggctctgctccacagaaacttaaggctgaaagagtgtccgccatcagggacatcctctgtcactacggccttacataggaagtccttctaaagagctgcctgccagctgcccttccccagatcccgaatatcctcctggccaggtggagcagagaacagttcctcagctggtcatgctgagctcataccctgatggctgctccatgaggtcaagactgggtctcctccctcctcccccttcaccaatgcctggtctcacggggctagttttgacccccacgctatggcatcatcgacctccctcccagctcctggctctcggcctaagaagcctctaggcaagatggctgactggttcaggcagaccctgctgaagaagcccaagaagaggcccaactccccagaaagcacctccagcgatgcttcacagcctacctcacaggacagcccactacccccaagcctcagctcagtcacgtctcccagcctgccacccacacatgcgagtgacagtggcagtagtcgctggagcaaagactatgacgtctgcgtgtgccacagtgaggaagacctggtggccgcccaggacctggtctcctacttggaaggcagcactgccagcctgcgctgcttcctgcaactccgggatgcaaccccaggcggcgctatagtgtccgagctgtgccaggcactgagcagtagtcactgccgggtgctgctcatcacgccgggcttccttcaggacccctggtgcaagtaccagatgctgcaggccctgaccgaggctccaggggccgagggctgcaccatccccctgctgtcgggcctcagcagagctgcctacccacctgagctccgattcatgtactacgtcgatggcaggggccctgatggtggctttcgtcaagtcaaagaagctgtcatgcgttatctgcagacactcagttgacacttgttatatcatgggaccccggaaattggagtgaagctagaaacagaaaacccatgcagggcctcggattcccacaaatgtgacaagaggtatagggagtgagtcacagcgctttgctcgtgaccctgggatcagagcacccatcaggcttccattactgtgggctccctaagaagaccatggagagcttggggactcccccaggaaggccgtgaagctggggattccccctaggaaagccatgaggaagctggggactccccaagaaggccatgaggaagccagaaattggaggtggtaggaagtggtactgatcaatgatggccagcaggactcatctcctgcctaactggacaggaagcctggcacccacttctgtcttcccctggaactgggcactggcgtacactggtatccctcctaaagaagtgactcacctgactgatcagcaagaagcctagattgcaggcctcaccatggatggtcttcctagttgcctggggaaaccctggaatgggcatcaggagaaagcaacaagaatccagtccttcacactcacactactctgttcctcttcccagagacatcgattcacttcaaagagctgtagggaagatgcagtcagcactgcactgtattttttatttattgcctaggtgccattaaagacacaaacctagaagcctagaggccattctgaatatgggggtggggtggtggagggagcaagtgaagagatgggaatccagggctcagggttcaatgccttcacctgagatcacaagcccatggatgctgtgacatctgggagcttcatcagtggtctggctaaagctgatactttcacagtcaccatcttcacctttggactgggaagaatcaccatttttcttctggcagatgactgtattccttataggacaggcaaggtttcattcatctgttctcagtaagtttgttgttgaactgaaatgaatttcattatttcctccaa

SEQ ID NO: 191597 - DNA, 2245 bp, Homo sapiens
  Payload ID: 17846
  Gene Name: toll-interleukin 1 receptor (TIR) domain containing adaptor protein
  Uniprot ID: P58753
  ENST ID: ENST00000479770
  CDS Start-End: 40-705
aatgcctggtctcacggggctagttttgacccccacgctatggcatcatcgacctccctcccagctcctggctctcggcctaagaagcctctaggcaagatggctgactggttcaggcagaccctgctgaagaagcccaagaagaggcccaactccccagaaagcacctccagcgatgcttcacagcctacctcacaggacagcccactacccccaagcctcagctcagtcacgtctcccagcctgccacccacacatgcgagtgacagtggcagtagtcgctggagcaaagactatgacgtctgcgtgtgccacagtgaggaagacctggtggccgcccaggacctggtctcctacttggaaggcagcactgccagcctgcgctgcttcctgcaactccgggatgcaaccccaggcggcgctatagtgtccgagctgtgccaggcactgagcagtagtcactgccgggtgctgctcatcacgccgggcttccttcaggacccctggtgcaagtaccagatgctgcaggccctgaccgaggctccaggggccgagggctgcaccatccccctgctgtcgggcctcagcagagctgcctacccacctgagctccgattcatgtactacgtcgatggcaggggccctgatggtggctttcgtcaagtcaaagaagctgtcatgcgttatctgcagacactcagttgacacttgttatatcatgggaccccggaaattggagtgaagctagaaacagaaaacccatgcagggcctcggattcccacaaatgtgacaagaggtatagggagtgagtcacagcgctttgctcgtgaccctgggatcagagcacccatcaggcttccattactgtgggctccctaagaagaccatggagagcttggggactcccccaggaaggccgtgaagctggggattccccctaggaaagccatgaggaagctggggactccccaagaaggccatgaggaagccagaaattggaggtggtaggaagtggtactgatcaatgatggccagcaggactcatctcctgcctaactggacaggaagcctggcacccacttctgtcttcccctggaactgggcactggcgtacactggtatccctcctaaagaagtgactcacctgactgatcagcaagaagcctagattgcaggcctcaccatggatggtcttcctagttgcctggggaaaccctggaatgggcatcaggagaaagcaacaagaatccagtccttcacactcacactactctgttcctcttcccagagacatcgattcacttcaaagagctgtagggaagatgcagtcagcactgcactgtattttttatttattgcctaggtgccattaaagacacaaacctagaagcctagaggccattctgaatatgggggtggggtggtggagggagcaagtgaagagatgggaatccagggctcagggttcaatgccttcacctgagatcacaagcccatggatgctgtgacatctgggagcttcatcagtggtctggctaaagctgatactttcacagtcaccatcttcacctttggactgggaagaatcaccatttttcttctggcagatgactgtattccttataggacaggcaaggtttcattcatctgttctcatcttgctctgtcgcccaggctggagtgcagtggcgcaaccttggctcactgcaacctttgcctcccaggttcaagcgattctcctgcctcagcctcccaagtagctgggactacaggtgcgtgtcaccacacccagataattttttgtatttttagtagcgatagggtttcaccgtgttagccaggagggtctcgatctcctgacctcatgatccacccacctcgggctcccaaagtgctggaattacaggcatgagccactgcacccagcctttttttaattattatttgaagaatttaagattggaattaattgctccttgaatgtttggtagactcatctgtaataccatttgagcctagaatattctggtttttttgagacggagtcttgccctattgcccaggccggagtgcagtgggattacacgcgtgagccaccatgcctggccagaatattctttattgtaaaatttaaagctgtaatttcaatgtcttgaagagttatagatctaattagattttccatttctcctggagtcaatttggtacaaacagtcaataaagactacaagaccagtttaagta

SEQ ID NO: 191598 - DNA, 889 bp, Homo sapiens
  Payload ID: 17846
  Gene Name: toll-interleukin 1 receptor (TIR) domain containing adaptor protein
  ENST ID: ENST00000488598
  CDS Start-End: 467-616
agagcggggcctgcgcgctgctcttccccgcggagcccgcgcagtccgcgcagccctcatcgcaactgggcccgcgcgcagatccaccaaagagaaagcagccctgtgccagttgctctgccagcctttcacaggagaagtgtcactagaatactacagcccccacaggctctgctccacagaaacttaaggctgaaagagtgtccgccatcagggacatcctctgtcactacggtgggaaaagaacatggccttacataggaagtccttctaaagagctgcctgccagctgcccttccccagatcccgaatatcctcctggccaggtggagcagagaacagttcctcagctggtcatgctgagctcataccctgatggctgctccatgaggtcaagactgggtctcctccctcctcccccttcaccaatgcctggtctcacggggctagttttgacccccacgctatggcatcatcgacctccctcccagctcctggctctcggcctaagaagcctctaggcaagatggctgactggttcaggcagaccctgctgaagaagcccaagaagaggcccggctccctgacatacctgacactgcattatctcagttaactttcagcaactaagacaggtccacaagtccacagtcaaagccgtgtccctgactccagagtactggttcaggcagaccctgctgaagaagcccaagaagaggcccaactccccagaaagcacctccagcgatgcttcacagcctacctcacaggacagcccactacccccaagcctcagctcagtcacgtctcccagcctgccacccacacatgcgagtgacagtggcagtagtcgctggagcaaagactatgacgtctgcgtgtgccacag

SEQ ID NO: 191599 - DNA, 2849 bp, Homo sapiens
  Payload ID: 17847
  Gene Name: toll-like receptor 1
  Uniprot ID: Q15399
  ENST ID: ENST00000308979
  CDS Start-End: 275-2635
acagactgccaaatggaacagacaagcaggttgtcttgtgttaaagaaaatgagatataagtcagttactcccggaggcaatgctgctgttcagctcttctgtttttgtggccagggtcttcatgaacactaataggggtaccaggccctcttcctcgttagaagaaatcaggataacaaaggcatattgggcacccctacaaaaggaatctgtatctgtatcaagatgatctgaagaacagcttctacctttaggaatgtctagtgttccaaaatgactagcatcttccattttgccattatcttcatgttaatacttcagatcagaatacaattatctgaagaaagtgaatttttagttgataggtcaaaaaacggtctcatccacgttcctaaagacctatcccagaaaacaacaatcttaaatatatcgcaaaattatatatctgagctttggacttctgacatcttatcactgtcaaaactgaggattttgataatttctcataatagaatccagtatcttgatatcagtgttttcaaattcaaccaggaattggaatacttggatttgtcccacaacaagttggtgaagatttcttgccaccctactgtgaacctcaagcacttggacctgtcatttaatgcatttgatgccctgcctatatgcaaagagtttggcaatatgtctcaactaaaatttctggggttgagcaccacacacttagaaaaatctagtgtgctgccaattgctcatttgaatatcagcaaggtcttgctggtcttaggagagacttatggggaaaaagaagaccctgagggccttcaagactttaacactgagagtctgcacattgtgttccccacaaacaaagaattccattttattttggatgtgtcagtcaagactgtagcaaatctggaactatctaatatcaaatgtgtgctagaagataacaaatgttcttacttcctaagtattctggcgaaacttcaaacaaatccaaagttatcaaatcttaccttaaacaacattgaaacaacttggaattctttcattaggatcctccagctggtttggcatacaactgtatggtatttctcaatttcaaacgtgaagctacagggtcagctggacttcagagattttgattattctggcacttccttgaaggccttgtctatacaccaagttgtcagcgatgtgttcggttttccgcaaagttatatctatgaaatcttttcgaatatgaacatcaaaaatttcacagtgtctggtacacgcatggtccacatgctttgcccatccaaaattagcccgttcctgcatttggatttttccaataatctcttaacagacacggtttttgaaaattgtgggcaccttactgagttggagacacttattttacaaatgaatcaattaaaagaactttcaaaaatagctgaaatgactacacagatgaagtctctgcaacaattggatattagccagaattctgtaagctatgatgaaaagaaaggagactgttcttggactaaaagtttattaagtttaaatatgtcttcaaatatacttactgacactattttcagatgtttacctcccaggatcaaggtacttgatcttcacagcaataaaataaagagcattcctaaacaagtcgtaaaactggaagctttgcaagaactcaatgttgctttcaattctttaactgaccttcctggatgtggcagctttagcagcctttctgtattgatcattgatcacaattcagtttcccacccatcggctgatttcttccagagctgccagaagatgaggtcaataaaagcaggggacaatccattccaatgtacctgtgagctaggagaatttgtcaaaaatatagaccaagtatcaagtgaagtgttagagggctggcctgattcttataagtgtgactacccggaaagttatagaggaaccctactaaaggactttcacatgtctgaattatcctgcaacataactctgctgatcgtcaccatcgttgccaccatgctggtgttggctgtgactgtgacctccctctgcagctacttggatctgccctggtatctcaggatggtgtgccagtggacccagacccggcgcagggccaggaacatacccttagaagaactccaaagaaatctccagtttcatgcatttatttcatatagtgggcacgattctttctgggtgaagaatgaattattgccaaacctagagaaagaaggtatgcagatttgccttcatgagagaaactttgttcctggcaagagcattgtggaaaatatcatcacctgcattgagaagagttacaagtccatctttgttttgtctcccaactttgtccagagtgaatggtgccattatgaactctactttgcccatcacaatctctttcatgaaggatctaatagcttaatcctgatcttgctggaacccattccgcagtactccattcctagcagttatcacaagctcaaaagtctcatggccaggaggacttatttggaatggcccaaggaaaagagcaaacgtggccttttttgggctaacttaagggcagccattaatattaagctgacagagcaagcaaagaaatagattacacatcaagtgaaaaatattcctcctgttgatattgctgcttttggaagttccaacaatgactttattttgcatcagcatagatgtaaacacaattgtgagtgtatgatgtaggtaaaaatatataccttcgggtcgcagttcaccatttatatgtggtattaaaaattaatgaaatgatataactttgatttaaacagttctgacacat

SEQ ID NO: 191600 - DNA, 2779 bp, Homo sapiens
  Payload ID: 17847
  Gene Name: toll-like receptor 1
  Uniprot ID: Q15399
  ENST ID: ENST00000502213
  CDS Start-End: 231-2591
agaaaatgagatataagtcagttactcccggaggcaatgctgctgttcagctcttctgtttttgtggccagggtcttcatgaacactaataggggtaccaggccctcttcctcgttagaagaaatcaggataacaaaggcatattgggcacccctacaaaaggaatctgtatctgtatcaagatgatctgaagaacagcttctacctttaggaatgtctagtgttccaaaatgactagcatcttccattttgccattatcttcatgttaatacttcagatcagaatacaattatctgaagaaagtgaatttttagttgataggtcaaaaaacggtctcatccacgttcctaaagacctatcccagaaaacaacaatcttaaatatatcgcaaaattatatatctgagctttggacttctgacatcttatcactgtcaaaactgaggattttgataatttctcataatagaatccagtatcttgatatcagtgttttcaaattcaaccaggaattggaatacttggatttgtcccacaacaagttggtgaagatttcttgccaccctactgtgaacctcaagcacttggacctgtcatttaatgcatttgatgccctgcctatatgcaaagagtttggcaatatgtctcaactaaaatttctggggttgagcaccacacacttagaaaaatctagtgtgctgccaattgctcatttgaatatcagcaaggtcttgctggtcttaggagagacttatggggaaaaagaagaccctgagggccttcaagactttaacactgagagtctgcacattgtgttccccacaaacaaagaattccattttattttggatgtgtcagtcaagactgtagcaaatctggaactatctaatatcaaatgtgtgctagaagataacaaatgttcttacttcctaagtattctggcgaaacttcaaacaaatccaaagttatcaaatcttaccttaaacaacattgaaacaacttggaattctttcattaggatcctccagctggtttggcatacaactgtatggtatttctcaatttcaaacgtgaagctacagggtcagctggacttcagagattttgattattctggcacttccttgaaggccttgtctatacaccaagttgtcagcgatgtgttcggttttccgcaaagttatatctatgaaatcttttcgaatatgaacatcaaaaatttcacagtgtctggtacacgcatggtccacatgctttgcccatccaaaattagcccgttcctgcatttggatttttccaataatctcttaacagacacggtttttgaaaattgtgggcaccttactgagttggagacacttattttacaaatgaatcaattaaaagaactttcaaaaatagctgaaatgactacacagatgaagtctctgcaacaattggatattagccagaattctgtaagctatgatgaaaagaaaggagactgttcttggactaaaagtttattaagtttaaatatgtcttcaaatatacttactgacactattttcagatgtttacctcccaggatcaaggtacttgatcttcacagcaataaaataaagagcattcctaaacaagtcgtaaaactggaagctttgcaagaactcaatgttgctttcaattctttaactgaccttcctggatgtggcagctttagcagcctttctgtattgatcattgatcacaattcagtttcccacccatcggctgatttcttccagagctgccagaagatgaggtcaataaaagcaggggacaatccattccaatgtacctgtgagctaggagaatttgtcaaaaatatagaccaagtatcaagtgaagtgttagagggctggcctgattcttataagtgtgactacccggaaagttatagaggaaccctactaaaggactttcacatgtctgaattatcctgcaacataactctgctgatcgtcaccatcgttgccaccatgctggtgttggctgtgactgtgacctccctctgcagctacttggatctgccctggtatctcaggatggtgtgccagtggacccagacccggcgcagggccaggaacatacccttagaagaactccaaagaaatctccagtttcatgcatttatttcatatagtgggcacgattctttctgggtgaagaatgaattattgccaaacctagagaaagaaggtatgcagatttgccttcatgagagaaactttgttcctggcaagagcattgtggaaaatatcatcacctgcattgagaagagttacaagtccatctttgttttgtctcccaactttgtccagagtgaatggtgccattatgaactctactttgcccatcacaatctctttcatgaaggatctaatagcttaatcctgatcttgctggaacccattccgcagtactccattcctagcagttatcacaagctcaaaagtctcatggccaggaggacttatttggaatggcccaaggaaaagagcaaacgtggccttttttgggctaacttaagggcagccattaatattaagctgacagagcaagcaaagaaatagattacacatcaagtgaaaaatattcctcctgttgatattgctgcttttggaagttccaacaatgactttattttgcatcagcatagatgtaaacacaattgtgagtgtatgatgtaggtaaaaatatataccttcgggtcgcagttcaccatttatatgtggtattaaaaattaatgaaatgatataa

SEQ ID NO: 191601 - DNA, 648 bp, Homo sapiens
  Payload ID: 17847
  Gene Name: toll-like receptor 1
  ENST ID: ENST00000505940
  CDS Start-End: 166-648
gttttcaacaccaaatgtggttaacagtgaaataaattcaaggaagtgcttgaatttcttacagactgccaaatggaacagacaagcaggttgtcttgaatctgtatctgtatcaagatgatctgaagaacagcttctacctttaggaatgtctagtgttccaaaatgactagcatcttccattttgccattatcttcatgttaatacttcagatcagaatacaattatctgaagaaagtgaatttttagttgataggtcaaaaaacggtctcatccacgttcctaaagacctatcccagaaaacaacaatcttaaatatatcgcaaaattatatatctgagctttggacttctgacatcttatcactgtcaaaactgaggattttgataatttctcataatagaatccagtatcttgatatcagtgttttcaaattcaaccaggaattggaatacttggatttgtcccacaacaagttggtgaagatttcttgccaccctactgtgaacctcaagcacttggacctgtcatttaatgcatttgatgccctgcctatatgcaaagagtttggcaatatgtctcaactaaaatttctggggttgagcaccacacacttagaaaaatctagtgtgctgccaattgctcat

SEQ ID NO: 191602 - DNA, 578 bp, Homo sapiens
  Payload ID: 17847
  Gene Name: toll-like receptor 1
  ENST ID: ENST00000515861
  CDS Start-End: 308-578
aactatgtaatgtaattccagtggaattcggtaggtggcataaaacagcctttttgttttgttttgttttcaacaccaaatgtggttaacagtgaaataaattcaaggaagtgcttgaatttcttacagactgccaaatggaacagacaagcaggttgtcttgtgttaaagaaaatgagatataagtcagttactcccggaggcaatgctgctgttcagctcttctgtttttgtggccagaatctgtatctgtatcaagatgatctgaagaacagcttctacctttaggaatgtctagtgttccaaaatgactagcatcttccattttgccattatcttcatgttaatacttcagatcagaatacaattatctgaagaaagtgaatttttagttgataggtcaaaaaacggtctcatccacgttcctaaagacctatcccagaaaacaacaatcttaaatatatcgcaaaattatatatctgagctttggacttctgacatcttatcactgtcaaaactgaggattttgataatttctcataatagaatccagtatcttgatatcagtgttttcaaat

SEQ ID NO: 191603 - DNA, 555 bp, Homo sapiens
  Payload ID: 17847
  Gene Name: toll-like receptor 1
  ENST ID: ENST00000506146
  CDS Start-End: 410-555
aattgtatttccgttcatttacaagttattttctcttcttctgaaaaagagatcttgtggatggatgaaaaggcaagaggaaaaacaaagcagccgaaacacacccagacgcacacttctgccaagcatagccaccacgactgccaaatggaacagacaagcaggttgtcttgtgttaaagaaaatgagatataagtcagttactcccggaggcaatgctgctgttcagctcttctgtttttgtggccagggtcttcatgaacactaataggggtaccaggccctcttcctcgttagaagaaatcaggataacaaaggcatattgggcacccctacaaaaggaatctgtatctgtatcaagatgatctgaagaacagcttctacctttaggaatgtctagtgttccaaaatgactagcatcttccattttgccattatcttcatgttaatacttcagatcagaatacaattatctgaagaaagtgaatttttagttgataggtcaaaaaacggtctcatccacgttcctaaagacctatcccagaaaacaacaat

SEQ ID NO: 191604 - DNA, 605 bp, Homo sapiens
  Payload ID: 17847
  Gene Name: toll-like receptor 1
  ENST ID: ENST00000508364
  CDS Start-End: 535-605
atagctttatttgcccatttattgtgttgttattttgttgttgtcattactggaaaaggcaagagtagagctatcagaatgtcttccttgaacatgctgtcaacaaaccccaggatttttataaaccctatgtgaaaaacacgctaagaatctcttttcttcttagcatatttttcacttagggtttacaaaaatatgttttgaagaaagcttgaaaagatcagtggaaaaaaattcagcaccaaattttctctgaaaatcaacttgtcaaaaaagacgtgattaacatccatcctgtaaccagcacatgaatgatcttccctctttacgagtgtgcttcagcaaaactttaatctcgacccctccctctttccacttttaatagtggatggatgaaaaggcaagaggaaaaacaaagcagccgaaacacacccagacgcacacttctgccaagcatagccaccacgaatctgtatctgtatcaagatgatctgaagaacagcttctacctttaggaatgtctagtgttccaaaatgactagcatcttccattttgccattatcttcatgttaatacttcagatcagaatacaattatctgaaga

SEQ ID NO: 191605 - DNA, 3958 bp, Homo sapiens
  Payload ID: 17848
  Gene Name: toll-like receptor 10
  Uniprot ID: Q9BXR5
  ENST ID: ENST00000308973
  CDS Start-End: 607-3042
cgcacctgcagctctgctgagagagtgcaagccgtgggaattcagcagctgaatatcaagacctttgaattcaacaagaagttaagacatttatagttgtctaacaacagactgaagattgtggcttggtattcactggcaggtttcagacatttagatctttcttttaatgactaacaccatgcctatctgtggagaagctggcaacatgtcacacctggaaattgtttttcaacattaatactattatttggcagtaatccagattgcttttgccaccaacctgaagacatatagaggcagaaggacaggaataattctatttgtttcctgttttgaaacttccatctgtaaggctatcaaaaggagatgtgagagagggtattgagtctggcctgacaatgcagttcttaaaccaaaggtccattatgcttctcctctctgagaatcctgacttacctcaacaacggagacatggcacagtagccagcttggagacttctcagccaatgctctgagatcaagtcgaagacccaatatacagggttttgagctcatcttcatcattcatatgaggaaataagtggtaaaatccttggaaatacaatgagactcatcagaaacatttacatattttgtagtattgttatgacagcagagggtgatgctccagagctgccagaagaaagggaactgatgaccaactgctccaacatgtctctaagaaaggttcccgcagacttgaccccagccacaacgacactggatttatcctataacctcctttttcaactccagagttcagattttcattctgtctccaaactgagagttttgattctatgccataacagaattcaacagctggatctcaaaacctttgaattcaacaaggagttaagatatttagatttgtctaataacagactgaagagtgtaacttggtatttactggcaggtctcaggtatttagatctttcttttaatgactttgacaccatgcctatctgtgaggaagctggcaacatgtcacacctggaaatcctaggtttgagtggggcaaaaatacaaaaatcagatttccagaaaattgctcatctgcatctaaatactgtcttcttaggattcagaactcttcctcattatgaagaaggtagcctgcccatcttaaacacaacaaaactgcacattgttttaccaatggacacaaatttctgggttcttttgcgtgatggaatcaagacttcaaaaatattagaaatgacaaatatagatggcaaaagccaatttgtaagttatgaaatgcaacgaaatcttagtttagaaaatgctaagacatcggttctattgcttaataaagttgatttactctgggacgaccttttccttatcttacaatttgtttggcatacatcagtggaacactttcagatccgaaatgtgacttttggtggtaaggcttatcttgaccacaattcatttgactactcaaatactgtaatgagaactataaaattggagcatgtacatttcagagtgttttacattcaacaggataaaatctatttgcttttgaccaaaatggacatagaaaacctgacaatatcaaatgcacaaatgccacacatgcttttcccgaattatcctacgaaattccaatatttaaattttgccaataatatcttaacagacgagttgtttaaaagaactatccaactgcctcacttgaaaactctcattttgaatggcaataaactggagacactttctttagtaagttgctttgctaacaacacacccttggaacacttggatctgagtcaaaatctattacaacataaaaatgatgaaaattgctcatggccagaaactgtggtcaatatgaatctgtcatacaataaattgtctgattctgtcttcaggtgcttgcccaaaagtattcaaatacttgacctaaataataaccaaatccaaactgtacctaaagagactattcatctgatggccttacgagaactaaatattgcatttaattttctaactgatctccctggatgcagtcatttcagtagactttcagttctgaacattgaaatgaacttcattctcagcccatctctggattttgttcagagctgccaggaagttaaaactctaaatgcgggaagaaatccattccggtgtacctgtgaattaaaaaatttcattcagcttgaaacatattcagaggtcatgatggttggatggtcagattcatacacctgtgaataccctttaaacctaaggggaactaggttaaaagacgttcatctccacgaattatcttgcaacacagctctgttgattgtcaccattgtggttattatgctagttctggggttggctgtggccttctgctgtctccactttgatctgccctggtatctcaggatgctaggtcaatgcacacaaacatggcacagggttaggaaaacaacccaagaacaactcaagagaaatgtccgattccacgcatttatttcatacagtgaacatgattctctgtgggtgaagaatgaattgatccccaatctagagaaggaagatggttctatcttgatttgcctttatgaaagctactttgaccctggcaaaagcattagtgaaaatattgtaagcttcattgagaaaagctataagtccatctttgttttgtctcccaactttgtccagaatgagtggtgccattatgaattctactttgcccaccacaatctcttccatgaaaattctgatcatataattcttatcttactggaacccattccattctattgcattcccaccaggtatcataaactgaaagctctcctggaaaaaaaagcatacttggaatggcccaaggataggcgtaaatgtgggcttttctgggcaaaccttcgagctgctattaatgttaatgtattagccaccagagaaatgtatgaactgcagacattcacagagttaaatgaagagtctcgaggttctacaatctctctgatgagaacagattgtctataaaatcccacagtccttgggaagttggggaccacatacactgttgggatgtacattgatacaacctttatgatggcaatttgacaatatttattaaaataaaaaatggttattcccttcatatcagtttctagaaggatttctaagaatgtatcctatagaaacaccttcacaagtttataagggcttatggaaaaaggtgttcatcccaggattgtttataatcatgaaaaatgtggccaggtgcagtggctcactcttgtaatcccagcactatgggaggccaaggtgggtgacccacgaggtcaagagatggagaccatcctggccaacatggtgaaaccctgtctctactaaaaatacaaaaattagctgggcgtgatggtgcacgcctgtagtcccagctacttgggaggctgaggcaggagaatcgcttgaacccgggaggtggcagttgcagtgagctgagatcgagccactgcactccagcctggtgacagagcgagactccatctcaaaaaaaagaaaaaaaaaaaagaaaaaaatggaaaacatcctcatggccacaaaataaggtctaattcaataaattatagtacattaatgtaatataatattacatgccactaaaaagaataaggtagctgtatatttcctggtatggaaaaaacatattaatatgttataaactattaggttggtgcaaaactaattgtggtttttgccattgaaatggcattgaaataaaagtgtaaagaaatctataccagatgtagtaacagtggtttgggtctgggaggttggattacagggagcatttgatttctatgttgtgtatttctataatgtttgaattgtttagaatgaatctgtatttcttttataagtagaaaaaaaataaagatagtttttacagcct

SEQ ID NO: 191606 - DNA, 3484 bp, Homo sapiens
  Payload ID: 17848
  Gene Name: toll-like receptor 10
  Uniprot ID: Q9BXR5
  ENST ID: ENST00000361424
  CDS Start-End: 133-2568
agccaattctgaccgtgtcaacgaatcatccacgcacctgcagctctgctgagagagtgcaagccgtgggggttttgagctcatcttcatcattcatatgaggaaataagtggtaaaatccttggaaatacaatgagactcatcagaaacatttacatattttgtagtattgttatgacagcagagggtgatgctccagagctgccagaagaaagggaactgatgaccaactgctccaacatgtctctaagaaaggttcccgcagacttgaccccagccacaacgacactggatttatcctataacctcctttttcaactccagagttcagattttcattctgtctccaaactgagagttttgattctatgccataacagaattcaacagctggatctcaaaacctttgaattcaacaaggagttaagatatttagatttgtctaataacagactgaagagtgtaacttggtatttactggcaggtctcaggtatttagatctttcttttaatgactttgacaccatgcctatctgtgaggaagctggcaacatgtcacacctggaaatcctaggtttgagtggggcaaaaatacaaaaatcagatttccagaaaattgctcatctgcatctaaatactgtcttcttaggattcagaactcttcctcattatgaagaaggtagcctgcccatcttaaacacaacaaaactgcacattgttttaccaatggacacaaatttctgggttcttttgcgtgatggaatcaagacttcaaaaatattagaaatgacaaatatagatggcaaaagccaatttgtaagttatgaaatgcaacgaaatcttagtttagaaaatgctaagacatcggttctattgcttaataaagttgatttactctgggacgaccttttccttatcttacaatttgtttggcatacatcagtggaacactttcagatccgaaatgtgacttttggtggtaaggcttatcttgaccacaattcatttgactactcaaatactgtaatgagaactataaaattggagcatgtacatttcagagtgttttacattcaacaggataaaatctatttgcttttgaccaaaatggacatagaaaacctgacaatatcaaatgcacaaatgccacacatgcttttcccgaattatcctacgaaattccaatatttaaattttgccaataatatcttaacagacgagttgtttaaaagaactatccaactgcctcacttgaaaactctcattttgaatggcaataaactggagacactttctttagtaagttgctttgctaacaacacacccttggaacacttggatctgagtcaaaatctattacaacataaaaatgatgaaaattgctcatggccagaaactgtggtcaatatgaatctgtcatacaataaattgtctgattctgtcttcaggtgcttgcccaaaagtattcaaatacttgacctaaataataaccaaatccaaactgtacctaaagagactattcatctgatggccttacgagaactaaatattgcatttaattttctaactgatctccctggatgcagtcatttcagtagactttcagttctgaacattgaaatgaacttcattctcagcccatctctggattttgttcagagctgccaggaagttaaaactctaaatgcgggaagaaatccattccggtgtacctgtgaattaaaaaatttcattcagcttgaaacatattcagaggtcatgatggttggatggtcagattcatacacctgtgaataccctttaaacctaaggggaactaggttaaaagacgttcatctccacgaattatcttgcaacacagctctgttgattgtcaccattgtggttattatgctagttctggggttggctgtggccttctgctgtctccactttgatctgccctggtatctcaggatgctaggtcaatgcacacaaacatggcacagggttaggaaaacaacccaagaacaactcaagagaaatgtccgattccacgcatttatttcatacagtgaacatgattctctgtgggtgaagaatgaattgatccccaatctagagaaggaagatggttctatcttgatttgcctttatgaaagctactttgaccctggcaaaagcattagtgaaaatattgtaagcttcattgagaaaagctataagtccatctttgttttgtctcccaactttgtccagaatgagtggtgccattatgaattctactttgcccaccacaatctcttccatgaaaattctgatcatataattcttatcttactggaacccattccattctattgcattcccaccaggtatcataaactgaaagctctcctggaaaaaaaagcatacttggaatggcccaaggataggcgtaaatgtgggcttttctgggcaaaccttcgagctgctattaatgttaatgtattagccaccagagaaatgtatgaactgcagacattcacagagttaaatgaagagtctcgaggttctacaatctctctgatgagaacagattgtctataaaatcccacagtccttgggaagttggggaccacatacactgttgggatgtacattgatacaacctttatgatggcaatttgacaatatttattaaaataaaaaatggttattcccttcatatcagtttctagaaggatttctaagaatgtatcctatagaaacaccttcacaagtttataagggcttatggaaaaaggtgttcatcccaggattgtttataatcatgaaaaatgtggccaggtgcagtggctcactcttgtaatcccagcactatgggaggccaaggtgggtgacccacgaggtcaagagatggagaccatcctggccaacatggtgaaaccctgtctctactaaaaatacaaaaattagctgggcgtgatggtgcacgcctgtagtcccagctacttgggaggctgaggcaggagaatcgcttgaacccgggaggtggcagttgcagtgagctgagatcgagccactgcactccagcctggtgacagagcgagactccatctcaaaaaaaagaaaaaaaaaaaagaaaaaaatggaaaacatcctcatggccacaaaataaggtctaattcaataaattatagtacattaatgtaatataatattacatgccactaaaaagaataaggtagctgtatatttcctggtatggaaaaaacatattaatatgttataaactattaggttggtgcaaaactaattgtggtttttgccattgaaatggcattgaaataaaagtgtaaagaaatctataccagatgtagtaacagtggtttgggtctgggaggttggattacagggagcatttgatttctatgttgtgtatttctataatgtttgaattgtttagaatgaatctgtatttcttttataagtagaaaaaaaataaagatagtttttacagcct

SEQ ID NO: 191607 - DNA, 3462 bp, Homo sapiens
  Payload ID: 17848
  Gene Name: toll-like receptor 10
  Uniprot ID: Q9BXR5
  ENST ID: ENST00000506111
  CDS Start-End: 485-2920
gcttttgccaccaacctgaagacatatagaggcagaaggacaggaataattctatttgtttcctgttttgaaacttccatctgtaaggtaagtgttgaaagtcagatattggctccagggactttctatatccacaaatacaaaaattgaggggtaactccttgatatcaagtcaaaggctcacaatgtctggtaataaaacaaattactttcaattttcttgaaatcttcaggctatcaaaaggagatgtgagagagggtattgagtctggcctgacaatgcagttcttaaaccaaaggtccattatgcttctcctctctgagaatcctgacttacctcaacaacggagacatggcacagtagccagcttggagacttctcagccaatgctctgagatcaagtcgaagacccaatatacagggttttgagctcatcttcatcattcatatgaggaaataagtggtaaaatccttggaaatacaatgagactcatcagaaacatttacatattttgtagtattgttatgacagcagagggtgatgctccagagctgccagaagaaagggaactgatgaccaactgctccaacatgtctctaagaaaggttcccgcagacttgaccccagccacaacgacactggatttatcctataacctcctttttcaactccagagttcagattttcattctgtctccaaactgagagttttgattctatgccataacagaattcaacagctggatctcaaaacctttgaattcaacaaggagttaagatatttagatttgtctaataacagactgaagagtgtaacttggtatttactggcaggtctcaggtatttagatctttcttttaatgactttgacaccatgcctatctgtgaggaagctggcaacatgtcacacctggaaatcctaggtttgagtggggcaaaaatacaaaaatcagatttccagaaaattgctcatctgcatctaaatactgtcttcttaggattcagaactcttcctcattatgaagaaggtagcctgcccatcttaaacacaacaaaactgcacattgttttaccaatggacacaaatttctgggttcttttgcgtgatggaatcaagacttcaaaaatattagaaatgacaaatatagatggcaaaagccaatttgtaagttatgaaatgcaacgaaatcttagtttagaaaatgctaagacatcggttctattgcttaataaagttgatttactctgggacgaccttttccttatcttacaatttgtttggcatacatcagtggaacactttcagatccgaaatgtgacttttggtggtaaggcttatcttgaccacaattcatttgactactcaaatactgtaatgagaactataaaattggagcatgtacatttcagagtgttttacattcaacaggataaaatctatttgcttttgaccaaaatggacatagaaaacctgacaatatcaaatgcacaaatgccacacatgcttttcccgaattatcctacgaaattccaatatttaaattttgccaataatatcttaacagacgagttgtttaaaagaactatccaactgcctcacttgaaaactctcattttgaatggcaataaactggagacactttctttagtaagttgctttgctaacaacacacccttggaacacttggatctgagtcaaaatctattacaacataaaaatgatgaaaattgctcatggccagaaactgtggtcaatatgaatctgtcatacaataaattgtctgattctgtcttcaggtgcttgcccaaaagtattcaaatacttgacctaaataataaccaaatccaaactgtacctaaagagactattcatctgatggccttacgagaactaaatattgcatttaattttctaactgatctccctggatgcagtcatttcagtagactttcagttctgaacattgaaatgaacttcattctcagcccatctctggattttgttcagagctgccaggaagttaaaactctaaatgcgggaagaaatccattccggtgtacctgtgaattaaaaaatttcattcagcttgaaacatattcagaggtcatgatggttggatggtcagattcatacacctgtgaataccctttaaacctaaggggaactaggttaaaagacgttcatctccacgaattatcttgcaacacagctctgttgattgtcaccattgtggttattatgctagttctggggttggctgtggccttctgctgtctccactttgatctgccctggtatctcaggatgctaggtcaatgcacacaaacatggcacagggttaggaaaacaacccaagaacaactcaagagaaatgtccgattccacgcatttatttcatacagtgaacatgattctctgtgggtgaagaatgaattgatccccaatctagagaaggaagatggttctatcttgatttgcctttatgaaagctactttgaccctggcaaaagcattagtgaaaatattgtaagcttcattgagaaaagctataagtccatctttgttttgtctcccaactttgtccagaatgagtggtgccattatgaattctactttgcccaccacaatctcttccatgaaaattctgatcatataattcttatcttactggaacccattccattctattgcattcccaccaggtatcataaactgaaagctctcctggaaaaaaaagcatacttggaatggcccaaggataggcgtaaatgtgggcttttctgggcaaaccttcgagctgctattaatgttaatgtattagccaccagagaaatgtatgaactgcagacattcacagagttaaatgaagagtctcgaggttctacaatctctctgatgagaacagattgtctataaaatcccacagtccttgggaagttggggaccacatacactgttgggatgtacattgatacaacctttatgatggcaatttgacaatatttattaaaataaaaaatggttattcccttcatatcagtttctagaaggatttctaagaatgtatcctatagaaacaccttcacaagtttataagggcttatggaaaaaggtgttcatcccaggattgtttataatcatgaaaaatgtggccaggtgcagtggctcactcttgtaatcccagcactatgggaggccaaggtgggtgacccacgaggtcaagagatggagaccatcctggccaacatggtgaaaccctgtctctactaaaaatacaaaaattagctgggcgtgatggtgcacgcctgtagtcccagctacttgggaggctgaggcaggagaatcgcttgaacccgggaggtggcagttgcagtgagctgagatcgagccactgcactccagcctggtgacagagcgagactccatctcaaaaaaaagaaaaaaaaaaaagaaaaaaa

SEQ ID NO: 191608 - DNA, 2616 bp, Homo sapiens
  Payload ID: 17848
  Gene Name: toll-like receptor 10
  Uniprot ID: Q9BXR5
  ENST ID: ENST00000508334
  CDS Start-End: 151-2586
tgcttttgccaccaacctgaagacatatagaggcagaaggacaggaataattctatttgtttcctgttttgaaacttccatctgtaagggttttgagctcatcttcatcattcatatgaggaaataagtggtaaaatccttggaaatacaatgagactcatcagaaacatttacatattttgtagtattgttatgacagcagagggtgatgctccagagctgccagaagaaagggaactgatgaccaactgctccaacatgtctctaagaaaggttcccgcagacttgaccccagccacaacgacactggatttatcctataacctcctttttcaactccagagttcagattttcattctgtctccaaactgagagttttgattctatgccataacagaattcaacagctggatctcaaaacctttgaattcaacaaggagttaagatatttagatttgtctaataacagactgaagagtgtaacttggtatttactggcaggtctcaggtatttagatctttcttttaatgactttgacaccatgcctatctgtgaggaagctggcaacatgtcacacctggaaatcctaggtttgagtggggcaaaaatacaaaaatcagatttccagaaaattgctcatctgcatctaaatactgtcttcttaggattcagaactcttcctcattatgaagaaggtagcctgcccatcttaaacacaacaaaactgcacattgttttaccaatggacacaaatttctgggttcttttgcgtgatggaatcaagacttcaaaaatattagaaatgacaaatatagatggcaaaagccaatttgtaagttatgaaatgcaacgaaatcttagtttagaaaatgctaagacatcggttctattgcttaataaagttgatttactctgggacgaccttttccttatcttacaatttgtttggcatacatcagtggaacactttcagatccgaaatgtgacttttggtggtaaggcttatcttgaccacaattcatttgactactcaaatactgtaatgagaactataaaattggagcatgtacatttcagagtgttttacattcaacaggataaaatctatttgcttttgaccaaaatggacatagaaaacctgacaatatcaaatgcacaaatgccacacatgcttttcccgaattatcctacgaaattccaatatttaaattttgccaataatatcttaacagacgagttgtttaaaagaactatccaactgcctcacttgaaaactctcattttgaatggcaataaactggagacactttctttagtaagttgctttgctaacaacacacccttggaacacttggatctgagtcaaaatctattacaacataaaaatgatgaaaattgctcatggccagaaactgtggtcaatatgaatctgtcatacaataaattgtctgattctgtcttcaggtgcttgcccaaaagtattcaaatacttgacctaaataataaccaaatccaaactgtacctaaagagactattcatctgatggccttacgagaactaaatattgcatttaattttctaactgatctccctggatgcagtcatttcagtagactttcagttctgaacattgaaatgaacttcattctcagcccatctctggattttgttcagagctgccaggaagttaaaactctaaatgcgggaagaaatccattccggtgtacctgtgaattaaaaaatttcattcagcttgaaacatattcagaggtcatgatggttggatggtcagattcatacacctgtgaataccctttaaacctaaggggaactaggttaaaagacgttcatctccacgaattatcttgcaacacagctctgttgattgtcaccattgtggttattatgctagttctggggttggctgtggccttctgctgtctccactttgatctgccctggtatctcaggatgctaggtcaatgcacacaaacatggcacagggttaggaaaacaacccaagaacaactcaagagaaatgtccgattccacgcatttatttcatacagtgaacatgattctctgtgggtgaagaatgaattgatccccaatctagagaaggaagatggttctatcttgatttgcctttatgaaagctactttgaccctggcaaaagcattagtgaaaatattgtaagcttcattgagaaaagctataagtccatctttgttttgtctcccaactttgtccagaatgagtggtgccattatgaattctactttgcccaccacaatctcttccatgaaaattctgatcatataattcttatcttactggaacccattccattctattgcattcccaccaggtatcataaactgaaagctctcctggaaaaaaaagcatacttggaatggcccaaggataggcgtaaatgtgggcttttctgggcaaaccttcgagctgctattaatgttaatgtattagccaccagagaaatgtatgaactgcagacattcacagagttaaatgaagagtctcgaggttctacaatctctctgatgagaacagattgtctataaaatcccacagtccttgggaagttggggacc

SEQ ID NO: 191609 - DNA, 676 bp, Homo sapiens
  Payload ID: 17848
  Gene Name: toll-like receptor 10
  ENST ID: ENST00000502321
  CDS Start-End: 394-676
gccaattctgaccgtgtcaacgaatcatccacgcacctgcagctctgctgagagagtgcaagccgtgggaattcagcagctgaatatcaagacctttgaattcaacaagaagttaagacatttatagttgtctaacaacagactgaagattgtggcttggtattcactggcaggtttcagacatttagatctttcttttaatgactaacaccatgcctatctgtggagaagctggcaacatgtcacacctggaaattgtttttcaacattaatactattatttggcagtaatccagattgcttttgccaccaacctgaagacatatagaggcagaaggacaggaataattctatttgtttcctgttttgaaacttccatctgtaagtattgttatgacagcagagggtgatgctccagagctgccagaagaaagggaactgatgaccaactgctccaacatgtctctaagaaaggttcccgcagacttgaccccagccacaacgacactggatttatcctataacctcctttttcaactccagagttcagattttcattctgtctccaaactgagagttttgattctatgccataacagaattcaacagctggatctcaaaacctttgaattcaacaaggagttaagatatttagatttgtctaataacagactga

SEQ ID NO: 191610 - DNA, 3801 bp, Homo sapiens
  Payload ID: 17848
  Gene Name: toll-like receptor 10
  Uniprot ID: Q9BXR5
  ENST ID: ENST00000613579
  CDS Start-End: 450-2885
agccaattctgaccgtgtcaacgaatcatccacgcacctgcagctctgctgagagagtgcaagccgtgggaattcagcagctgaatatcaagacctttgaattcaacaagaagttaagacatttatagttgtctaacaacagactgaagattgtggcttggtattcactggcaggtttcagacatttagatctttcttttaatgactaacaccatgcctatctgtggagaagctggcaacatgtcacacctggaaattgtttttcaacattaatactattatttggcagtaatccagattgcttttgccaccaacctgaagacatatagaggcagaaggacaggaataattctatttgtttcctgttttgaaacttccatctgtaagggttttgagctcatcttcatcattcatatgaggaaataagtggtaaaatccttggaaatacaatgagactcatcagaaacatttacatattttgtagtattgttatgacagcagagggtgatgctccagagctgccagaagaaagggaactgatgaccaactgctccaacatgtctctaagaaaggttcccgcagacttgaccccagccacaacgacactggatttatcctataacctcctttttcaactccagagttcagattttcattctgtctccaaactgagagttttgattctatgccataacagaattcaacagctggatctcaaaacctttgaattcaacaaggagttaagatatttagatttgtctaataacagactgaagagtgtaacttggtatttactggcaggtctcaggtatttagatctttcttttaatgactttgacaccatgcctatctgtgaggaagctggcaacatgtcacacctggaaatcctaggtttgagtggggcaaaaatacaaaaatcagatttccagaaaattgctcatctgcatctaaatactgtcttcttaggattcagaactcttcctcattatgaagaaggtagcctgcccatcttaaacacaacaaaactgcacattgttttaccaatggacacaaatttctgggttcttttgcgtgatggaatcaagacttcaaaaatattagaaatgacaaatatagatggcaaaagccaatttgtaagttatgaaatgcaacgaaatcttagtttagaaaatgctaagacatcggttctattgcttaataaagttgatttactctgggacgaccttttccttatcttacaatttgtttggcatacatcagtggaacactttcagatccgaaatgtgacttttggtggtaaggcttatcttgaccacaattcatttgactactcaaatactgtaatgagaactataaaattggagcatgtacatttcagagtgttttacattcaacaggataaaatctatttgcttttgaccaaaatggacatagaaaacctgacaatatcaaatgcacaaatgccacacatgcttttcccgaattatcctacgaaattccaatatttaaattttgccaataatatcttaacagacgagttgtttaaaagaactatccaactgcctcacttgaaaactctcattttgaatggcaataaactggagacactttctttagtaagttgctttgctaacaacacacccttggaacacttggatctgagtcaaaatctattacaacataaaaatgatgaaaattgctcatggccagaaactgtggtcaatatgaatctgtcatacaataaattgtctgattctgtcttcaggtgcttgcccaaaagtattcaaatacttgacctaaataataaccaaatccaaactgtacctaaagagactattcatctgatggccttacgagaactaaatattgcatttaattttctaactgatctccctggatgcagtcatttcagtagactttcagttctgaacattgaaatgaacttcattctcagcccatctctggattttgttcagagctgccaggaagttaaaactctaaatgcgggaagaaatccattccggtgtacctgtgaattaaaaaatttcattcagcttgaaacatattcagaggtcatgatggttggatggtcagattcatacacctgtgaataccctttaaacctaaggggaactaggttaaaagacgttcatctccacgaattatcttgcaacacagctctgttgattgtcaccattgtggttattatgctagttctggggttggctgtggccttctgctgtctccactttgatctgccctggtatctcaggatgctaggtcaatgcacacaaacatggcacagggttaggaaaacaacccaagaacaactcaagagaaatgtccgattccacgcatttatttcatacagtgaacatgattctctgtgggtgaagaatgaattgatccccaatctagagaaggaagatggttctatcttgatttgcctttatgaaagctactttgaccctggcaaaagcattagtgaaaatattgtaagcttcattgagaaaagctataagtccatctttgttttgtctcccaactttgtccagaatgagtggtgccattatgaattctactttgcccaccacaatctcttccatgaaaattctgatcatataattcttatcttactggaacccattccattctattgcattcccaccaggtatcataaactgaaagctctcctggaaaaaaaagcatacttggaatggcccaaggataggcgtaaatgtgggcttttctgggcaaaccttcgagctgctattaatgttaatgtattagccaccagagaaatgtatgaactgcagacattcacagagttaaatgaagagtctcgaggttctacaatctctctgatgagaacagattgtctataaaatcccacagtccttgggaagttggggaccacatacactgttgggatgtacattgatacaacctttatgatggcaatttgacaatatttattaaaataaaaaatggttattcccttcatatcagtttctagaaggatttctaagaatgtatcctatagaaacaccttcacaagtttataagggcttatggaaaaaggtgttcatcccaggattgtttataatcatgaaaaatgtggccaggtgcagtggctcactcttgtaatcccagcactatgggaggccaaggtgggtgacccacgaggtcaagagatggagaccatcctggccaacatggtgaaaccctgtctctactaaaaatacaaaaattagctgggcgtgatggtgcacgcctgtagtcccagctacttgggaggctgaggcaggagaatcgcttgaacccgggaggtggcagttgcagtgagctgagatcgagccactgcactccagcctggtgacagagcgagactccatctcaaaaaaaagaaaaaaaaaaaagaaaaaaatggaaaacatcctcatggccacaaaataaggtctaattcaataaattatagtacattaatgtaatataatattacatgccactaaaaagaataaggtagctgtatatttcctggtatggaaaaaacatattaatatgttataaactattaggttggtgcaaaactaattgtggtttttgccattgaaatggcattgaaataaaagtgtaaagaaatctataccagatgtagtaacagtggtttgggtctgggaggttggattacagggagcatttgatttctatgttgtgtatttctataatgtttgaattgtttagaatgaatctgtatttcttttataagtagaaaaaaaataaagatagtttttacagcct

SEQ ID NO: 191611 - DNA, 3673 bp, Homo sapiens
  Payload ID: 17848
  Gene Name: toll-like receptor 10
  Uniprot ID: Q9BXR5
  ENST ID: ENST00000622002
  CDS Start-End: 322-2757
agccaattctgaccgtgtcaacgaatcatccacgcacctgcagctctgctgagagagtgcaagccgtggggctatcaaaaggagatgtgagagagggtattgagtctggcctgacaatgcagttcttaaaccaaaggtccattatgcttctcctctctgagaatcctgacttacctcaacaacggagacatggcacagtagccagcttggagacttctcagccaatgctctgagatcaagtcgaagacccaatatacagggttttgagctcatcttcatcattcatatgaggaaataagtggtaaaatccttggaaatacaatgagactcatcagaaacatttacatattttgtagtattgttatgacagcagagggtgatgctccagagctgccagaagaaagggaactgatgaccaactgctccaacatgtctctaagaaaggttcccgcagacttgaccccagccacaacgacactggatttatcctataacctcctttttcaactccagagttcagattttcattctgtctccaaactgagagttttgattctatgccataacagaattcaacagctggatctcaaaacctttgaattcaacaaggagttaagatatttagatttgtctaataacagactgaagagtgtaacttggtatttactggcaggtctcaggtatttagatctttcttttaatgactttgacaccatgcctatctgtgaggaagctggcaacatgtcacacctggaaatcctaggtttgagtggggcaaaaatacaaaaatcagatttccagaaaattgctcatctgcatctaaatactgtcttcttaggattcagaactcttcctcattatgaagaaggtagcctgcccatcttaaacacaacaaaactgcacattgttttaccaatggacacaaatttctgggttcttttgcgtgatggaatcaagacttcaaaaatattagaaatgacaaatatagatggcaaaagccaatttgtaagttatgaaatgcaacgaaatcttagtttagaaaatgctaagacatcggttctattgcttaataaagttgatttactctgggacgaccttttccttatcttacaatttgtttggcatacatcagtggaacactttcagatccgaaatgtgacttttggtggtaaggcttatcttgaccacaattcatttgactactcaaatactgtaatgagaactataaaattggagcatgtacatttcagagtgttttacattcaacaggataaaatctatttgcttttgaccaaaatggacatagaaaacctgacaatatcaaatgcacaaatgccacacatgcttttcccgaattatcctacgaaattccaatatttaaattttgccaataatatcttaacagacgagttgtttaaaagaactatccaactgcctcacttgaaaactctcattttgaatggcaataaactggagacactttctttagtaagttgctttgctaacaacacacccttggaacacttggatctgagtcaaaatctattacaacataaaaatgatgaaaattgctcatggccagaaactgtggtcaatatgaatctgtcatacaataaattgtctgattctgtcttcaggtgcttgcccaaaagtattcaaatacttgacctaaataataaccaaatccaaactgtacctaaagagactattcatctgatggccttacgagaactaaatattgcatttaattttctaactgatctccctggatgcagtcatttcagtagactttcagttctgaacattgaaatgaacttcattctcagcccatctctggattttgttcagagctgccaggaagttaaaactctaaatgcgggaagaaatccattccggtgtacctgtgaattaaaaaatttcattcagcttgaaacatattcagaggtcatgatggttggatggtcagattcatacacctgtgaataccctttaaacctaaggggaactaggttaaaagacgttcatctccacgaattatcttgcaacacagctctgttgattgtcaccattgtggttattatgctagttctggggttggctgtggccttctgctgtctccactttgatctgccctggtatctcaggatgctaggtcaatgcacacaaacatggcacagggttaggaaaacaacccaagaacaactcaagagaaatgtccgattccacgcatttatttcatacagtgaacatgattctctgtgggtgaagaatgaattgatccccaatctagagaaggaagatggttctatcttgatttgcctttatgaaagctactttgaccctggcaaaagcattagtgaaaatattgtaagcttcattgagaaaagctataagtccatctttgttttgtctcccaactttgtccagaatgagtggtgccattatgaattctactttgcccaccacaatctcttccatgaaaattctgatcatataattcttatcttactggaacccattccattctattgcattcccaccaggtatcataaactgaaagctctcctggaaaaaaaagcatacttggaatggcccaaggataggcgtaaatgtgggcttttctgggcaaaccttcgagctgctattaatgttaatgtattagccaccagagaaatgtatgaactgcagacattcacagagttaaatgaagagtctcgaggttctacaatctctctgatgagaacagattgtctataaaatcccacagtccttgggaagttggggaccacatacactgttgggatgtacattgatacaacctttatgatggcaatttgacaatatttattaaaataaaaaatggttattcccttcatatcagtttctagaaggatttctaagaatgtatcctatagaaacaccttcacaagtttataagggcttatggaaaaaggtgttcatcccaggattgtttataatcatgaaaaatgtggccaggtgcagtggctcactcttgtaatcccagcactatgggaggccaaggtgggtgacccacgaggtcaagagatggagaccatcctggccaacatggtgaaaccctgtctctactaaaaatacaaaaattagctgggcgtgatggtgcacgcctgtagtcccagctacttgggaggctgaggcaggagaatcgcttgaacccgggaggtggcagttgcagtgagctgagatcgagccactgcactccagcctggtgacagagcgagactccatctcaaaaaaaagaaaaaaaaaaaagaaaaaaatggaaaacatcctcatggccacaaaataaggtctaattcaataaattatagtacattaatgtaatataatattacatgccactaaaaagaataaggtagctgtatatttcctggtatggaaaaaacatattaatatgttataaactattaggttggtgcaaaactaattgtggtttttgccattgaaatggcattgaaataaaagtgtaaagaaatctataccagatgtagtaacagtggtttgggtctgggaggttggattacagggagcatttgatttctatgttgtgtatttctataatgtttgaattgtttagaatgaatctgtatttcttttataagtagaaaaaaaataaagatagtttttacagcct

SEQ ID NO: 191612 - DNA, 4200 bp, Homo sapiens
  Payload ID: 17849
  Gene Name: toll-like receptor 2
  Uniprot ID: O60603
  ENST ID: ENST00000260010
  CDS Start-End: 1409-3763
aagcactaatggactaagacaaaaagattccattatgaaagtgaaaaggcaaccgcagagtggcagaagcttttggagatgatgaatatgtttacttcctggattgcggtgatgataccatgagtgtatacatatgtgtgtatacataatgtatacaaattgtgttcattgattatgtacagtttctttgtataccaattataccttaataaagctaaggaaaaaaaaaagaaaatccagaataaatatgcatggtatgacccatttatttaaaaaaaaaaagagggaatgcgaagcagtggttttggtgcgaacacaaaaattctggcttcaacagcatttaaattcccaaaccaagcatgtttgtgttttaattctttgtggccataaattgtacagctcaggcctttatagtctctcagattctgtgaatgtggggaattagttttactcataaaaagttttgttcttggggataaattttttaaaaaaatttttgtatagttagcacactgagaaaatacagacaaaggcatacagatgcaagaaatgaggtagctgaatagaccaaagaatgatatagggcccagaaggtaggcaaagagaaagttgttgggtttatggttacaagtaaactagcagttgtggtgcagatagttttatttcccccacattaatctgaacagcccatccagacttaaacactgctttttgcatttacttctaggcaggaagacagggttctgatggtgtgagtctccttcaactcagcaaaccaccttggtctgcctcgagtttccaacacccctcctgcctgctagtgataggtgtgaggcaggttgatgaacatggaacttttttcttttggtcccaaagcatgctactcctggagtttcattcagtgaatgagaactatagtttggttctgtgagatctctatgaatcaaggcggccactgaagcggagaaaagaaatgcttaaatgttaagaaagtttgaagtgcagaaaaaggtgattgtaaatccatatggttaagcttagcccatttcttaaaaggcttgattgctcattcctccattcattgatttactcactcttccaatccatgttattgagtcttgctctgtaattccggatggttgtgcttttaagtactgcatagtggttgtatgtctgtgttagcattgctgaatgtatcagggaattcatttttttatccccattcattcgttccattcatctgtttctctctctctctctctttgtgtgtgtgtgtgtgtgtgtgtgtgtgtgtgtgtgtgtgtgtgttatgcctagaaaacatttctcaagaattagaattacgatatgctgtcaaacacaatgacttatttgaacctcttttatttgtaggttgaagcactggacaatgccacatactttgtggatggtgtgggtcttgggggtcatcatcagcctctccaaggaagaatcctccaatcaggcttctctgtcttgtgaccgcaatggtatctgcaagggcagctcaggatctttaaactccattccctcagggctcacagaagctgtaaaaagccttgacctgtccaacaacaggatcacctacattagcaacagtgacctacagaggtgtgtgaacctccaggctctggtgctgacatccaatggaattaacacaatagaggaagattctttttcttccctgggcagtcttgaacatttagacttatcctataattacttatctaatttatcgtcttcctggttcaagcccctttcttctttaacattcttaaacttactgggaaatccttacaaaaccctaggggaaacatctcttttttctcatctcacaaaattgcaaatcctgagagtgggaaatatggacaccttcactaagattcaaagaaaagattttgctggacttaccttccttgaggaacttgagattgatgcttcagatctacagagctatgagccaaaaagtttgaagtcaattcagaatgtaagtcatctgatccttcatatgaagcagcatattttactgctggagatttttgtagatgttacaagttccgtggaatgtttggaactgcgagatactgatttggacactttccatttttcagaactatccactggtgaaacaaattcattgattaaaaagtttacatttagaaatgtgaaaatcaccgatgaaagtttgtttcaggttatgaaacttttgaatcagatttctggattgttagaattagagtttgatgactgtacccttaatggagttggtaattttagagcatctgataatgacagagttatagatccaggtaaagtggaaacgttaacaatccggaggctgcatattccaaggttttacttattttatgatctgagcactttatattcacttacagaaagagttaaaagaatcacagtagaaaacagtaaagtttttctggttccttgtttactttcacaacatttaaaatcattagaatacttggatctcagtgaaaatttgatggttgaagaatacttgaaaaattcagcctgtgaggatgcctggccctctctacaaactttaattttaaggcaaaatcatttggcatcattggaaaaaaccggagagactttgctcactctgaaaaacttgactaacattgatatcagtaagaatagttttcattctatgcctgaaacttgtcagtggccagaaaagatgaaatatttgaacttatccagcacacgaatacacagtgtaacaggctgcattcccaagacactggaaattttagatgttagcaacaacaatctcaatttattttctttgaatttgccgcaactcaaagaactttatatttccagaaataagttgatgactctaccagatgcctccctcttacccatgttactagtattgaaaatcagtaggaatgcaataactacgttttctaaggagcaacttgactcatttcacacactgaagactttggaagctggtggcaataacttcatttgctcctgtgaattcctctccttcactcaggagcagcaagcactggccaaagtcttgattgattggccagcaaattacctgtgtgactctccatcccatgtgcgtggccagcaggttcaggatgtccgcctctcggtgtcggaatgtcacaggacagcactggtgtctggcatgtgctgtgctctgttcctgctgatcctgctcacgggggtcctgtgccaccgtttccatggcctgtggtatatgaaaatgatgtgggcctggctccaggccaaaaggaagcccaggaaagctcccagcaggaacatctgctatgatgcatttgtttcttacagtgagcgggatgcctactgggtggagaaccttatggtccaggagctggagaacttcaatccccccttcaagttgtgtcttcataagcgggacttcattcctggcaagtggatcattgacaatatcattgactccattgaaaagagccacaaaactgtctttgtgctttctgaaaactttgtgaagagtgagtggtgcaagtatgaactggacttctcccatttccgtctttttgatgagaacaatgatgctgccattctcattcttctggagcccattgagaaaaaagccattccccagcgcttctgcaagctgcggaagataatgaacaccaagacctacctggagtggcccatggacgaggctcagcgggaaggattttgggtaaatctgagagctgcgataaagtcctaggttcccatatttaagaccagtctttgtctagttgggatctttatgtcactagttatagttaagttcattcagacataattatataaaaactacgtggatgtaccgtcatttgaggacttgcttactaaaactacaaaacttcaaattttgtctggggtgctgttttataaacatatgccagatttaaaaattggtttttggtttttcttttttctatgagataaccatgatcataagtctattactgatatctgaatatagtcccttggtatccaagggaattggttgcaggatcctcgtggatatcaaaattcatagatgatcaagtcccttataagagtggcatagtatttgcatataacctgtgtacattctcctgtatactttaaatcatctctagattacttatgatacccaatacaatgtaaatactatgt

SEQ ID NO: 191613 - DNA, 6015 bp, Homo sapiens
  Payload ID: 17850
  Gene Name: toll-like receptor 3
  Uniprot ID: O15455
  ENST ID: ENST00000296795
  CDS Start-End: 105-2819
tttcactttcgagagtgccgtctatttgccacacacttccctgatgaaatgtctggatttggactaaagaaaaaaggaaaggctagcagtcatccaacagaatcatgagacagactttgccttgtatctacttttgggggggccttttgccctttgggatgctgtgtgcatcctccaccaccaagtgcactgttagccatgaagttgctgactgcagccacctgaagttgactcaggtacccgatgatctacccacaaacataacagtgttgaaccttacccataatcaactcagaagattaccagccgccaacttcacaaggtatagccagctaactagcttggatgtaggatttaacaccatctcaaaactggagccagaattgtgccagaaacttcccatgttaaaagttttgaacctccagcacaatgagctatctcaactttctgataaaacctttgccttctgcacgaatttgactgaactccatctcatgtccaactcaatccagaaaattaaaaataatccctttgtcaagcagaagaatttaatcacattagatctgtctcataatggcttgtcatctacaaaattaggaactcaggttcagctggaaaatctccaagagcttctattatcaaacaataaaattcaagcgctaaaaagtgaagaactggatatctttgccaattcatctttaaaaaaattagagttgtcatcgaatcaaattaaagagttttctccagggtgttttcacgcaattggaagattatttggcctctttctgaacaatgtccagctgggtcccagccttacagagaagctatgtttggaattagcaaacacaagcattcggaatctgtctctgagtaacagccagctgtccaccaccagcaatacaactttcttgggactaaagtggacaaatctcactatgctcgatctttcctacaacaacttaaatgtggttggtaacgattcctttgcttggcttccacaactagaatatttcttcctagagtataataatatacagcatttgttttctcactctttgcacgggcttttcaatgtgaggtacctgaatttgaaacggtcttttactaaacaaagtatttcccttgcctcactccccaagattgatgatttttcttttcagtggctaaaatgtttggagcaccttaacatggaagataatgatattccaggcataaaaagcaatatgttcacaggattgataaacctgaaatacttaagtctatccaactcctttacaagtttgcgaactttgacaaatgaaacatttgtatcacttgctcattctcccttacacatactcaacctaaccaagaataaaatctcaaaaatagagagtgatgctttctcttggttgggccacctagaagtacttgacctgggccttaatgaaattgggcaagaactcacaggccaggaatggagaggtctagaaaatattttcgaaatctatctttcctacaacaagtacctgcagctgactaggaactcctttgccttggtcccaagccttcaacgactgatgctccgaagggtggcccttaaaaatgtggatagctctccttcaccattccagcctcttcgtaacttgaccattctggatctaagcaacaacaacatagccaacataaatgatgacatgttggagggtcttgagaaactagaaattctcgatttgcagcataacaacttagcacggctctggaaacacgcaaaccctggtggtcccatttatttcctaaagggtctgtctcacctccacatccttaacttggagtccaacggctttgacgagatcccagttgaggtcttcaaggatttatttgaactaaagatcatcgatttaggattgaataatttaaacacacttccagcatctgtctttaataatcaggtgtctctaaagtcattgaaccttcagaagaatctcataacatccgttgagaagaaggttttcgggccagctttcaggaacctgactgagttagatatgcgctttaatccctttgattgcacgtgtgaaagtattgcctggtttgttaattggattaacgagacccataccaacatccctgagctgtcaagccactacctttgcaacactccacctcactatcatgggttcccagtgagactttttgatacatcatcttgcaaagacagtgccccctttgaactctttttcatgatcaataccagtatcctgttgatttttatctttattgtacttctcatccactttgagggctggaggatatctttttattggaatgtttcagtacatcgagttcttggtttcaaagaaatagacagacagacagaacagtttgaatatgcagcatatataattcatgcctataaagataaggattgggtctgggaacatttctcttcaatggaaaaggaagaccaatctctcaaattttgtctggaagaaagggactttgaggcgggtgtttttgaactagaagcaattgttaacagcatcaaaagaagcagaaaaattatttttgttataacacaccatctattaaaagacccattatgcaaaagattcaaggtacatcatgcagttcaacaagctattgaacaaaatctggattccattatattggttttccttgaggagattccagattataaactgaaccatgcactctgtttgcgaagaggaatgtttaaatctcactgcatcttgaactggccagttcagaaagaacggataggtgcctttcgtcataaattgcaagtagcacttggatccaaaaactctgtacattaaatttatttaaatattcaattagcaaaggagaaactttctcaatttaaaaagttctatggcaaatttaagttttccataaaggtgttataatttgtttattcatatttgtaaatgattatattctatcacaattacatctcttctaggaaaatgtgtctccttatttcaggcctatttttgacaattgacttaattttacccaaaataaaacatataagcacgtaagaacattgtctactgattaatatacaatcagccactgagcctatgacagcttaaggagtttgaaaacattcctcattttaagaaaagttagaggtatatgagggtttgtgatgatctttttgtattttggatgcacttagaatgaaagataattgtttcaatgggtataatgctatttcctttgtaaaagagtaaaatatatacccatatttttaacaagtttaattacagtattttttcaatggaaaaactttgtattttagtaagtacttgtctcagtgttgactttgttaaatgttaaatattttttaatatacatacccaagggcagaaaacatttgcaattcatttttattagttaatgagatgattatttgaatgaatattgacttgtattttcctgagattatgagtttctgctgtgggagggtggaaacaattctcttactaaaagtattgtaggcaggcttgctttctgaaggctaatcactatttggctttgtggaaacagaactttcctcccatggtcacagactcaggagatggcgttggcaaaatcacttggtcccactgggattctttgactcctgatcttgaaaattatgataataaatgcatcttagatattcctatgtaattagtgatgatgatcgctgtataatatattcaaaggaatgtattattttaccataaaataatgtgctacgcataaggtagtccttatctagaaagactatttttatttttgtttttttgtttgtttgttttttatttgtttgtttttgagacagagtctggctctgtcgcccaggctggagttcagtggtccaacctcggcccaccgcaacctccacctctgagttcaagctattctcctgcctcagccacccgagtagctgggattacaggcacatgccaccatgcctggctaatttttgtatttttagtagagatggggtttcaccatgttggccaggctggtcttgaactcctgacctcaagtgatcctctcgccttggcctcccaaagtgctaggattacaggtgtgagccaccgcgccccgcctttttattttgttttacaatacaacaaaaaatttttagttttacaataaaagagaatctgattattggaaatagacctgaatagctttttgaaatatttatagttctagtatttaaagagaaacctgaaattataaagctgagttaatttctatacctgaaatgttcatttgtctgctgaattcagggagcatttgagatgtcacattttggaactttgatttaaatagttcagtattcccaaggctgagttccatgaccctggaatgagaaatatccactgtacctctggttctgaagagtctatagtcggccaacactgtgaatgtgtggaggactaattgtcactttcatgttatttgccaccctgacagctgagacactgcttttcagcattttagttaagatttgctttttaactgtgcaataatcattttattttggcattataaaataaaaatcacaacttctgcttttcttatatgctttgtgtgttatcacacaaatattctcaaatattcataagatattttaaataaatcattgtgaattagtcaatatatcaagttgcttaatatgtcatatatcaatgctatttaatatataatatctatatttaatatattgatatgttactggtggagagtgtccaggttcttggtgctttgaacaaggaattggacaaaatgcacaaagaatgaggcgacaaaagcagaggtttattgaaaacgaaagcacaccccgcagggtgggagcggcccgagcaagcagctcaaaagccgggttacaggattttctggggtttaaatactctctagaggtttccattggttacttggtttatgccctatgtaaatgaagaggctaaagtgaaattacaaagttatttacttgttgtgcaccctacgcaaatgaatagctgtcacagctgaggtagagttacagtgatttacttggtggtagaatgttgggatttttccatttgattgagttctaggaagcctttagtttccctgcctgcagaccccattctcctgcctcagatatatcaatgacatattcaatacatcattaagttgcttaatatttaagaggttaagatgcacaggtaatgacctctaaatgaatgccaataaaaatagtaaaaggtgtaaactctgactcctatctgacctaggtaggaagtaacatccagaacttctgcaggctgtcctgtgtaattgttctccggaggaacccttgtccctggggtttgagagaaggggatcgaggaaaaggatgtttgtctgagctcttgtttgatttgcccaagtgacttgacttgtttgaatcctctcagggtgccatcatgtaatctgtccactccaacttcttcctgtttttcacattgcaaaacaaaacccaactgaatcgacactgagtttaaaataaatcttggtatttaggttgtacctaaaaatgataacttttagactgtaatcagaggtagatgctatcaatttgttagtgaggaggggaggagttttcgatgccacttagtttacaatgtctaattgttcaaatatacatctaggttgtaaaggagactcaacggtaagttatagtgaccattgaaaaatgtaaaggggcttcaaatcaagaacttagaaggaatttcttgcaatctattgagacacaaagcagatgagtggttgtctgggcctaggaacaggaatggggagtggctgcaaataggtggaagagaccttttttgggtgatgaaagtgctctataattgggttatggtaataattgtacaactatgtaaatttactgaaagtcattgagttggacacttaaaacaggtgaattttatgatatgtaaattatatattcacaaagccattaaaaattgtattttttgagca

SEQ ID NO: 191614 - DNA, 1156 bp, Homo sapiens
  Payload ID: 17850
  Gene Name: toll-like receptor 3
  ENST ID: ENST00000513189
  CDS Start-End: 102-1156
cactttcgagagtgccgtctatttgccacacacttccctgatgaaatgtctggatttggactaaagaaaaaaggaaaggctagcagtcatccaacagaatcatgagacagactttgccttgtatctacttttgggggggccttttgccctttgggatgctgtgtgcatcctccaccaccaagtgcactgttagccatgaagttgctgactgcagccacctgaagttgactcaggtacccgatgatctacccacaaacataacagtgttgaaccttacccataatcaactcagaagattaccagccgccaacttcacaaggtatagccagctaactagcttggatgtaggatttaacaccatctcaaaactggagccagaattgtgccagaaacttcccatgttaaaagttttgaacctccagcacaatgagctatctcaactttctgataaaacctttgccttctgcacgaatttgactgaactccatctcatgtccaactcaatccagaaaattaaaaataatccctttgtcaagcagaagaatttaatcacattagatctgtctcataatggcttgtcatctacaaaattaggaactcaggttcagctggaaaatctccaagagcttctattatcaaacaataaaattcaagcgctaaaaagtgaagaactggatatctttgccaattcatctttaaaaaaattagagttgtcatcgaatcaaattaaagagttttctccagggtgttttcacgcaattggaagattatttggcctctttctgaacaatgtccagctgggtcccagccttacagagaagctatgtttggaattagcaaacacaagcattcggaatctgtctctgagtaacagccagctgtccaccaccagcaatacaactttcttgggactaaagtggacaaatctcactatgctcgatctttcctacaacaacttaaatgtgtggctaaaatgtttggagcaccttaacatggaagataatgatattccaggcataaaaagcaatatgttcacaggattgataaacctgaaatacttaagtctatccaactcctttacaagtttgcgaactttgacaaatgaaacatttgtatcacttgctcattctcccttacacatactcaacctaaccaa

SEQ ID NO: 191615 - DNA, 2310 bp, Homo sapiens
  Payload ID: 17850
  Gene Name: toll-like receptor 3
  Uniprot ID: O15455
  ENST ID: ENST00000504367
  CDS Start-End: 411-2294
aagacacaaccaggaactgccccaggagtgacttcacgagcagtttattcattgcaattgttctcatggtgataaagaaaaagtaccaggagatggatcctggactggaaggtcagagaagcctccctgaaaaggtggcatctaagctgaggctgtgaatgctgagcagaagttagcccgtggccaggggaggtcagaggctggagtaagagttttctccagggtgttttcacgcaattggaagattatttggcctctttctgaacaatgtccagctgggtcccagccttacagagaagctatgtttggaattagcaaacacaagcattcggaatctgtctctgagtaacagccagctgtccaccaccagcaatacaactttcttgggactaaagtggacaaatctcactatgctcgatctttcctacaacaacttaaatgtggttggtaacgattcctttgcttggcttccacaactagaatatttcttcctagagtataataatatacagcatttgttttctcactctttgcacgggcttttcaatgtgaggtacctgaatttgaaacggtcttttactaaacaaagtatttcccttgcctcactccccaagattgatgatttttcttttcagtggctaaaatgtttggagcaccttaacatggaagataatgatattccaggcataaaaagcaatatgttcacaggattgataaacctgaaatacttaagtctatccaactcctttacaagtttgcgaactttgacaaatgaaacatttgtatcacttgctcattctcccttacacatactcaacctaaccaagaataaaatctcaaaaatagagagtgatgctttctcttggttgggccacctagaagtacttgacctgggccttaatgaaattgggcaagaactcacaggccaggaatggagaggtctagaaaatattttcgaaatctatctttcctacaacaagtacctgcagctgactaggaactcctttgccttggtcccaagccttcaacgactgatgctccgaagggtggcccttaaaaatgtggatagctctccttcaccattccagcctcttcgtaacttgaccattctggatctaagcaacaacaacatagccaacataaatgatgacatgttggagggtcttgagaaactagaaattctcgatttgcagcataacaacttagcacggctctggaaacacgcaaaccctggtggtcccatttatttcctaaagggtctgtctcacctccacatccttaacttggagtccaacggctttgacgagatcccagttgaggtcttcaaggatttatttgaactaaagatcatcgatttaggattgaataatttaaacacacttccagcatctgtctttaataatcaggtgtctctaaagtcattgaaccttcagaagaatctcataacatccgttgagaagaaggttttcgggccagctttcaggaacctgactgagttagatatgcgctttaatccctttgattgcacgtgtgaaagtattgcctggtttgttaattggattaacgagacccataccaacatccctgagctgtcaagccactacctttgcaacactccacctcactatcatgggttcccagtgagactttttgatacatcatcttgcaaagacagtgccccctttgaactctttttcatgatcaataccagtatcctgttgatttttatctttattgtacttctcatccactttgagggctggaggatatctttttattggaatgtttcagtacatcgagttcttggtttcaaagaaatagacagacagacagaacagtttgaatatgcagcatatataattcatgcctataaagataaggattgggtctgggaacatttctcttcaatggaaaaggaagaccaatctctcaaattttgtctggaagaaagggactttgaggcgggtgtttttgaactagaagcaattgttaacagcatcaaaagaagcagaaaaattatttttgttataacacaccatctattaaaagacccattatgcaaaagattcaaggtacatcatgcagttcaacaagctattgaacaaaatctggattccattatattggttttccttgaggagattccagattataaactgaaccatgcactctgtttgcgaagaggaatgtttaaatctcactgcatcttgaactggccagttcagaaagaacggataggtgcctttcgtcataaattgcaagtagcacttggatccaaaaactctgtacattaaatttatttaaatattc

SEQ ID NO: 191616 - DNA, 4844 bp, Homo sapiens
  Payload ID: 17851
  Gene Name: toll-like receptor 4
  Uniprot ID: O00206
  ENST ID: ENST00000355622
  CDS Start-End: 102-2621
aagacaccagtgcctcagaaactgctcggtcagacggtgatagcgagccacgcattcacagggccactgctgctcacagaagcagtgaggatgatgccaggatgatgtctgcctcgcgcctggctgggactctgatcccagccatggccttcctctcctgcgtgagaccagaaagctgggagccctgcgtggaggtggttcctaatattacttatcaatgcatggagctgaatttctacaaaatccccgacaacctccccttctcaaccaagaacctggacctgagctttaatcccctgaggcatttaggcagctatagcttcttcagtttcccagaactgcaggtgctggatttatccaggtgtgaaatccagacaattgaagatggggcatatcagagcctaagccacctctctaccttaatattgacaggaaaccccatccagagtttagccctgggagccttttctggactatcaagtttacagaagctggtggctgtggagacaaatctagcatctctagagaacttccccattggacatctcaaaactttgaaagaacttaatgtggctcacaatcttatccaatctttcaaattacctgagtatttttctaatctgaccaatctagagcacttggacctttccagcaacaagattcaaagtatttattgcacagacttgcgggttctacatcaaatgcccctactcaatctctctttagacctgtccctgaaccctatgaactttatccaaccaggtgcatttaaagaaattaggcttcataagctgactttaagaaataattttgatagtttaaatgtaatgaaaacttgtattcaaggtctggctggtttagaagtccatcgtttggttctgggagaatttagaaatgaaggaaacttggaaaagtttgacaaatctgctctagagggcctgtgcaatttgaccattgaagaattccgattagcatacttagactactacctcgatgatattattgacttatttaattgtttgacaaatgtttcttcattttccctggtgagtgtgactattgaaagggtaaaagacttttcttataatttcggatggcaacatttagaattagttaactgtaaatttggacagtttcccacattgaaactcaaatctctcaaaaggcttactttcacttccaacaaaggtgggaatgctttttcagaagttgatctaccaagccttgagtttctagatctcagtagaaatggcttgagtttcaaaggttgctgttctcaaagtgattttgggacaaccagcctaaagtatttagatctgagcttcaatggtgttattaccatgagttcaaacttcttgggcttagaacaactagaacatctggatttccagcattccaatttgaaacaaatgagtgagttttcagtattcctatcactcagaaacctcatttaccttgacatttctcatactcacaccagagttgctttcaatggcatcttcaatggcttgtccagtctcgaagtcttgaaaatggctggcaattctttccaggaaaacttccttccagatatcttcacagagctgagaaacttgaccttcctggacctctctcagtgtcaactggagcagttgtctccaacagcatttaactcactctccagtcttcaggtactaaatatgagccacaacaacttcttttcattggatacgtttccttataagtgtctgaactccctccaggttcttgattacagtctcaatcacataatgacttccaaaaaacaggaactacagcattttccaagtagtctagctttcttaaatcttactcagaatgactttgcttgtacttgtgaacaccagagtttcctgcaatggatcaaggaccagaggcagctcttggtggaagttgaacgaatggaatgtgcaacaccttcagataagcagggcatgcctgtgctgagtttgaatatcacctgtcagatgaataagaccatcattggtgtgtcggtcctcagtgtgcttgtagtatctgttgtagcagttctggtctataagttctattttcacctgatgcttcttgctggctgcataaagtatggtagaggtgaaaacatctatgatgcctttgttatctactcaagccaggatgaggactgggtaaggaatgagctagtaaagaatttagaagaaggggtgcctccatttcagctctgccttcactacagagactttattcccggtgtggccattgctgccaacatcatccatgaaggtttccataaaagccgaaaggtgattgttgtggtgtcccagcacttcatccagagccgctggtgtatctttgaatatgagattgctcagacctggcagtttctgagcagtcgtgctggtatcatcttcattgtcctgcagaaggtggagaagaccctgctcaggcagcaggtggagctgtaccgccttctcagcaggaacacttacctggagtgggaggacagtgtcctggggcggcacatcttctggagacgactcagaaaagccctgctggatggtaaatcatggaatccagaaggaacagtgggtacaggatgcaattggcaggaagcaacatctatctgaagaggaaaaataaaaacctcctgaggcatttcttgcccagctgggtccaacacttgttcagttaataagtattaaatgctgccacatgtcaggccttatgctaagggtgagtaattccatggtgcactagatatgcagggctgctaatctcaaggagcttccagtgcagagggaataaatgctagactaaaatacagagtcttccaggtgggcatttcaaccaactcagtcaaggaacccatgacaaagaaagtcatttcaactcttacctcatcaagttgaataaagacagagaaaacagaaagagacattgttcttttcctgagtcttttgaatggaaattgtattatgttatagccatcataaaaccattttggtagttttgactgaactgggtgttcactttttcctttttgattgaatacaatttaaattctacttgatgactgcagtcgtcaaggggctcctgatgcaagatgccccttccattttaagtctgtctccttacagaggttaaagtctagtggctaattcctaaggaaacctgattaacacatgctcacaaccatcctggtcattctcgagcatgttctattttttaactaatcacccctgatatatttttatttttatatatccagttttcatttttttacgtcttgcctataagctaatatcataaataaggttgtttaagacgtgcttcaaatatccatattaaccactatttttcaaggaagtatggaaaagtacactctgtcactttgtcactcgatgtcattccaaagttattgcctactaagtaatgactgtcatgaaagcagcattgaaataatttgtttaaagggggcactcttttaaacgggaagaaaatttccgcttcctggtcttatcatggacaatttgggctagaggcaggaaggaagtgggatgacctcaggaggtcaccttttcttgattccagaaacatatgggctgataaacccggggtgacctcatgaaatgagttgcagcagaagtttatttttttcagaacaagtgatgtttgatggacctctgaatctctttagggagacacagatggctgggatccctcccctgtacccttctcactgccaggagaactacgtgtgaaggtattcaaggcagggagtatacattgctgtttcctgttgggcaatgctccttgaccacattttgggaagagtggatgttatcattgagaaaacaatgtgtctggaattaatggggttcttataaagaaggttcccagaaaagaatgttcatccagcctcctcagaaacagaacattcaagaaaaggacaatcaggatgtcatcagggaaatgaaaataaaaaccacaatgagatatcaccttataccaggtagaatggctactataaaaaaatgaagtgtcatcaaggatatagagaaattggaacccttcttcactgctggagggaatggaaaatggtgtagccgttatgaaaaacagtacggaggtttctcaaaaattaaaaatagaactgctatatgatccagcaatctcacttctgtatatatacccaaaataattgaaatcagaatttcaagaaaatatttacactcccatgttcattgtggcactcttcacaatcactgtttccaaagttatggaaacaacccaaatttccattgaaaaataaatggacaaagaaaatgtgcatatacgtacaatgggatattattcagcctaaaaaaagggggaatcctgttatttatgacaacatgaataaacccggaggccattatgctatgtaaaatgagcaagtaacagaaagacaaatactgcctgatttcatttatatgaggttctaaaatagtcaaactcatagaagcagagaatagaacagtggttcctagggaaaaggaggaagggagaaatgaggaaatagggagttgtctaattggtataaaattatagtatgcaagatgaattagctctaaagatcagctgtatagcagagttcgtataatgaacaatactgtattatgcacttaacattttgttaagagggtacctctcatgttaagtgttcttaccatatacatatacacaaggaagcttttggaggtgatggatatatttattaccttgattgtggtgatggtttgacaggtatgtgactatgtctaaactcatcaaattgtatacattaaatatatgcagttttataatatcaa

SEQ ID NO: 191617 - DNA, 3908 bp, Homo sapiens
  Payload ID: 17851
  Gene Name: toll-like receptor 4
  Uniprot ID: O00206
  ENST ID: ENST00000394487
  CDS Start-End: 382-2781
tttgaatacaccaattgctgtggggcggctcgaggaagagaagacaccagtgcctcagaaactgctcggtcagacggtgatagcgagccacgcattcacagggccactgctgctcacagaagcagtgaggatgatgccaggatgatgtctgcctcgcgcctggctgggactctgatcccagccatggccttcctctcctgcgtgagaccagaaagctgggagccctgcgtggagacttggccctaaaccacacagaagagctggcatgaaacccagagctttcagactccggagcctcagcccttcaccccgattccattgcttcttgctaaatgctgccgttttatcacggaggtggttcctaatattacttatcaatgcatggagctgaatttctacaaaatccccgacaacctccccttctcaaccaagaacctggacctgagctttaatcccctgaggcatttaggcagctatagcttcttcagtttcccagaactgcaggtgctggatttatccaggtgtgaaatccagacaattgaagatggggcatatcagagcctaagccacctctctaccttaatattgacaggaaaccccatccagagtttagccctgggagccttttctggactatcaagtttacagaagctggtggctgtggagacaaatctagcatctctagagaacttccccattggacatctcaaaactttgaaagaacttaatgtggctcacaatcttatccaatctttcaaattacctgagtatttttctaatctgaccaatctagagcacttggacctttccagcaacaagattcaaagtatttattgcacagacttgcgggttctacatcaaatgcccctactcaatctctctttagacctgtccctgaaccctatgaactttatccaaccaggtgcatttaaagaaattaggcttcataagctgactttaagaaataattttgatagtttaaatgtaatgaaaacttgtattcaaggtctggctggtttagaagtccatcgtttggttctgggagaatttagaaatgaaggaaacttggaaaagtttgacaaatctgctctagagggcctgtgcaatttgaccattgaagaattccgattagcatacttagactactacctcgatgatattattgacttatttaattgtttgacaaatgtttcttcattttccctggtgagtgtgactattgaaagggtaaaagacttttcttataatttcggatggcaacatttagaattagttaactgtaaatttggacagtttcccacattgaaactcaaatctctcaaaaggcttactttcacttccaacaaaggtgggaatgctttttcagaagttgatctaccaagccttgagtttctagatctcagtagaaatggcttgagtttcaaaggttgctgttctcaaagtgattttgggacaaccagcctaaagtatttagatctgagcttcaatggtgttattaccatgagttcaaacttcttgggcttagaacaactagaacatctggatttccagcattccaatttgaaacaaatgagtgagttttcagtattcctatcactcagaaacctcatttaccttgacatttctcatactcacaccagagttgctttcaatggcatcttcaatggcttgtccagtctcgaagtcttgaaaatggctggcaattctttccaggaaaacttccttccagatatcttcacagagctgagaaacttgaccttcctggacctctctcagtgtcaactggagcagttgtctccaacagcatttaactcactctccagtcttcaggtactaaatatgagccacaacaacttcttttcattggatacgtttccttataagtgtctgaactccctccaggttcttgattacagtctcaatcacataatgacttccaaaaaacaggaactacagcattttccaagtagtctagctttcttaaatcttactcagaatgactttgcttgtacttgtgaacaccagagtttcctgcaatggatcaaggaccagaggcagctcttggtggaagttgaacgaatggaatgtgcaacaccttcagataagcagggcatgcctgtgctgagtttgaatatcacctgtcagatgaataagaccatcattggtgtgtcggtcctcagtgtgcttgtagtatctgttgtagcagttctggtctataagttctattttcacctgatgcttcttgctggctgcataaagtatggtagaggtgaaaacatctatgatgcctttgttatctactcaagccaggatgaggactgggtaaggaatgagctagtaaagaatttagaagaaggggtgcctccatttcagctctgccttcactacagagactttattcccggtgtggccattgctgccaacatcatccatgaaggtttccataaaagccgaaaggtgattgttgtggtgtcccagcacttcatccagagccgctggtgtatctttgaatatgagattgctcagacctggcagtttctgagcagtcgtgctggtatcatcttcattgtcctgcagaaggtggagaagaccctgctcaggcagcaggtggagctgtaccgccttctcagcaggaacacttacctggagtgggaggacagtgtcctggggcggcacatcttctggagacgactcagaaaagccctgctggatggtaaatcatggaatccagaaggaacagtgggtacaggatgcaattggcaggaagcaacatctatctgaagaggaaaaataaaaacctcctgaggcatttcttgcccagctgggtccaacacttgttcagttaataagtattaaatgctgccacatgtcaggccttatgctaagggtgagtaattccatggtgcactagatatgcagggctgctaatctcaaggagcttccagtgcagagggaataaatgctagactaaaatacagagtcttccaggtgggcatttcaaccaactcagtcaaggaacccatgacaaagaaagtcatttcaactcttacctcatcaagttgaataaagacagagaaaacagaaagagacattgttcttttcctgagtcttttgaatggaaattgtattatgttatagccatcataaaaccattttggtagttttgactgaactgggtgttcactttttcctttttgattgaatacaatttaaattctacttgatgactgcagtcgtcaaggggctcctgatgcaagatgccccttccattttaagtctgtctccttacagaggttaaagtctagtggctaattcctaaggaaacctgattaacacatgctcacaaccatcctggtcattctcgagcatgttctattttttaactaatcacccctgatatatttttatttttatatatccagttttcatttttttacgtcttgcctataagctaatatcataaataaggttgtttaagacgtgcttcaaatatccatattaaccactatttttcaaggaagtatggaaaagtacactctgtcactttgtcactcgatgtcattccaaagttattgcctactaagtaatgactgtcatgaaagcagcattgaaataatttgtttaaagggggcactcttttaaacgggaagaaaatttccgcttcctggtcttatcatggacaatttgggctagaggcaggaaggaagtgggatgacctcaggaggtcaccttttcttgattccagaaacatatgggctgataaacccggggtgacctcatgaaatgagttgcagcagaagtttatttttttcagaacaagtgatgtttgatggacctctgaatctctttagggagacacagatggctgggatccctcccctgtacccttctcactgccaggagaacta

SEQ ID NO: 191618 - DNA, 3368 bp, Homo sapiens
  Payload ID: 17852
  Gene Name: toll-like receptor 5
  Uniprot ID: O60602
  ENST ID: ENST00000366881
  CDS Start-End: 642-3218
ggttttcaggagcccgagcgagggcgccgcttttgcgtccgggaggagccaaccgtggcgcaggcggcgcggggaggcgtcccagagtctcactctgccgcccaggctggactgcagtgacacaatctcggctgactgcaaccactgcctccagggttcaagcgattctcttgcctcagcctcccaagtagctgggattacagattgatgttcatgttcctgacactactacaagattcatactcctgatgctactgacaacgtggcttctccacagtcaccaaaccagggatgctatactggacttccctactctcatctgctccagccccctgaccttatagttgcccagctttcctggcaattgactttgcccatcaatacacaggatttagcatccagggaagatgtcggagcctcagatgttaattttctaattgagaatgttggcgctgtccgaacctggagacaggaaaacaaaaagtcctttctcctgattcaccaaaaaataaaatactgactaccatcactgtgatgagattcctatagtctcaggaactgaagtctttaaacaaccagggaccctctgcccctagaataagaacatactagaagtcccttctgctaggacaacgaggatcatgggagaccacctggaccttctcctaggagtggtgctcatggccggtcctgtgtttggaattccttcctgctcctttgatggccgaatagccttttatcgtttctgcaacctcacccaggtcccccaggtcctcaacaccactgagaggctcctgctgagcttcaactatatcaggacagtcactgcttcatccttcccctttctggaacagctgcagctgctggagctcgggagccagtatacccccttgactattgacaaggaggccttcagaaacctgcccaaccttagaatcttggacctgggaagtagtaagatatacttcttgcatccagatgcttttcagggactgttccatctgtttgaacttagactgtatttctgtggtctctctgatgctgtattgaaagatggttatttcagaaatttaaaggctttaactcgcttggatctatccaaaaatcagattcgtagcctttaccttcatccttcatttgggaagttgaattccttaaagtccatagatttttcctccaaccaaatattccttgtatgtgaacatgagctcgagcccctacaagggaaaacgctctccttttttagcctcgcagctaatagcttgtatagcagagtctcagtggactggggaaaatgtatgaacccattcagaaacatggtgctggagatactagatgtttctggaaatggctggacagtggacatcacaggaaactttagcaatgccatcagcaaaagccaggccttctctttgattcttgcccaccacatcatgggtgccgggtttggcttccataacatcaaagatcctgaccagaacacatttgctggcctggccagaagttcagtgagacacctggatctttcacatgggtttgtcttctccctgaactcacgagtctttgagacactcaaggatttgaaggttctgaaccttgcctacaacaagataaataagattgcagatgaagcattttacggacttgacaacctccaagttctcaatttgtcatataaccttctgggggaactttacagttcgaatttctatggactacctaaggtagcctacattgatttgcaaaagaatcacattgcaataattcaagaccaaacattcaaattcctggaaaaattacagaccttggatctccgagacaatgctcttacaaccattcattttattccaagcatacccgatatcttcttgagtggcaataaactagtgactttgccaaagatcaaccttacagcgaacctcatccacttatcagaaaacaggctagaaaatctagatattctctactttctcctacgggtacctcatctccagattctcattttaaatcaaaatcgcttctcctcctgtagtggagatcaaaccccttcagagaatcccagcttagaacagcttttccttggagaaaatatgttgcaacttgcctgggaaactgagctctgttgggatgtttttgagggactttctcatcttcaagttctgtatttgaatcataactatcttaattcccttccaccaggagtatttagccatctgactgcattaaggggactaagcctcaactccaacaggctgacagttctttctcacaatgatttacctgctaatttagagatcctggacatatccaggaaccagctcctagctcctaatcctgatgtatttgtatcacttagtgtcttggatataactcataacaagttcatttgtgaatgtgaacttagcacttttatcaattggcttaatcacaccaatgtcactatagctgggcctcctgcagacatatattgtgtgtaccctgactcgttctctggggtttccctcttctctctttccacggaaggttgtgatgaagaggaagtcttaaagtccctaaagttctcccttttcattgtatgcactgtcactctgactctgttcctcatgaccatcctcacagtcacaaagttccggggcttctgttttatctgttataagacagcccagagactggtgttcaaggaccatccccagggcacagaacctgatatgtacaaatatgatgcctatttgtgcttcagcagcaaagacttcacatgggtgcagaatgctttgctcaaacacctggacactcaatacagtgaccaaaacagattcaacctgtgctttgaagaaagagactttgtcccaggagaaaaccgcattgccaatatccaggatgccatctggaacagtagaaagatcgtttgtcttgtgagcagacacttccttagagatggctggtgccttgaagccttcagttatgcccagggcaggtgcttatctgaccttaacagtgctctcatcatggtggtggttgggtccttgtcccagtaccagttgatgaaacatcaatccatcagaggctttgtacagaaacagcagtatttgaggtggcctgaggatctccaggatgttggctggtttcttcataaactctctcaacagatactaaagaaagaaaaagaaaagaagaaagacaataacattccgttgcaaactgtagcaaccatctcctaatcaaaggagcaatttccaacttatctcaagccacaaataactcttcactttgtatttgcaccaagttatcattttggggtcctctctggaggttttttttttctttttgctactatgaaaacaacataaatctctcaattttcgtatcaa

SEQ ID NO: 191619 - DNA, 459 bp, Homo sapiens
  Payload ID: 17852
  Gene Name: toll-like receptor 5
  ENST ID: ENST00000407096
  CDS Start-End: 396-459
ggagccaaccgtggcgcaggcggcgcggggaggcgtcccagagggatgctatactggacttccctactctcatctgctccagccccctgaccttatagttgcccagctttcctggcaattgactttgcccatcaatacacaggatttagcatccagggaagatgtcggagcctcagatgttaattttctaattgagaatgttggcgctgtccgaacctggagacaggaaaacaaaaagtcctttctcctgattcaccaaaaaataaaatactgactaccatcactgtgatgagattcctatagtctcaggaactgaagtctttaaacaaccagggaccctctgcccctagaataagaacatactagaagtcccttctgctaggacaacgaggatcatgggagaccacctggaccttctcctaggagtggtgctcatggccggtcctgtgtttggaattc

SEQ ID NO: 191620 - DNA, 4088 bp, Homo sapiens
  Payload ID: 17852
  Gene Name: toll-like receptor 5
  Uniprot ID: O60602
  ENST ID: ENST00000540964
  CDS Start-End: 463-3039
aagtaagtttgtattttaccatagattgatgttcatgttcctgacactactacaagattcatactcctgatgctactgacaacgtggcttctccacagtcaccaaaccagggatgctatactggacttccctactctcatctgctccagccccctgaccttatagttgcccagctttcctggcaattgactttgcccatcaatacacaggatttagcatccagggaagatgtcggagcctcagatgttaattttctaattgagaatgttggcgctgtccgaacctggagacaggaaaacaaaaagtcctttctcctgattcaccaaaaaataaaatactgactaccatcactgtgatgagattcctatagtctcaggaactgaagtctttaaacaaccagggaccctctgcccctagaataagaacatactagaagtcccttctgctaggacaacgaggatcatgggagaccacctggaccttctcctaggagtggtgctcatggccggtcctgtgtttggaattccttcctgctcctttgatggccgaatagccttttatcgtttctgcaacctcacccaggtcccccaggtcctcaacaccactgagaggctcctgctgagcttcaactatatcaggacagtcactgcttcatccttcccctttctggaacagctgcagctgctggagctcgggagccagtatacccccttgactattgacaaggaggccttcagaaacctgcccaaccttagaatcttggacctgggaagtagtaagatatacttcttgcatccagatgcttttcagggactgttccatctgtttgaacttagactgtatttctgtggtctctctgatgctgtattgaaagatggttatttcagaaatttaaaggctttaactcgcttggatctatccaaaaatcagattcgtagcctttaccttcatccttcatttgggaagttgaattccttaaagtccatagatttttcctccaaccaaatattccttgtatgtgaacatgagctcgagcccctacaagggaaaacgctctccttttttagcctcgcagctaatagcttgtatagcagagtctcagtggactggggaaaatgtatgaacccattcagaaacatggtgctggagatactagatgtttctggaaatggctggacagtggacatcacaggaaactttagcaatgccatcagcaaaagccaggccttctctttgattcttgcccaccacatcatgggtgccgggtttggcttccataacatcaaagatcctgaccagaacacatttgctggcctggccagaagttcagtgagacacctggatctttcacatgggtttgtcttctccctgaactcacgagtctttgagacactcaaggatttgaaggttctgaaccttgcctacaacaagataaataagattgcagatgaagcattttacggacttgacaacctccaagttctcaatttgtcatataaccttctgggggaactttacagttcgaatttctatggactacctaaggtagcctacattgatttgcaaaagaatcacattgcaataattcaagaccaaacattcaaattcctggaaaaattacagaccttggatctccgagacaatgctcttacaaccattcattttattccaagcatacccgatatcttcttgagtggcaataaactagtgactttgccaaagatcaaccttacagcgaacctcatccacttatcagaaaacaggctagaaaatctagatattctctactttctcctacgggtacctcatctccagattctcattttaaatcaaaatcgcttctcctcctgtagtggagatcaaaccccttcagagaatcccagcttagaacagcttttccttggagaaaatatgttgcaacttgcctgggaaactgagctctgttgggatgtttttgagggactttctcatcttcaagttctgtatttgaatcataactatcttaattcccttccaccaggagtatttagccatctgactgcattaaggggactaagcctcaactccaacaggctgacagttctttctcacaatgatttacctgctaatttagagatcctggacatatccaggaaccagctcctagctcctaatcctgatgtatttgtatcacttagtgtcttggatataactcataacaagttcatttgtgaatgtgaacttagcacttttatcaattggcttaatcacaccaatgtcactatagctgggcctcctgcagacatatattgtgtgtaccctgactcgttctctggggtttccctcttctctctttccacggaaggttgtgatgaagaggaagtcttaaagtccctaaagttctcccttttcattgtatgcactgtcactctgactctgttcctcatgaccatcctcacagtcacaaagttccggggcttctgttttatctgttataagacagcccagagactggtgttcaaggaccatccccagggcacagaacctgatatgtacaaatatgatgcctatttgtgcttcagcagcaaagacttcacatgggtgcagaatgctttgctcaaacacctggacactcaatacagtgaccaaaacagattcaacctgtgctttgaagaaagagactttgtcccaggagaaaaccgcattgccaatatccaggatgccatctggaacagtagaaagatcgtttgtcttgtgagcagacacttccttagagatggctggtgccttgaagccttcagttatgcccagggcaggtgcttatctgaccttaacagtgctctcatcatggtggtggttgggtccttgtcccagtaccagttgatgaaacatcaatccatcagaggctttgtacagaaacagcagtatttgaggtggcctgaggatctccaggatgttggctggtttcttcataaactctctcaacagatactaaagaaagaaaaagaaaagaagaaagacaataacattccgttgcaaactgtagcaaccatctcctaatcaaaggagcaatttccaacttatctcaagccacaaataactcttcactttgtatttgcaccaagttatcattttggggtcctctctggaggttttttttttctttttgctactatgaaaacaacataaatctctcaattttcgtatcaacaccatgttctgtctcactaacctccaaatggaaaataatagatctagaaaattgcaactgcccttagaggtttccagtctccattgattttctttcagatccaataataccgttctgtcctgctgtgttgattatggaatgtatcctaatcatgggaagggcaccttgggagaagttgcagatggctgacgtgctttctctagcattcagctaaaaaatgggatggtccatgattctgcgttctctgtgttctgcaaaacaacattaagtagaaaacaaacagaagcagaggcacatttccttcttttgccacagaaacaatgccactgttgagtgcaagtcacactttgtctcatagataagaggtggccccaaagaagctgggatgaatgagtcactacctgtcttgtgactgtactgcacttcatgttcttaccttcggcttctccaggtctcgccctagtgagccaagaactttctctcacatgctgcctttatttaagcctggccttcaagaccttccatgatttatcaccaacctaccttttcagctttgtttcctagcacacctcattgatcagctgctcaggctgttgcatgaagaacatggactttgcacacagatcctgggttgagttctgagtcagctgtgtattagccatgtaaccttggccttggtatgcccttgctggacctacattttctcacgtaacagcatctatgtcatagaattcctgtgaaaattaaattggccaaggatgtcagggcttctcagatcttttccttcgttgccctaatgaccacaagagaacacatacactgaaggcctcctggggggcagttgcaatttcactgaagttgtatttttttatcttaaatgaaatctatgtgtattttc

SEQ ID NO: 191621 - DNA, 2938 bp, Homo sapiens
  Payload ID: 17853
  Gene Name: toll-like receptor 6
  Uniprot ID: Q9Y2C9
  ENST ID: ENST00000381950
  CDS Start-End: 67-2457
agaatttggactcatatcaagatgctctgaagaagaacaaccctttaggatagccactgcaacatcatgaccaaagacaaagaacctattgttaaaagcttccattttgtttgccttatgatcataatagttggaaccagaatccagttctccgacggaaatgaatttgcagtagacaagtcaaaaagaggtcttattcatgttccaaaagacctaccgctgaaaaccaaagtcttagatatgtctcagaactacatcgctgagcttcaggtctctgacatgagctttctatcagagttgacagttttgagactttcccataacagaatccagctacttgatttaagtgttttcaagttcaaccaggatttagaatatttggatttatctcataatcagttgcaaaagatatcctgccatcctattgtgagtttcaggcatttagatctctcattcaatgatttcaaggccctgcccatctgtaaggaatttggcaacttatcacaactgaatttcttgggattgagtgctatgaagctgcaaaaattagatttgctgccaattgctcacttgcatctaagttatatccttctggatttaagaaattattatataaaagaaaatgagacagaaagtctacaaattctgaatgcaaaaacccttcaccttgtttttcacccaactagtttattcgctatccaagtgaacatatcagttaatactttagggtgcttacaactgactaatattaaattgaatgatgacaactgtcaagttttcattaaatttttatcagaactcaccagaggttcaaccttactgaattttaccctcaaccacatagaaacgacttggaaatgcctggtcagagtctttcaatttctttggcccaaacctgtggaatatctcaatatttacaatttaacaataattgaaagcattcgtgaagaagattttacttattctaaaacgacattgaaagcattgacaatagaacatatcacgaaccaagtttttctgttttcacagacagctttgtacaccgtgttttctgagatgaacattatgatgttaaccatttcagatacaccttttatacacatgctgtgtcctcatgcaccaagcacattcaagtttttgaactttacccagaacgttttcacagatagtatttttgaaaaatgttccacgttagttaaattggagacacttatcttacaaaagaatggattaaaagaccttttcaaagtaggtctcatgacgaaggatatgccttctttggaaatactggatgttagctggaattctttggaatctggtagacataaagaaaactgcacttgggttgagagtatagtggtgttaaatttgtcttcaaatatgcttactgactctgttttcagatgtttacctcccaggatcaaggtacttgatcttcacagcaataaaataaagagcgttcctaaacaagtcgtaaaactggaagctttgcaagaactcaatgttgctttcaattctttaactgaccttcctggatgtggcagctttagcagcctttctgtattgatcattgatcacaattcagtttcccacccatcggctgatttcttccagagctgccagaagatgaggtcaataaaagcaggggacaatccattccaatgtacctgtgagctaagagaatttgtcaaaaatatagaccaagtatcaagtgaagtgttagagggctggcctgattcttataagtgtgactacccagaaagttatagaggaagcccactaaaggactttcacatgtctgaattatcctgcaacataactctgctgatcgtcaccatcggtgccaccatgctggtgttggctgtgactgtgacctccctctgcatctacttggatctgccctggtatctcaggatggtgtgccagtggacccagactcggcgcagggccaggaacatacccttagaagaactccaaagaaacctccagtttcatgcttttatttcatatagtgaacatgattctgcctgggtgaaaagtgaattggtaccttacctagaaaaagaagatatacagatttgtcttcatgagagaaactttgtccctggcaagagcattgtggaaaatatcatcaactgcattgagaagagttacaagtccatctttgttttgtctcccaactttgtccagagtgagtggtgccattacgaactctattttgcccatcacaatctctttcatgaaggatctaataacttaatcctcatcttactggaacccattccacagaacagcattcccaacaagtaccacaagctgaaggctctcatgacgcagcggacttatttgcagtggcccaaggagaaaagcaaacgtgggctcttttgggctaacattagagccgcttttaatatgaaattaacactagtcactgaaaacaatgatgtgaaatcttaaaaaaatttaggaaattcaacttaagaaaccattatttacttggatgatggtgaatagtacagtcgtaagtaactgtctggaggtgcctccattatcctcatgccttcaggaaagacttaacaaaaacaatgtttcatctggggaactgagctaggcggtgaggttagcctgccagttagagacagcccagtctcttctggtttaatcattatgtttcaaattgaaacagtctcttttgagtaaatgctcagtttttcagctcctctccactctgctttcccaaatggattctgttgtgagcaagagtttatatggcttcatggcagcaagggaacagtcaacttcagcatcatatgcaccagtcctcggagtgccctgtgaatcatattggtctttgggtcagtgtcatcattctcttcaagtctggggcttggggaaaaaattagatcagctacggcatataaaaaagtcttttgtttca

SEQ ID NO: 191622 - DNA, 5880 bp, Homo sapiens
  Payload ID: 17853
  Gene Name: toll-like receptor 6
  Uniprot ID: Q9Y2C9
  ENST ID: ENST00000436693
  CDS Start-End: 122-2512
aattgtatttccgttcatttacaagttattttctcttcttctgaaaaagagatcttgaatttggactcatatcaagatgctctgaagaagaacaaccctttaggatagccactgcaacatcatgaccaaagacaaagaacctattgttaaaagcttccattttgtttgccttatgatcataatagttggaaccagaatccagttctccgacggaaatgaatttgcagtagacaagtcaaaaagaggtcttattcatgttccaaaagacctaccgctgaaaaccaaagtcttagatatgtctcagaactacatcgctgagcttcaggtctctgacatgagctttctatcagagttgacagttttgagactttcccataacagaatccagctacttgatttaagtgttttcaagttcaaccaggatttagaatatttggatttatctcataatcagttgcaaaagatatcctgccatcctattgtgagtttcaggcatttagatctctcattcaatgatttcaaggccctgcccatctgtaaggaatttggcaacttatcacaactgaatttcttgggattgagtgctatgaagctgcaaaaattagatttgctgccaattgctcacttgcatctaagttatatccttctggatttaagaaattattatataaaagaaaatgagacagaaagtctacaaattctgaatgcaaaaacccttcaccttgtttttcacccaactagtttattcgctatccaagtgaacatatcagttaatactttagggtgcttacaactgactaatattaaattgaatgatgacaactgtcaagttttcattaaatttttatcagaactcaccagaggttcaaccttactgaattttaccctcaaccacatagaaacgacttggaaatgcctggtcagagtctttcaatttctttggcccaaacctgtggaatatctcaatatttacaatttaacaataattgaaagcattcgtgaagaagattttacttattctaaaacgacattgaaagcattgacaatagaacatatcacgaaccaagtttttctgttttcacagacagctttgtacaccgtgttttctgagatgaacattatgatgttaaccatttcagatacaccttttatacacatgctgtgtcctcatgcaccaagcacattcaagtttttgaactttacccagaacgttttcacagatagtatttttgaaaaatgttccacgttagttaaattggagacacttatcttacaaaagaatggattaaaagaccttttcaaagtaggtctcatgacgaaggatatgccttctttggaaatactggatgttagctggaattctttggaatctggtagacataaagaaaactgcacttgggttgagagtatagtggtgttaaatttgtcttcaaatatgcttactgactctgttttcagatgtttacctcccaggatcaaggtacttgatcttcacagcaataaaataaagagcgttcctaaacaagtcgtaaaactggaagctttgcaagaactcaatgttgctttcaattctttaactgaccttcctggatgtggcagctttagcagcctttctgtattgatcattgatcacaattcagtttcccacccatcggctgatttcttccagagctgccagaagatgaggtcaataaaagcaggggacaatccattccaatgtacctgtgagctaagagaatttgtcaaaaatatagaccaagtatcaagtgaagtgttagagggctggcctgattcttataagtgtgactacccagaaagttatagaggaagcccactaaaggactttcacatgtctgaattatcctgcaacataactctgctgatcgtcaccatcggtgccaccatgctggtgttggctgtgactgtgacctccctctgcatctacttggatctgccctggtatctcaggatggtgtgccagtggacccagactcggcgcagggccaggaacatacccttagaagaactccaaagaaacctccagtttcatgcttttatttcatatagtgaacatgattctgcctgggtgaaaagtgaattggtaccttacctagaaaaagaagatatacagatttgtcttcatgagagaaactttgtccctggcaagagcattgtggaaaatatcatcaactgcattgagaagagttacaagtccatctttgttttgtctcccaactttgtccagagtgagtggtgccattacgaactctattttgcccatcacaatctctttcatgaaggatctaataacttaatcctcatcttactggaacccattccacagaacagcattcccaacaagtaccacaagctgaaggctctcatgacgcagcggacttatttgcagtggcccaaggagaaaagcaaacgtgggctcttttgggctaacattagagccgcttttaatatgaaattaacactagtcactgaaaacaatgatgtgaaatcttaaaaaaatttaggaaattcaacttaagaaaccattatttacttggatgatggtgaatagtacagtcgtaagtaactgtctggaggtgcctccattatcctcatgccttcaggaaagacttaacaaaaacaatgtttcatctggggaactgagctaggcggtgaggttagcctgccagttagagacagcccagtctcttctggtttaatcattatgtttcaaattgaaacagtctcttttgagtaaatgctcagtttttcagctcctctccactctgctttcccaaatggattctgttgtgagcaagagtttatatggcttcatggcagcaagggaacagtcaacttcagcatcatatgcaccagtcctcggagtgccctgtgaatcatattggtctttgggtcagtgtcatcattctcttcaagtctggggcttggggaaaaaattagatcagctacggcatataaaaaagtcttttgtttcacatatgtgtaatagcttatttaattttttatcctgctacacaaatatgtaattaaccaatgaggactcatgacttgatagtgtatgtatgtaaagggatatatggacttaatcataagctgttgaggtgaaagacgtggatccacctgctttccaagaaaactcggccaaatttatttgcagctggatattgaatgggacttttctggttgtcttagaattctggctaaaggctcaaagctgacgaaagacagtaactgcaccaacatgatactagacacagccagtctggacttatcaaaagagcagaaagagaccaatgactcccagtccgtattatccatctctagaagactagagtcaaaagcgtgattaaagagtcattaagcggaggttctaggccatagggagattgctttgaatttcttgcagacaagtgtgagggactcagcatggtagaaggtagcctggcatcccactccaagactgaaagcttgcagagtaacaggagcacacaggttcagtgcagcagatgtggtgtggcttgagaattcttggaagagcttgatgagtgtttgctggagtccgagggtgggcactgggaacacagagactggtaaatagtgtttggcaaatacaagtgcttgatgaatatttgttgaatgaatagatgagttcttcccccctggggaattcaggaggtgaaaggttggcttgagcacccaaaatggcaggatgagagaagagaagcactgatagcaacctgccctcccattattgacatggtaaaaggatgtgaatttcttcacatggctttgactatggaagagtagctgggcttgcattgtcatgacgggatatcagccaacagggtagcctgttgtgcaaagaaactatagcagtaagaggacacggggttaggcagaagaggggtttggggtggaggttgctgcaagaggtcagccagataatgtggccctgcatcatggaactgtgcaatgtggggtacactcaaggccctccaataactcacagatgtgccctatgaaaaagccagcatttggactctgccatagcagctggcaggatcatgctggcctgtctgccttattcaatagttaactacaggaagatctgctcctctttgtgtaataccctcttcccttgcaatggcatagggacatctagaatatagagaagacagagacaatggaggaagagtaaagaaactgactatatgccttcgtcatttcactgcaaggaaggccaagcagatttttgaatgaggtgtgagattgctgttaaattggactggcctggacattttaatcccttaaatagaggtgcaatgactaaagtgagatttgtcactaaaatttatggtatctgcccaagattcaggagtgatgatgggaggagatccaacagaactttgttgtaaggcaatggttagagaaaaatgaagccctcgctttctggacttagttcattcaataaaccagtttcggccaggcacgttggctcacatctataatcccagtactgtgggaggctgaggcaggtggatcacttgaggtcaggagttcgagaccagcctggccaacatggtgaaaccctgtctgtactaaaaatacaaaaattagccgggtgtggtggtgtgcacctgtagtcccagctactcgggaggctgaggcaggaaaatcacttgaacctgggagacagaggctgtagtgagctgagacagcgctactgtactccccgctgggcaacagagtgagactccatctcaaaaaagttaaaagaaaaaaaatctggtttcataatagctgtaacgaaataagccttaatgatattttattagcatcatcttctgtctgcattagcccttccttgctcttcaggagaacaacatttgttttcctccctaggctctatcccaaacggcacattcttccacaacccctgttgaacagattttttaaactgttgcctaatctaaaaacaataaaaacaacaaacaaccacagtaacaacaacgacaaaaaaaactgccacagattctaaataatcagatctttttaaatggtatcaatgtttcccacaaaatattgttgacattgaaaatatagaattttagcattaattttgttaaacctacatcccctcggcagaggggcctccctgcatcccagtggaaagtaggttcctcacagtcctctccgtcacattcttcccatttcttttcttcacagaacacatcactgtctaaaattatcttgtttgcttagttgcttactcatcttcttcttctctcctctgaagtctaagctccaggaaaaagggagacttctccacctgttccctgcctctccccagtgccgaggggacactgtgcaccccattgtagatgcgcagtaaaaactcgtgggatgagcaaatgactctgaaacggtcccatgcgggaaatgtccatgaagtcctggattttatctaaaaagcccaggcaggggggggcgggggcggcggggctacagttccacgctgagctgcctcctggccgctcgtccccgccgcagtgcctgggcggcccgggcgcccgaccttggccgtggacaccttcgcggtgggtgctgctcctccccatctgccactggaagatgctggggcgacccggctccaggtttagcaggacactgagaaaagggaatggctgcctttcggaggctgggtgagcccttctctgtgcctcacctgcccgccccacagcggccctgcacctcgtcccacggggcccattgccccggtaggatgcgcgcttttgttttgagggtcaggcatcttccctgccgtcgtttctgggaggttgaaaaattgatccagaaagacct

SEQ ID NO: 191623 - DNA, 548 bp, Homo sapiens
  Payload ID: 17853
  Gene Name: toll-like receptor 6
  ENST ID: ENST00000514655
  CDS Start-End: 275-548
aattgtatttccgttcatttacaagttattttctcttcttctgaaaaagagatcttgtggccaagtggatttttcaaatgtatgtgtgtctctgtgggtgttctgatgggcagttgggagaagttatatggatcagtgaagagcttttaaccatacgccattcagtaataaaagttccccaactcagagttttcactcttccaaagaaagaatttggactcatatcaagatgctctgaagaagaacaaccctttaggatagccactgcaacatcatgaccaaagacaaagaacctattgttaaaagcttccattttgtttgccttatgatcataatagttggaaccagaatccagttctccgacggaaatgaatttgcagtagacaagtcaaaaagaggtcttattcatgttccaaaagacctaccgctgaaaaccaaagtcttagatatgtctcagaactacatcgctgagcttcaggtctctgacatgagctttctatcagagttgacagttttgagactttcccataacagaatccagctacttg

SEQ ID NO: 191624 - DNA, 572 bp, Homo sapiens
  Payload ID: 17853
  Gene Name: toll-like receptor 6
  ENST ID: ENST00000508254
  CDS Start-End: 122-572
aattgtatttccgttcatttacaagttattttctcttcttctgaaaaagagatcttgaatttggactcatatcaagatgctctgaagaagaacaaccctttaggatagccactgcaacatcatgaccaaagacaaagaacctattgttaaaagcttccattttgtttgccttatgatcataatagttggaaccagaatccagttctccgacggaaatgaatttgcagtagacaagtcaaaaagaggtcttattcatgttccaaaagacctaccgctgaaaaccaaagtcttagatatgtctcagaactacatcgctgagcttcaggtctctgacatgagctttctatcagagttgacagttttgagactttcccataacagaatccagctacttgatttaagtgttttcaagttcaaccaggatttagaatatttggatttatctcataatcagttgcaaaagatatcctgccatcctattgtgagtttcaggcatttagatctctcattcaatgatttcaaggccctgcccatctgtaaggaatttggcaacttatcacaactgaatttct

SEQ ID NO: 191625 - DNA, 1443 bp, Homo sapiens
  Payload ID: 17853
  Gene Name: toll-like receptor 6
  Uniprot ID: Q9Y2C9
  ENST ID: ENST00000610323
  CDS Start-End: 1-1443
atgaccaaagacaaagaacctattgttaaaagcttccattttgtttgccttatgatcataatagttggaaccagaatccagttctccgacggaaatgaatttgcagtagacaagtcaaaaagaggtcttattcatgttccaaaagacctaccgctgaaaaccaaagtcttagatatgtctcagaactacatcgctgagcttcaggtctctgacatgagctttctatcagagttgacagttttgagactttcccataacagaatccagctacttgatttaagtgttttcaagttcaaccaggatttagaatatttggatttatctcataatcagttgcaaaagatatcctgccatcctattgtgagtttcaggcatttagatctctcattcaatgatttcaaggccctgcccatctgtaaggaatttggcaacttatcacaactgaatttcttgggattgagtgctatgaagctgcaaaaattagatttgctgccaattgctcacttgcatctaagttatatccttctggatttaagaaattattatataaaagaaaatgagacagaaagtctacaaattctgaatgcaaaaacccttcaccttgtttttcacccaactagtttattcgctatccaagtgaacatatcagttaatactttagggtgcttacaactgactaatattaaattgaatgatgacaactgtcaagttttcattaaatttttatcagaactcaccagaggttcaaccttactgaattttaccctcaaccacatagaaacgacttggaaatgcctggtcagagtctttcaatttctttggcccaaacctgtggaatatctcaatatttacaatttaacaataattgaaagcattcgtgaagaagattttacttattctaaaacgacattgaaagcattgacaatagaacatatcacgaaccaagtttttctgttttcacagacagctttgtacaccgtgttttctgagatgaacattatgatgttaaccatttcagatacaccttttatacacatgctgtgtcctcatgcaccaagcacattcaagtttttgaactttacccagaacgttttcacagatagtatttttgaaaaatgttccacgttagttaaattggagacacttatctttgttttgtctcccaactttgtccagagtgagtggtgccattacgaactctattttgcccatcacaatctctttcatgaaggatctaataacttaatcctcatcttactggaacccattccacagaacagcattcccaacaagtaccacaagctgaaggctctcatgacgcagcggacttatttgcagtggcccaaggagaaaagcaaacgtgggctcttttgggctaacattagagccgcttttaatatgaaattaacactagtcactgaaaacaatgatgtgaaatcttaa

SEQ ID NO: 191626 - DNA, 5011 bp, Homo sapiens
  Payload ID: 17854
  Gene Name: toll-like receptor 7
  Uniprot ID: Q9NYK1
  ENST ID: ENST00000380659
  CDS Start-End: 140-3289
gaagactccagatataggatcactccatgccatcaagaaagttgatgctattgggcccatctcaagctgatcttggcacctctcatgctctgctctcttcaaccagacctctacattccattttggaagaagactaaaaatggtgtttccaatgtggacactgaagagacaaattcttatcctttttaacataatcctaatttccaaactccttggggctagatggtttcctaaaactctgccctgtgatgtcactctggatgttccaaagaaccatgtgatcgtggactgcacagacaagcatttgacagaaattcctggaggtattcccacgaacaccacgaacctcaccctcaccattaaccacataccagacatctccccagcgtcctttcacagactggaccatctggtagagatcgatttcagatgcaactgtgtacctattccactggggtcaaaaaacaacatgtgcatcaagaggctgcagattaaacccagaagctttagtggactcacttatttaaaatccctttacctggatggaaaccagctactagagataccgcagggcctcccgcctagcttacagcttctcagccttgaggccaacaacatcttttccatcagaaaagagaatctaacagaactggccaacatagaaatactctacctgggccaaaactgttattatcgaaatccttgttatgtttcatattcaatagagaaagatgccttcctaaacttgacaaagttaaaagtgctctccctgaaagataacaatgtcacagccgtccctactgttttgccatctactttaacagaactatatctctacaacaacatgattgcaaaaatccaagaagatgattttaataacctcaaccaattacaaattcttgacctaagtggaaattgccctcgttgttataatgccccatttccttgtgcgccgtgtaaaaataattctcccctacagatccctgtaaatgcttttgatgcgctgacagaattaaaagttttacgtctacacagtaactctcttcagcatgtgcccccaagatggtttaagaacatcaacaaactccaggaactggatctgtcccaaaacttcttggccaaagaaattggggatgctaaatttctgcattttctccccagcctcatccaattggatctgtctttcaattttgaacttcaggtctatcgtgcatctatgaatctatcacaagcattttcttcactgaaaagcctgaaaattctgcggatcagaggatatgtctttaaagagttgaaaagctttaacctctcgccattacataatcttcaaaatcttgaagttcttgatcttggcactaactttataaaaattgctaacctcagcatgtttaaacaatttaaaagactgaaagtcatagatctttcagtgaataaaatatcaccttcaggagattcaagtgaagttggcttctgctcaaatgccagaacttctgtagaaagttatgaaccccaggtcctggaacaattacattatttcagatatgataagtatgcaaggagttgcagattcaaaaacaaagaggcttctttcatgtctgttaatgaaagctgctacaagtatgggcagaccttggatctaagtaaaaatagtatattttttgtcaagtcctctgattttcagcatctttctttcctcaaatgcctgaatctgtcaggaaatctcattagccaaactcttaatggcagtgaattccaacctttagcagagctgagatatttggacttctccaacaaccggcttgatttactccattcaacagcatttgaagagcttcacaaactggaagttctggatataagcagtaatagccattattttcaatcagaaggaattactcatatgctaaactttaccaagaacctaaaggttctgcagaaactgatgatgaacgacaatgacatctcttcctccaccagcaggaccatggagagtgagtctcttagaactctggaattcagaggaaatcacttagatgttttatggagagaaggtgataacagatacttacaattattcaagaatctgctaaaattagaggaattagacatctctaaaaattccctaagtttcttgccttctggagtttttgatggtatgcctccaaatctaaagaatctctctttggccaaaaatgggctcaaatctttcagttggaagaaactccagtgtctaaagaacctggaaactttggacctcagccacaaccaactgaccactgtccctgagagattatccaactgttccagaagcctcaagaatctgattcttaagaataatcaaatcaggagtctgacgaagtattttctacaagatgccttccagttgcgatatctggatctcagctcaaataaaatccagatgatccaaaagaccagcttcccagaaaatgtcctcaacaatctgaagatgttgcttttgcatcataatcggtttctgtgcacctgtgatgctgtgtggtttgtctggtgggttaaccatacggaggtgactattccttacctggccacagatgtgacttgtgtggggccaggagcacacaagggccaaagtgtgatctccctggatctgtacacctgtgagttagatctgactaacctgattctgttctcactttccatatctgtatctctctttctcatggtgatgatgacagcaagtcacctctatttctgggatgtgtggtatatttaccatttctgtaaggccaagataaaggggtatcagcgtctaatatcaccagactgttgctatgatgcttttattgtgtatgacactaaagacccagctgtgaccgagtgggttttggctgagctggtggccaaactggaagacccaagagagaaacattttaatttatgtctcgaggaaagggactggttaccagggcagccagttctggaaaacctttcccagagcatacagcttagcaaaaagacagtgtttgtgatgacagacaagtatgcaaagactgaaaattttaagatagcattttacttgtcccatcagaggctcatggatgaaaaagttgatgtgattatcttgatatttcttgagaagccctttcagaagtccaagttcctccagctccggaaaaggctctgtgggagttctgtccttgagtggccaacaaacccgcaagctcacccatacttctggcagtgtctaaagaacgccctggccacagacaatcatgtggcctatagtcaggtgttcaaggaaacggtctagcccttctttgcaaaacacaactgcctagtttaccaaggagaggcctggctgtttaaattgttttcatatatatcacaccaaaagcgtgttttgaaattcttcaagaaatgagattgcccatatttcaggggagccaccaacgtctgtcacaggagttggaaagatggggtttatataatgcatcaagtcttctttcttatctctctgtgtctctatttgcacttgagtctctcacctcagctcctgtaaaagagtggcaagtaaaaaacatggggctctgattctcctgtaattgtgataattaaatatacacacaatcatgacattgagaagaactgcatttctacccttaaaaagtactggtatatacagaaatagggttaaaaaaaactcaagctctctctatatgagaccaaaatgtactagagttagtttagtgaaataaaaaaccagtcagctggccgggcatggtggctcatgcttgtaatcccagcactttgggaggccgaggcaggtggatcacgaggtcaggagtttgagaccagtctggccaacatggtgaaaccccgtctgtactaaaaatacaaaaattagctgggcgtggtggtgggtgcctgtaatcccagctacttgggaggctgaggcaggagaatcgcttgaacccgggaggtggaggtggcagtgagccgagatcacgccactgcaatgcagcccgggcaacagagctagactgtctcaaaagaacaaaaaaaaaaaaacacaaaaaaactcagtcagcttcttaaccaattgcttccgtgtcatccagggccccattctgtgcagattgagtgtgggcaccacacaggtggttgctgcttcagtgcttcctgctctttttccttgggcctgcttctgggttccatagggaaacagtaagaaagaaagacacatccttaccataaatgcatatggtccacctacaaatagaaaaatatttaaatgatctgcctttatacaaagtgatattctctacctttgataatttacctgcttaaatgtttttatctgcactgcaaagtactgtatccaaagtaaaatttcctcatccaatatctttcaaactgttttgttaactaatgccatatatttgtaagtatctgcacacttgatacagcaacgttagatggttttgatggtaaaccctaaaggaggactccaagagtgtgtatttatttatagttttatcagagatgacaattatttgaatgccaattatatggattcctttcattttttgctggaggatgggagaagaaaccaaagtttatagaccttcacattgagaaagcttcagttttgaacttcagctatcagattcaaaaacaacagaaagaaccaagacattcttaagatgcctgtactttcagctgggtataaattcatgagttcaaagattgaaacctgaccaatttgctttatttcatggaagaagtgatctacaaaggtgtttgtgccatttggaaaacagcgtgcatgtgttcaagccttagattggcgatgtcgtattttcctcacgtgtggcaatgccaaaggctttactttacctgtgagtacacactatatgaattatttccaacgtacatttaatcaataagggtcacaaattcccaaatcaatctctggaataaatagagaggtaattaaattgctggagccaactatttcacaacttctgtaagc

SEQ ID NO: 191627 - DNA, 4216 bp, Homo sapiens
  Payload ID: 17855
  Gene Name: toll-like receptor 8
  Uniprot ID: Q9NR97
  ENST ID: ENST00000218032
  CDS Start-End: 88-3213
agtttctcttctcggccacctcctgcatagagggtaccattctgcgctgctgcaagttacggaatgaaaaattagaacaacagaaacatggaaaacatgttccttcagtcgtcaatgctgacctgcattttcctgctaatatctggttcctgtgagttatgcgccgaagaaaatttttctagaagctatccttgtgatgagaaaaagcaaaatgactcagttattgcagagtgcagcaatcgtcgactacaggaagttccccaaacggtgggcaaatatgtgacagaactagacctgtctgataatttcatcacacacataacgaatgaatcatttcaagggctgcaaaatctcactaaaataaatctaaaccacaaccccaatgtacagcaccagaacggaaatcccggtatacaatcaaatggcttgaatatcacagacggggcattcctcaacctaaaaaacctaagggagttactgcttgaagacaaccagttaccccaaataccctctggtttgccagagtctttgacagaacttagtctaattcaaaacaatatatacaacataactaaagagggcatttcaagacttataaacttgaaaaatctctatttggcctggaactgctattttaacaaagtttgcgagaaaactaacatagaagatggagtatttgaaacgctgacaaatttggagttgctatcactatctttcaattctctttcacacgtgccacccaaactgccaagctccctacgcaaactttttctgagcaacacccagatcaaatacattagtgaagaagatttcaagggattgataaatttaacattactagatttaagcgggaactgtccgaggtgcttcaatgccccatttccatgcgtgccttgtgatggtggtgcttcaattaatatagatcgttttgcttttcaaaacttgacccaacttcgatacctaaacctctctagcacttccctcaggaagattaatgctgcctggtttaaaaatatgcctcatctgaaggtgctggatcttgaattcaactatttagtgggagaaatagcctctggggcatttttaacgatgctgccccgcttagaaatacttgacttgtcttttaactatataaaggggagttatccacagcatattaatatttccagaaacttctctaaacttttgtctctacgggcattgcatttaagaggttatgtgttccaggaactcagagaagatgatttccagcccctgatgcagcttccaaacttatcgactatcaacttgggtattaattttattaagcaaatcgatttcaaacttttccaaaatttctccaatctggaaattatttacttgtcagaaaacagaatatcaccgttggtaaaagatacccggcagagttatgcaaatagttcctcttttcaacgtcatatccggaaacgacgctcaacagattttgagtttgacccacattcgaacttttatcatttcacccgtcctttaataaagccacaatgtgctgcttatggaaaagccttagatttaagcctcaacagtattttcttcattgggccaaaccaatttgaaaatcttcctgacattgcctgtttaaatctgtctgcaaatagcaatgctcaagtgttaagtggaactgaattttcagccattcctcatgtcaaatatttggatttgacaaacaatagactagactttgataatgctagtgctcttactgaattgtccgacttggaagttctagatctcagctataattcacactatttcagaatagcaggcgtaacacatcatctagaatttattcaaaatttcacaaatctaaaagttttaaacttgagccacaacaacatttatactttaacagataagtataacctggaaagcaagtccctggtagaattagttttcagtggcaatcgccttgacattttgtggaatgatgatgacaacaggtatatctccattttcaaaggtctcaagaatctgacacgtctggatttatcccttaataggctgaagcacatcccaaatgaagcattccttaatttgccagcgagtctcactgaactacatataaatgataatatgttaaagttttttaactggacattactccagcagtttcctcgtctcgagttgcttgacttacgtggaaacaaactactctttttaactgatagcctatctgactttacatcttcccttcggacactgctgctgagtcataacaggatttcccacctaccctctggctttctttctgaagtcagtagtctgaagcacctcgatttaagttccaatctgctaaaaacaatcaacaaatccgcacttgaaactaagaccaccaccaaattatctatgttggaactacacggaaacccctttgaatgcacctgtgacattggagatttccgaagatggatggatgaacatctgaatgtcaaaattcccagactggtagatgtcatttgtgccagtcctggggatcaaagagggaagagtattgtgagtctggagctaacaacttgtgtttcagatgtcactgcagtgatattatttttcttcacgttctttatcaccaccatggttatgttggctgccctggctcaccatttgttttactgggatgtttggtttatatataatgtgtgtttagctaaggtaaaaggctacaggtctctttccacatcccaaactttctatgatgcttacatttcttatgacaccaaagatgcctctgttactgactgggtgataaatgagctgcgctaccaccttgaagagagccgagacaaaaacgttctcctttgtctagaggagagggattgggacccgggattggccatcatcgacaacctcatgcagagcatcaaccaaagcaagaaaacagtatttgttttaaccaaaaaatatgcaaaaagctggaactttaaaacagctttttacttggctttgcagaggctaatggatgagaacatggatgtgattatatttatcctgctggagccagtgttacagcattctcagtatttgaggctacggcagcggatctgtaagagctccatcctccagtggcctgacaacccgaaggcagaaggcttgttttggcaaactctgagaaatgtggtcttgactgaaaatgattcacggtataacaatatgtatgtcgattccattaagcaatactaactgacgttaagtcatgatttcgcgccataataaagatgcaaaggaatgacatttctgtattagttatctattgctatgtaacaaattatcccaaaacttagtggtttaaaacaacacatttgctggcccacagtttttgagggtcaggagtccaggcccagcataactgggtcctctgctcagggtgtctcagaggctgcaatgtaggtgttcaccagagacataggcatcactggggtcacactcatgtggttgttttctggattcaattcctcctgggctattggccaaaggctatactcatgtaagccatgcgagcctctcccacaaggcagcttgcttcatcagagctagcaaaaaagagaggttgctagcaagatgaagtcacaatcttttgtaatcgaatcaaaaaagtgatatctcatcactttggccatattctatttgttagaagtaaaccacaggtcccaccagctccatgggagtgaccacctcagtccagggaaaacagctgaagaccaagatggtgagctctgattgcttcagttggtcatcaactattttcccttgactgctgtcctgggatggcctgctatcttgatgatagattgtgaatatcaggaggcagggatcactgtggaccatcttagcagttgacctaacacatcttcttttcaatatctaagaacttttgccactgtgactaatggtcctaatattaagctgttgtttatatttatcatatatctatggctacatggttatattatgctgtggttgcgttcggttttatttacagttgcttttacaaatatttgctgtaacatttgacttctaaggtttagatgccatttaagaactgagatggatagcttttaaagcatcttttacttcttaccattttttaaaagtatgcagctaaattcgaagcttttggtctatattgttaattgccattgctgtaaatcttaaaatgaatgaataaaaatgtttcattttacaa

SEQ ID NO: 191628 - DNA, 3367 bp, Homo sapiens
  Payload ID: 17855
  Gene Name: toll-like receptor 8
  Uniprot ID: Q9NR97
  ENST ID: ENST00000311912
  CDS Start-End: 152-3331
ctcctgcatagagggtaccattctgcgctgctgcaagttacggaatgaaaaattagaacaacagaaacatggttctcttgacacttcagtgttagggaacatcagcaagacccatcccaggagaccttgaaggaagcctttgaaagggagaatgaaggagtcatctttgcaaaatagctcctgcagcctgggaaaggagactaaaaaggaaaacatgttccttcagtcgtcaatgctgacctgcattttcctgctaatatctggttcctgtgagttatgcgccgaagaaaatttttctagaagctatccttgtgatgagaaaaagcaaaatgactcagttattgcagagtgcagcaatcgtcgactacaggaagttccccaaacggtgggcaaatatgtgacagaactagacctgtctgataatttcatcacacacataacgaatgaatcatttcaagggctgcaaaatctcactaaaataaatctaaaccacaaccccaatgtacagcaccagaacggaaatcccggtatacaatcaaatggcttgaatatcacagacggggcattcctcaacctaaaaaacctaagggagttactgcttgaagacaaccagttaccccaaataccctctggtttgccagagtctttgacagaacttagtctaattcaaaacaatatatacaacataactaaagagggcatttcaagacttataaacttgaaaaatctctatttggcctggaactgctattttaacaaagtttgcgagaaaactaacatagaagatggagtatttgaaacgctgacaaatttggagttgctatcactatctttcaattctctttcacacgtgccacccaaactgccaagctccctacgcaaactttttctgagcaacacccagatcaaatacattagtgaagaagatttcaagggattgataaatttaacattactagatttaagcgggaactgtccgaggtgcttcaatgccccatttccatgcgtgccttgtgatggtggtgcttcaattaatatagatcgttttgcttttcaaaacttgacccaacttcgatacctaaacctctctagcacttccctcaggaagattaatgctgcctggtttaaaaatatgcctcatctgaaggtgctggatcttgaattcaactatttagtgggagaaatagcctctggggcatttttaacgatgctgccccgcttagaaatacttgacttgtcttttaactatataaaggggagttatccacagcatattaatatttccagaaacttctctaaacttttgtctctacgggcattgcatttaagaggttatgtgttccaggaactcagagaagatgatttccagcccctgatgcagcttccaaacttatcgactatcaacttgggtattaattttattaagcaaatcgatttcaaacttttccaaaatttctccaatctggaaattatttacttgtcagaaaacagaatatcaccgttggtaaaagatacccggcagagttatgcaaatagttcctcttttcaacgtcatatccggaaacgacgctcaacagattttgagtttgacccacattcgaacttttatcatttcacccgtcctttaataaagccacaatgtgctgcttatggaaaagccttagatttaagcctcaacagtattttcttcattgggccaaaccaatttgaaaatcttcctgacattgcctgtttaaatctgtctgcaaatagcaatgctcaagtgttaagtggaactgaattttcagccattcctcatgtcaaatatttggatttgacaaacaatagactagactttgataatgctagtgctcttactgaattgtccgacttggaagttctagatctcagctataattcacactatttcagaatagcaggcgtaacacatcatctagaatttattcaaaatttcacaaatctaaaagttttaaacttgagccacaacaacatttatactttaacagataagtataacctggaaagcaagtccctggtagaattagttttcagtggcaatcgccttgacattttgtggaatgatgatgacaacaggtatatctccattttcaaaggtctcaagaatctgacacgtctggatttatcccttaataggctgaagcacatcccaaatgaagcattccttaatttgccagcgagtctcactgaactacatataaatgataatatgttaaagttttttaactggacattactccagcagtttcctcgtctcgagttgcttgacttacgtggaaacaaactactctttttaactgatagcctatctgactttacatcttcccttcggacactgctgctgagtcataacaggatttcccacctaccctctggctttctttctgaagtcagtagtctgaagcacctcgatttaagttccaatctgctaaaaacaatcaacaaatccgcacttgaaactaagaccaccaccaaattatctatgttggaactacacggaaacccctttgaatgcacctgtgacattggagatttccgaagatggatggatgaacatctgaatgtcaaaattcccagactggtagatgtcatttgtgccagtcctggggatcaaagagggaagagtattgtgagtctggagctaacaacttgtgtttcagatgtcactgcagtgatattatttttcttcacgttctttatcaccaccatggttatgttggctgccctggctcaccatttgttttactgggatgtttggtttatatataatgtgtgtttagctaaggtaaaaggctacaggtctctttccacatcccaaactttctatgatgcttacatttcttatgacaccaaagatgcctctgttactgactgggtgataaatgagctgcgctaccaccttgaagagagccgagacaaaaacgttctcctttgtctagaggagagggattgggacccgggattggccatcatcgacaacctcatgcagagcatcaaccaaagcaagaaaacagtatttgttttaaccaaaaaatatgcaaaaagctggaactttaaaacagctttttacttggctttgcagaggctaatggatgagaacatggatgtgattatatttatcctgctggagccagtgttacagcattctcagtatttgaggctacggcagcggatctgtaagagctccatcctccagtggcctgacaacccgaaggcagaaggcttgttttggcaaactctgagaaatgtggtcttgactgaaaatgattcacggtataacaatatgtatgtcgattccattaagcaatactaactgacgttaagtcatgatttcgcgccataataaaga

SEQ ID NO: 191629 - DNA, 3870 bp, Homo sapiens
  Payload ID: 17856
  Gene Name: toll-like receptor 9
  Uniprot ID: Q9NR96
  ENST ID: ENST00000360658
  CDS Start-End: 635-3733
ggaggtcttgtttccggaagatgttgcaaggctgtggtgaaggcaggtgcagcctagcctcctgctcaagctacaccctggccctccacgcatgaggccctgcagaactctggagatggtgcctacaagggcagaaaaggacaagtcggcagccgctgtcctgagggcaccagctgtggtgcaggagccaagacctgagggtggaagtgtcctcttagaatggggagtgcccagcaaggtgtacccgctactggtgctatccagaattcccatctctccctgctctctgcctgagctctgggccttagctcctccctgggcttggtagaggacaggtgtgaggccctcatgggatgtaggctgtctgagaggggagtggaaagaggaaggggtgaaggagctgtctgccatttgactatgcaaatggcctttgactcatgggaccctgtcctcctcactgggggcagggtggagtggagggggagctactaggctggtataaaaatcttacttcctctattctctgagccgctgctgcccctgtgggaagggacctcgagtgtgaagcatccttccctgtagctgctgtccagtctgcccgccagaccctctggagaagcccctgccccccagcatgggtttctgccgcagcgccctgcacccgctgtctctcctggtgcaggccatcatgctggccatgaccctggccctgggtaccttgcctgccttcctaccctgtgagctccagccccacggcctggtgaactgcaactggctgttcctgaagtctgtgccccacttctccatggcagcaccccgtggcaatgtcaccagcctttccttgtcctccaaccgcatccaccacctccatgattctgactttgcccacctgcccagcctgcggcatctcaacctcaagtggaactgcccgccggttggcctcagccccatgcacttcccctgccacatgaccatcgagcccagcaccttcttggctgtgcccaccctggaagagctaaacctgagctacaacaacatcatgactgtgcctgcgctgcccaaatccctcatatccctgtccctcagccataccaacatcctgatgctagactctgccagcctcgccggcctgcatgccctgcgcttcctattcatggacggcaactgttattacaagaacccctgcaggcaggcactggaggtggccccgggtgccctccttggcctgggcaacctcacccacctgtcactcaagtacaacaacctcactgtggtgccccgcaacctgccttccagcctggagtatctgctgttgtcctacaaccgcatcgtcaaactggcgcctgaggacctggccaatctgaccgccctgcgtgtgctcgatgtgggcggaaattgccgccgctgcgaccacgctcccaacccctgcatggagtgccctcgtcacttcccccagctacatcccgataccttcagccacctgagccgtcttgaaggcctggtgttgaaggacagttctctctcctggctgaatgccagttggttccgtgggctgggaaacctccgagtgctggacctgagtgagaacttcctctacaaatgcatcactaaaaccaaggccttccagggcctaacacagctgcgcaagcttaacctgtccttcaattaccaaaagagggtgtcctttgcccacctgtctctggccccttccttcgggagcctggtcgccctgaaggagctggacatgcacggcatcttcttccgctcactcgatgagaccacgctccggccactggcccgcctgcccatgctccagactctgcgtctgcagatgaacttcatcaaccaggcccagctcggcatcttcagggccttccctggcctgcgctacgtggacctgtcggacaaccgcatcagcggagcttcggagctgacagccaccatgggggaggcagatggaggggagaaggtctggctgcagcctggggaccttgctccggccccagtggacactcccagctctgaagacttcaggcccaactgcagcaccctcaacttcaccttggatctgtcacggaacaacctggtgaccgtgcagccggagatgtttgcccagctctcgcacctgcagtgcctgcgcctgagccacaactgcatctcgcaggcagtcaatggctcccagttcctgccgctgaccggtctgcaggtgctagacctgtcccacaataagctggacctctaccacgagcactcattcacggagctaccgcgactggaggccctggacctcagctacaacagccagccctttggcatgcagggcgtgggccacaacttcagcttcgtggctcacctgcgcaccctgcgccacctcagcctggcccacaacaacatccacagccaagtgtcccagcagctctgcagtacgtcgctgcgggccctggacttcagcggcaatgcactgggccatatgtgggccgagggagacctctatctgcacttcttccaaggcctgagcggtttgatctggctggacttgtcccagaaccgcctgcacaccctcctgccccaaaccctgcgcaacctccccaagagcctacaggtgctgcgtctccgtgacaattacctggccttctttaagtggtggagcctccacttcctgcccaaactggaagtcctcgacctggcaggaaaccagctgaaggccctgaccaatggcagcctgcctgctggcacccggctccggaggctggatgtcagctgcaacagcatcagcttcgtggcccccggcttcttttccaaggccaaggagctgcgagagctcaaccttagcgccaacgccctcaagacagtggaccactcctggtttgggcccctggcgagtgccctgcaaatactagatgtaagcgccaaccctctgcactgcgcctgtggggcggcctttatggacttcctgctggaggtgcaggctgccgtgcccggtctgcccagccgggtgaagtgtggcagtccgggccagctccagggcctcagcatctttgcacaggacctgcgcctctgcctggatgaggccctctcctgggactgtttcgccctctcgctgctggctgtggctctgggcctgggtgtgcccatgctgcatcacctctgtggctgggacctctggtactgcttccacctgtgcctggcctggcttccctggcgggggcggcaaagtgggcgagatgaggatgccctgccctacgatgccttcgtggtcttcgacaaaacgcagagcgcagtggcagactgggtgtacaacgagcttcgggggcagctggaggagtgccgtgggcgctgggcactccgcctgtgcctggaggaacgcgactggctgcctggcaaaaccctctttgagaacctgtgggcctcggtctatggcagccgcaagacgctgtttgtgctggcccacacggaccgggtcagtggtctcttgcgcgccagcttcctgctggcccagcagcgcctgctggaggaccgcaaggacgtcgtggtgctggtgatcctgagccctgacggccgccgctcccgctacgtgcggctgcgccagcgcctctgccgccagagtgtcctcctctggccccaccagcccagtggtcagcgcagcttctgggcccagctgggcatggccctgaccagggacaaccaccacttctataaccggaacttctgccagggacccacggccgaatagccgtgagccggaatcctgcacggtgccacctccacactcacctcacctctgcctgcctggtctgaccctcccctgctcgcctccctcaccccacacctgacacagagcaggcactcaataaatgctaccgaaggcta

SEQ ID NO: 191630 - DNA, 2676 bp, Homo sapiens
  Payload ID: 17857
  Gene Name: toll-like receptor adaptor molecule 1
  Uniprot ID: Q8IUC6
  ENST ID: ENST00000248244
  CDS Start-End: 231-2369
cagcgcgctacggtccgcgggcaactccgcagaagccccagcccccaggaccccaggacccagtggcgcagccggcagccccggatccctgatctgcttgggcagctcctgcagaacctggaacagtgaatgggtaggggacactgggcgtgcagaaggcggggggcagtgtggaacatgccttcaccacctccagcttctgctgccggaggctgcacccacctgtgcccatggcctgcacaggcccatcacttcctagcgccttcgacattctaggtgcagcaggccaggacaagctcttgtatctgaagcacaaactgaagaccccacgcccaggctgccaggggcaggacctcctgcatgccatggttctcctgaagctgggccaggaaactgaggccaggatctctctagaggcattgaaggccgatgcggtggcccggctggtggcccgccagtgggctggcgtggacagcaccgaggacccagaggagcccccagatgtgtcctgggctgtggcccgcttgtaccacctgctggctgaggagaagctgtgccccgcctcgctgcgggacgtggcctaccaggaagccgtccgcaccctcagctccagggacgaccaccggctgggggaacttcaggatgaggcccgaaaccggtgtgggtgggacattgctggggatccagggagcatccggacgctccagtccaatctgggctgcctcccaccatcctcggctttgccctctgggaccaggagcctcccacgccccattgacggtgtttcggactggagccaagggtgctccctgcgatccactggcagccctgcctccctggccagcaacttggaaatcagccagtcccctaccatgcccttcctcagcctgcaccgcagcccacatgggcccagcaagctctgtgacgacccccaggccagcttggtgcccgagcctgtccccggtggctgccaggagcctgaggagatgagctggccgccatcgggggagattgccagcccaccagagctgccaagcagcccacctcctgggcttcccgaagtggccccagatgcaacctccactggcctccctgatacccccgcagctccagaaaccagcaccaactacccagtggagtgcaccgaggggtctgcaggcccccagtctctccccttgcctattctggagccggtcaaaaacccctgctctgtcaaagaccagacgccactccaactttctgtagaagataccacctctccaaataccaagccgtgcccacctactcccaccaccccagaaacatcccctcctcctcctcctcctcctccttcatctactccttgttcagctcacctgaccccctcctccctgttcccttcctccctggaatcatcatcggaacagaaattctataactttgtgatcctccacgccagggcagacgaacacatcgccctgcgggttcgggagaagctggaggcccttggcgtgcccgacggggccaccttctgcgaggatttccaggtgccggggcgcggggagctgagctgcctgcaggacgccatagaccactcagctttcatcatcctacttctcacctccaacttcgactgtcgcctgagcctgcaccaggtgaaccaagccatgatgagcaacctcacgcgacaggggtcgccagactgtgtcatccccttcctgcccctggagagctccccggcccagctcagctccgacacggccagcctgctctccgggctggtgcggctggacgaacactcccagatcttcgccaggaaggtggccaacaccttcaagccccacaggcttcaggcccgaaaggccatgtggaggaaggaacaggacacccgagccctgcgggaacagagccaacacctggacggtgagcggatgcaggcggcggcactgaacgcagcctactcagcctacctccagagctacttgtcctaccaggcacagatggagcagctccaggtggcttttgggagccacatgtcatttgggactggggcgccctatggggctcgaatgccctttgggggccaggtgcccctgggagccccgccaccctttcccacttggccggggtgcccgcagccgccacccctgcacgcatggcaggctggcacccccccaccgccctccccacagccagcagcctttccacagtcactgcccttcccgcagtccccagccttccctacggcctcacccgcaccccctcagagcccagggctgcaacccctcattatccaccacgcacagatggtacagctggggctgaacaaccacatgtggaaccagagagggtcccaggcgcccgaggacaagacgcaggaggcagaatgaccgcgtgtccttgcctgaccacctggggaacacccctggacccaggcatcggccaggaccccatagagcaccccggtctgccctgtgccctgtggacagtggaagatgaggtcatctgccactttcaggacattgtccgggagcccttcatttaggacaaaacgggcgcgatgatgccctggctttcagggtggtcagaactggatacggtgtttacaattccaatctctctatttctgggtgaagggtcttggtggtgggggtattgctacggtcttttaattataataaatatttattgaatgct

SEQ ID NO: 191631 - DNA, 1650 bp, Homo sapiens
  Payload ID: 17857
  Gene Name: toll-like receptor adaptor molecule 1
  ENST ID: ENST00000621756
  CDS Start-End: 6-1646
tcaggatgaggcccgaaccggtgtgggtggacttgctggggatccagggagcatccggacgctccagtccatctggctgcctcccaccatcctcggctttgccctctgggaccaggagcctcccacgccccattgacggtgtttcggactggagccaagggtgctccctgcgatccactggcagccctgcctccctggccagcaacttggaaatcagccagtcccctaccatgcccttcctcagcctgcaccgcagcccacatgggcccagcaagctctgtgacgacccccaggccagcttggtgcccgagcctgtccccggtggctgccaggagcctgaggagatgagctggccgccatcgggggagattgccagcccaccagagctgccaagcagcccacctcctgggcttcccgaagtggccccagatgcaacctccactggcctccctgatacccccgcagctccagaaaccagcaccaactacccagtggagtgcaccgaggggtctgcaggcccccagtctctccccttgcctattctggagccggtcaaaaacccctgctctgtcaaagaccagacgccactccaactttctgtagaagataccacctctccaaataccaagccgtgcccacctactcccaccaccccagaaacatcccctcctcctcctcctcctcctccttcatctactccttgttcagctcacctgaccccctcctccctgttcccttcctccctggaatcatcatcggaacagaaattctataactttgtgatcctccacgccagggcagacgaacacatcgccctgcgggttcgggagaagctggaggcccttggcgtgcccgacggggccaccttctgcgaggatttccaggtgccggggcgcggggagctgagctgcctgcaggacgccatagaccactcagctttcatcatcctacttctcacctccaacttcgactgtcgcctgagcctgcaccaggtgaaccaagccatgatgagcaacctcacgcgacaggggtcgccagactgtgtcatccccttcctgcccctggagagctccccggcccagctcagctccgacacggccagcctgctctccgggctggtgcggctggacgaacactcccagatcttcgccaggaaggtggccaacaccttcaagccccacaggcttcaggcccgaaaggccatgtggaggaaggaacaggacacccgagccctgcgggaacagagccaacacctggacggtgagcggatgcaggcggcggcactgaacgcagcctactcagcctacctccagagctacttgtcctaccaggcacagatggagcagctccaggtggcttttgggagccacatgtcatttgggactggggcgccctatggggctcgaatgccctttgggggccaggtgcccctgggagccccgccaccctttcccacttggccggggtgcccgcagccgccaccctccccagccttccctacggcctcacccgcaccccctcagagcccagggctgcaacccctcattatccaccacgcacagatggtacagctggggctgaacaaccacatgtggaaccagagagggtcccaggcgcccgaggacaagacgcaggaggcagaatgaccgc

SEQ ID NO: 191632 - DNA, 3049 bp, Homo sapiens
  Payload ID: 17858
  Gene Name: toll-like receptor adaptor molecule 2
  Uniprot ID: Q86XR7
  ENST ID: ENST00000427199
  CDS Start-End: 443-1150
acattaacccctgactcacagctggaccgccccggcccgcagcgccacgtcccgggtggggcctgccacggcaaagcagcagtccggcctcgagcggcccctcgggggcggcggggtgggcgccaacagcagtcaggcctgacaagcggcgacctccaagggtgaggcctctgcgggcccccgactcacgcgcgtccgggctctgcaagcgcggtggggagcaggctgctgtggtcgcggggactgggttgcggcgcgccgcgtacgggacggccccaaactctcgacgcccggggcaagacgcccaccccctgggcgctctcgctgggccagaaaggaagacagaaaagccgcgggctgactgtggtggcgctcgcctgcagattgaaaagaaatgctgagaaatacataaagttttcctcttctgccttggatatttataatgggtatcgggaagtctaaaataaattcctgccctctttctctctcttggggtaaaaggcacagtgtggatacaagtccaggatatcatgagtcagattccaagaagtctgaagatctatccttgtgtaatgttgctgagcacagcaatacaacagaggggccaacaggaaagcaggagggagctcagagcgtggaagagatgtttgaagaagaagctgaagaagaggtgttcctcaaatttgtgatattgcatgcagaagatgacacagatgaagccctcagagtccagaatctgctacaagatgactttggtatcaaacccggaataatctttgctgagatgccatgtggcagacagcatttacagaatttagatgatgctgtaaatgggtctgcatggacaatcttattactgactgaaaactttttaagagatacttggtgtaatttccagttctatacgtccctaatgaactccgttaacaggcagcataaatacaactctgttatacccatgcggcccctgaacaatccccttccccgagaaaggactccctttgccctccaaaccatcaatgccttagaggaagaaagtcgtggatttcctacacaagtagaaagaatttttcaggagtctgtgtataagacacaacaaactatatggaaagagacaagaaatatggtacaaagacaatttattgcctgagatgaaacatataacatgtggctggctcttgttttgtaaaccaaatgattaatcttcacttgagaaagcagtttctaggaaatgtttaaataaaagagagtcttcaccttaaagaaacctatggagcacaagaaagataaatttctgcaggacagcctataaaattgtggtactttttgatgtttcagtaaacttgacattgtcagagtttcaaggacttttctttcacaattttcctagttcatggatatgaaaaaggaattctcaatccatattccttgtattgaaccttgaacaaaaacttgtatgacagacatttttaaaaatgtgacaacacttttattctctgaattttgatctcaaaggacacagaaaaaaaatggccccaggagatctgatcacacttcctcctgaggcacctctcatggatgttgcaataagcattcgggtactatcacccagaaatatgaattgccagaatagaacatttagcatgttaagcgttgatgcatataaaatcagaaatagatgtgagaatggtggaactttttaaaagaacccagtcaaatgtattttctgctgaaatctgcatatttggaggcatttcccaccaccgattcacagcccatttgatagtgtggtagttagggacttcgtggagtggtgttcagacgtcccctggggcttaaatctcttcatattagtcatcatttgtaactatggctttatttgcagagcttctaaaaggcgtataactgtgtgagtggccagatattcactttttaaatcaaaaacctctcttatggaagctttaaaagtttccgtcacacacaattctcttctcaggaagtatttctcatttaggtcttcaaagtagcctgactgtgtgcatgtgtgtgtgtgataggttatttataaagactttggatagaaggagatgtattttattacctcctattctagagccccatgctcctaacaagccagagaggccccaaacaggattgtttctttcctccacagcccttctgcccatctgagattgagggagcatcgtccacttgagatcagggatggggtggagaatgggtcatgtcatgtaatgagaaaagccctcttcgggatcatgagacttggttctagtccaatttctgccactgaggatgaatgtaactgtgggcaaactatttaccctcctttatctgtgaaatgaaagggttgaattgatggatctctaaaggcttttgtcctctatgaggatgtgaaaaactagggaccacaaaagggaacaagcaaaaaagtttggattcgataaagtgatatgtaatagttgcagaaggctttatatatgcttataatgaaaagatattttttgtatattgacagcataatttatttttaatgctgtcattacacttaaagtcacaggaaaaaaatatacatgcttactcaggctttcttaaaaataaatttttatagagatccttgagtaaagacattttgcttaatttcttttttcttattccccacttgtatatcccctaccagtaccgggatctgcacacatctttttgcagttacctcttcatagccatgaaccaaaacgttctatgaggagcatgcaagtaagtcaagcctcctattctgttagtacttattagaggaggagatggttttcattgcatagtgacattttcttagccttaacgttctgatagtagcttactactcacttctctttttcagttttcataataagtattcatttttttgccataatgcttcctgtaaagccaattttatatactaataaaacatgaactgcccactcttcatgcctgccaaacttggggcaattgatgctaaatggtatttttaaaataaatgtttttattcttt

SEQ ID NO: 191633 - DNA, 6708 bp, Homo sapiens
  Payload ID: 17859
  Gene Name: tolloid-like 1
  Uniprot ID: O43897
  ENST ID: ENST00000061240
  CDS Start-End: 648-3689
ctcacacttttgctctcttgcagtcagttgctttgctggcttctgcaggcttttaaggtctcgcggcgtagaaatgcctggcccccacccccttcctcggtctcccctttcaattcagatgtgctgatgtgcagaccggattcatcttctcggagctgcggcggcggctttgggctcaggcggcggcggctcgcgctcggccgcggagtcctggcagcagcggggacgcggcgcgggagtccgagctctggtggcagctgagcccgcggggcgccgctcgccgagccgcggccgcgggaagttcggcagccagaaggacgacctggcaggctgcgagcgccagcgccgccagagccgagtttgcctgcgccctccccgcctccgagtgcagagttccttacctgccctccgcccacccgtgggcccctagccaacttctccctgcgactgggggtaacaggcagtgcttgccctctctactgtcccggcggcatccacatgtttccggacacctgagcaccccggtcccgccgaggagcctccgggtggggagaagagcaccggtgcccctagccccgcacatcagcgcggaccgcggctgcctaacctctgggtcccgtcccctccttttcctccgggggaggaggatggggttgggaacgctttccccgaggatgctcgtgtggctggtggcctcggggattgttttctacggggagctatgggtctgcgctggcctcgattatgattacacttttgatgggaacgaagaggataaaacagagactatagattacaaggacccgtgtaaagccgctgtattttggggcgatattgccttagatgatgaagacttaaatatctttcaaatagataggacaattgaccttacgcagaacccctttggaaaccttggacataccacaggtggacttggagaccatgctatgtcaaagaagcgaggggccctctaccaacttatagacaggataagaagaattggctttggcttggagcaaaacaacacagttaagggaaaagtacctctacaattctcagggcaaaatgagaaaaatcgagttcccagagccgctacatcaagaacggaaagaatatggcctggaggcgttattccttatgttataggaggaaacttcactggcagccagagagccatgttcaagcaggccatgaggcactgggaaaagcacacatgtgtgactttcatagaaagaagtgatgaagagagttacattgtattcacctataggccttgtggatgctgctcctatgtaggtcggcgaggaaatggacctcaggcaatctctatcggcaagaactgtgataaatttgggattgttgttcatgaattgggtcatgtgataggcttttggcatgaacacacaagaccagatcgagataaccacgtaactatcataagagaaaacatccagccaggtcaagagtacaattttctgaagatggagcctggagaagtaaactcacttggagaaagatatgatttcgacagtatcatgcactatgccaggaacaccttctcaagggggatgtttctggataccattctcccctcccgtgatgataatggcatacgtcctgcaattggtcagcgaacccgtctaagcaaaggagatatcgcacaggcaagaaagctgtatagatgtccagcatgtggagaaactctacaagaatccaatggcaacctttcctctccaggatttcccaatggctacccttcttacacacactgcatctggagagtttctgtgaccccaggggagaagattgttttaaattttacaacgatggatctatacaagagtagtttgtgctggtatgactatattgaagtaagagacgggtactggagaaaatcacctctccttggtagattctgtggggacaaattgcctgaagttcttacttctacagacagcagaatgtggattgagtttcgtagcagcagtaattgggtaggaaaaggctttgcagctgtctatgaagcgatctgtggaggtgagatacgtaaaaatgaaggacagattcagtctcccaattatcctgatgactatcgcccgatgaaagaatgtgtgtggaaaataacagtgtctgagagctaccacgtcgggctgacctttcagtcctttgagattgaaagacatgacaattgtgcttatgactacctggaagttagagatggaaccagtgaaaatagccctttgatagggcgtttctgtggttatgacaaacctgaagacataagatctacctccaatactttgtggatgaagtttgtttctgacggaactgtgaacaaagcagggtttgctgctaacttttttaaagaggaagatgagtgtgccaaacctgaccgtggaggctgtgagcagcgatgtctgaacactctgggcagttaccagtgtgcctgtgagcctggctatgagctgggcccagacagaaggagctgtgaagctgcttgtggtggacttcttaccaaacttaacggcaccataaccacccctggctggcccaaggagtaccctcctaataagaactgtgtgtggcaagtggttgcaccaacccagtacagaatttctgtgaagtttgagttttttgaattggaaggcaatgaagtttgcaaatatgattatgtggagatctggagtggtctttcctctgagtctaaactgcatggcaaattctgtggcgctgaagtgcctgaagtgatcacatcccagttcaacaatatgagaattgaattcaaatctgacaatactgtatccaagaagggcttcaaagcacattttttctcagacaaagatgaatgctctaaggataatggtggatgtcagcacgaatgtgtcaacacgatggggagctacatgtgtcaatgccgtaatggatttgtgctacatgacaataaacatgattgcaaggaagctgagtgtgaacagaagatccacagtccaagtggcctcatcaccagtcccaactggccagacaagtacccaagcaggaaagaatgcacttgggaaatcagcgccactcctggccaccgaatcaaattagcctttagtgaatttgagattgagcagcatcaagaatgtgcttatgaccacttagaagtatttgatggagaaacagaaaagtcaccgattcttggacgactgtgtggcaacaagataccagatccccttgtggctactggaaataaaatgtttgttcggtttgtttctgatgcatctgttcaaagaaaaggctttcaagctacacattctacagagtgtggcggacgattgaaagcagaatcaaaaccaagagatctgtactcacatgctcagtttggtgataacaactacccaggacaggttgactgtgaatggctattagtatcagaacggggctctcgacttgaattatccttccagacatttgaagtggaggaagaagcagactgtggctatgactatgtggagctctttgatggtcttgattcaacagctgtggggcttggtcgattctgtggatccgggccaccagaagagatttattcaattggagattcagttttaattcatttccacactgatgacacaatcaacaagaagggatttcatataagatacaaaagcataagatatccagataccacacataccaaaaaataacaccaaaacctctgtcagaacacaaaggaatgtgcataatggagagaagacatattttttttaaaactgaagatattggcacaaatgttttatacaaagagtttgaacaaaaaatccctgtaagaccagaattatctttgtactaaaagagaagtttccagcaaaaccctcatcagcattacaaggatatttgaactccatgcttgatggtattaataaagctggtgaaagggcatcatatacttcaaggaagactctacaagcttttgttcacagcttgaaatagatgcctcacaattcagacagtttaattcaggaactgtgaccctgcagtgttctttttgacaatttgtcaagatttagggacataaaatgatcttgcaggtcgtaaactggaaaacagtattttggttgtcttaggataattgctgactttgtatcttggatacagtgtaaaccagatccatataaggtgaatgtgaaatgggagtcttctgagggtgatttgtactttccatgtgtatgtgtgtgtctggtgtttggaaactgggatatttcagcttcattatttccacttgcaggccagcttaacctctgaaacacaaatgatcttgagaccactttagtgtacttacatttagatgagtttgaaatctcaatggtgtctaattattgcagttaaattctagacatcagttctttaagtctcagaaaacgcccagtgaattggtaaacttagttcttttttttggaagtgctgccttttcacaccaaatccaagaagcctgtgatgtcttatgaaccttatgagaaaactccgaagaggtgtgagcaggattcttctgaatgactgtctggatggttcattactcaagttactgctgctgctattgtctttcctttgttgtcgatctgttattgttgtattattattgttgatgttgtcatggttaatctattttttaaaattgaaatgaagcagaagtaggccttgtgagaactgaaaggtctctttcatttttctcttcctgggattcattttttcaaaacacaatgctggaaaaaaaagatttgtttctgaaagacttcttatggtgctattccataaactttttttcaaacaagtttttgacctttgagccaacccacccgtagactacgaatgtctccctatggctggtagcatttgaagactaaagacttgtcaaatatatcaagagtatatcattgcaagggcagcacttgtcctgtggaacaactacttataatgccttagaattcctgcacatgatcaaacagatcctcctaaaacacaccttttgaaatgttgaacataatagtgtatgttaattaacagctctatgaagaaaatccatttccatgactgaagcattggatataaatatggtgtcctgctttttttgtagaaaatgtaatttgaggatgaattttctgctttaaaggcatgtgtgtttttaaaattaatgaatgtagatgtgtgattgtctgagtgagtgaaactacaagaggtaaaaaataatgggtggttgaaaagttaaaatgtatgtgccaagttctactagaattccatttgaaatagcaccttccttaggtttcatggacaaataatgggaacttctaattttgatcaatcccattaaaaaaaggctctttcctttagagaaactctattttgatgtcaatatagattactgtatgaagtagctttgtgtctgttacctgtccatgagcatacaacattgaatacaattgggtgtattctttcagttttacacaattaaagtatacacacagatgtagcttatctgtttttttcttaaattgttgccctgaaaaaatttcttgcatatgaattgtaaaatgtaaatacatttttataaccaatgttttgatcttattgaatgttactttgaaaatgtataactattgcctgcaatgtagatgagccttttagtagagctgatttattccagtaacttcttccatattttctcactaatctcccgttagccaaaatatgccagaaatgggaaagagaggagaaaaagtcattaacattaacacctatactgttctatactactcctacccgtgtgctaggaatgtgcactagctctttttaaattccatgctacactttgaggactgtcatcatgttctcgttttgtagttcagaaagtgaggctcaaagaatttatgtaaccttcccagagtcacagtgtaaagttagatgttgaaacccagtttatcttatacaaatgagcctctgcttgttctacaaaggtagtagaatcaatctcgacctatataaatagtagattttttatggtgaaactttcccacataaagtaaattttaggggtgaattagagtaaaacttacaggataagcattttgctctttttaagaacagcatgaaatttagaataccaatgatagctatctttaagaatcagaattagtactagaaatttaaaaaaccctatagtttggagttagtatgagccttttgtgaaaataaatatattaaattattttgcctgatgtggtaggggaaatgtattgctctatattaagaaatattctggatattctgattgacatcttattaggccatagtgagctatgctctgcacaactgagaaattaggtatttagaaggcatatagagatgttgtcataactaggtcttcaacgtgaaaattaatttttattgtatcatgtcaagtatcagtttaccacatattatttttatattaattcaacatttgccttaagtgtgttgttaaatgaaagtacagacagcttcattgttgtattgttaataattgttacttactgctccaggcattttattaaattaattttttaaattattttccaccctacatcagtatattggttgtgctttatatttgccaaagtcctaactgactatacatagaaaaaaaaaaaaacactgttctcacttgattttattaaattatttttaaaagtc

SEQ ID NO: 191634 - DNA, 686 bp, Homo sapiens
  Payload ID: 17859
  Gene Name: tolloid-like 1
  ENST ID: ENST00000504560
  CDS Start-End: 220-393
agccaacttctccctgcgactgggggtaacaggcagtgcttgccctctctactgtcccggcggcatccacatgtttccggacacctgagcaccccggtcccgccgaggagcctccgggtggggagaagagcaccggtgcccctagccccgcacatcagcgcggaccgcggctgcctaacctctgggtcccgtcccctccttttcctccgggggaggaggatggggttgggaacgctttccccgaggatgctcgtgtggctggtggcctcggggattgttttctacggggagctatgggtctgcgctggcctcgattatgattacacttttgatgggaacgaagaggataaaacagagactatagattacaaggacccgtgtaaagccgactgaccactgctctaagcagtgttggggcaatgcctgggctgcccgagcccttgaagttcaagaagaagcacctggacttctcatgaggggaggtcagagtcaatctgtattttggggcgatattgccttagatgatgaagacttaaatatctttcaaatagataggacaattgaccttacgcagaacccctttggaaaccttggacataccacaggtggacttggagaccatgctatgtcaaagaagcgaggggccctctaccaacttatagacaggataagaagaattggctttg

SEQ ID NO: 191635 - DNA, 4787 bp, Homo sapiens
  Payload ID: 17859
  Gene Name: tolloid-like 1
  ENST ID: ENST00000509505
  CDS Start-End: 558-950
ccttcctcggtctcccctttcaattcagatgtgctgatgtgcagaccggattcatcttctcggagctgcggcggcggctttgggctcaggcggcggcggctcgcgctcggccgcggagtcctggcagcagcggggacgcggcgcgggagtccgagctctggtggcagctgagcccgcggggcgccgctcgccgagccgcggccgcgggaagttcggcagccagaaggacgacctggcaggctgcgagcgccagcgccgccagagccgagtttgcctgcgccctccccgcctccgagtgcagagttccttacctgccctccgcccacccgtgggcccctagccaacttctccctgcgactgggggtaacaggcagtgcttgccctctctactgtcccggcggcatccacatgtttccggacacctgagcaccccggtcccgccgaggagcctccgggtggggagaagagcaccggtgcccctagccccgcacatcagcgcggaccgcggctgcctaacctctgggtcccgtcccctccttttcctccgggggaggaggatggggttgggaacgctttccccgaggatgctcgtgtggctggtggcctcggggattgttttctacggggagctatgggtctgcgctggcctcgattatgattacacttttgatgggaacgaagaggataaaacagagactatagattacaaggacccgtgtaaagccgctgtattttggggcgatattgccttagatgatgaagacttaaatatctttcaaatagataggacaattgaccttacgcagaacccctttggaaaccttggacataccacaggtggacttggagaccatgctatgtcaaagaagcgaggggccctctaccaacttatagacaggataagaagaattggctttggtatatcaatgtttaaagttgcagacgcttgacttgatgcttggagcaaaacaacacagttaagggaaaagtacctctacaattctcagggcaaaatgagaaaaatcgagttcccagagccgctacatcaagaacggaaagaatatggcctggaggcgttattccttatgttataggaggaaacttcactggcagccagagagccatgttcaagcaggccatgaggcactgggaaaagcacacatgtgtgactttcatagaaagaagtgatgaagagagttacattgtattcacctataggccttgtggatgctgctcctatgtaggtcggcgaggaaatggacctcaggcaatctctatcggcaagaactgtgataaatttgggattgttgttcatgaattgggtcatgtgataggcttttggcatgaacacacaagaccagatcgagataaccacgtaactatcataagagaaaacatccagccaggtcaagagtacaattttctgaagatggagcctggagaagtaaactcacttggagaaagatatgatttcgacagtatcatgcactatgccaggaacaccttctcaagggggatgtttctggataccattctcccctcccgtgatgataatggcatacgtcctgcaattggtcagcgaacccgtctaagcaaaggagatatcgcacaggcaagaaagctgtatagatgtccagcatgtggagaaactctacaagaatccaatggcaacctttcctctccaggatttcccaatggctacccttcttacacacactgcatctggagagtttctgtgaccccaggggagaagattgttttaaattttacaacgatggatctatacaagagtagtttgtgctggtatgactatattgaagtaagagacgggtactggagaaaatcacctctccttggtagattctgtggggacaaattgcctgaagttcttacttctacagacagcagaatgtggattgagtttcgtagcagcagtaattgggtaggaaaaggctttgcagctgtctatgaagcgatctgtggaggtgagatacgtaaaaatgaaggacagattcagtctcccaattatcctgatgactatcgcccgatgaaagaatgtgtgtggaaaataacagtgtctgagagctaccacgtcgggctgacctttcagtcctttgagattgaaagacatgacaattgtgcttatgactacctggaagttagagatggaaccagtgaaaatagccctttgatagggcgtttctgtggttatgacaaacctgaagacataagatctacctccaatactttgtggatgaagtttgtttctgacggaactgtgaacaaagcagggtttgctgctaacttttttaaagaggaagatgagtgtgccaaacctgaccgtggaggctgtgagcagcgatgtctgaacactctgggcagttaccagtgtgcctgtgagcctggctatgagctgggcccagacagaaggagctgtgaagctgcttgtggtggacttcttaccaaacttaacggcaccataaccacccctggctggcccaaggagtaccctcctaataagaactgtgtgtggcaagtggttgcaccaacccagtacagaatttctgtgaagtttgagttttttgaattggaaggcaatgaagtttgcaaatatgattatgtggagatctggagtggtctttcctctgagtctaaactgcatggcaaattctgtggcgctgaagtgcctgaagtgatcacatcccagttcaacaatatgagaattgaattcaaatctgacaatactgtatccaagaagggcttcaaagcacattttttctcagacaaagatgaatgctctaaggataatggtggatgtcagcacgaatgtgtcaacacgatggggagctacatgtgtcaatgccgtaatggatttgtgctacatgacaataaacatgattgcaaggaagctgagtgtgaacagaagatccacagtccaagtggcctcatcaccagtcccaactggccagacaagtacccaagcaggaaagaatgcacttgggaaatcagcgccactcctggccaccgaatcaaattagcctttagtgaatttgagattgagcagcatcaagaatgtgcttatgaccacttagaagtatttgatggagaaacagaaaagtcaccgattcttggacgactgtgtggcaacaagataccagatccccttgtggctactggaaataaaatgtttgttcggtttgtttctgatgcatctgttcaaagaaaaggctttcaagctacacattctacagagtgtggcggacgattgaaagcagaatcaaaaccaagagatctgtactcacatgctcagtttggtgataacaactacccaggacaggttgactgtgaatggctattagtatcagaacggggctctcgacttgaattatccttccagacatttgaagtggaggaagaagcagactgtggctatgactatgtggagctctttgatggtcttgattcaacagctgtggggcttggtcgattctgtggatccgggccaccagaagagatttattcaattggagattcagttttaattcatttccacactgatgacacaatcaacaagaagggatttcatataagatacaaaagcataagatatccagataccacacataccaaaaaataacaccaaaacctctgtcagaacacaaaggaatgtgcataatggagagaagacatattttttttaaaactgaagatattggcacaaatgttttatacaaagagtttgaacaaaaaatccctgtaagaccagaattatctttgtactaaaagagaagtttccagcaaaaccctcatcagcattacaaggatatttgaactccatgcttgatggtattaataaagctggtgaaagggcatcatatacttcaaggaagactctacaagcttttgttcacagcttgaaatagatgcctcacaattcagacagtttaattcaggaactgtgaccctgcagtgttctttttgacaatttgtcaagatttagggacataaaatgatcttgcaggtcgtaaactggaaaacagtattttggttgtcttaggataattgctgactttgtatcttggatacagtgtaaaccagatccatataaggtgaatgtgaaatgggagtcttctgagggtgatttgtactttccatgtgtatgtgtgtgtctggtgtttggaaactgggatatttcagcttcattatttccacttgcaggccagcttaacctctgaaacacaaatgatcttgagaccactttagtgtacttacatttagatgagtttgaaatctcaatggtgtctaattattgcagttaaattctagacatcagttctttaagtctcagaaaacgcccagtgaattggtaaacttagttcttttttttggaagtgctgccttttcacaccaaatccaagaagcctgtgatgtcttatgaaccttatgagaaaactccgaagaggtgtgagcaggattcttctgaatgactgtctggatggttcattactcaagttactgctgctgctattgtctttcctttgttgtcgatctgttattgttgtattattattgttgatgttgtcatggttaatctattttttaaaattgaaatgaagcagaagtaggccttgtgagaactgaaaggtctctttcatttttctcttcctgggattcattttttcaaaacacaatgctggaaaaaaaagatttgtttctgaaagacttcttatggtgctattccataaactttttttcaaacaagtttttgacctttgagccaacccacc

SEQ ID NO: 191636 - DNA, 1829 bp, Homo sapiens
  Payload ID: 17859
  Gene Name: tolloid-like 1
  Uniprot ID: O43897
  ENST ID: ENST00000513213
  CDS Start-End: 166-1344
tcccggcggcatccacatgtttccggacacctgagcaccccggtcccgccgaggagcctccgggtggggagaagagcaccggtgcccctagccccgcacatcagcgcggaccgcggctgcctaacctctgggtcccgtcccctccttttcctccgggggaggaggatggggttgggaacgctttccccgaggatgctcgtgtggctggtggcctcggggattgttttctacggggagctatgggtctgcgctggcctcgattatgattacacttttgatgggaacgaagaggataaaacagagactatagattacaaggacccgtgtaaagccgctgtattttggggcgatattgccttagatgatgaagacttaaatatctttcaaatagataggacaattgaccttacgcagaacccctttggaaaccttggacataccacaggtggacttggagaccatgctatgtcaaagaagcgaggggccctctaccaacttatagacaggataagaagaattggctttggcttggagcaaaacaacacagttaagggaaaagtacctctacaattctcagggcaaaatgagaaaaatcgagttcccagagccgctacatcaagaacggaaagaatatggcctggaggcgttattccttatgttataggaggaaacttcactggcagccagagagccatgttcaagcaggccatgaggcactgggaaaagcacacatgtgtgactttcatagaaagaagtgatgaagagagttacattgtattcacctataggccttgtggatgctgctcctatgtaggtcggcgaggaaatggacctcaggcaatctctatcggcaagaactgtgataaatttgggattgttgttcatgaattgggtcatgtgataggcttttggcatgaacacacaagaccagatcgagataaccacgtaactatcataagagaaaacatccagccaggtcaagagtacaattttctgaagatggagcctggagaagtaaactcacttggagaaagatatgatttcgacagtatcatgcactatgccaggaacaccttctcaagggggatgtttctggataccattctcccctcccgtgatgataatggcatacgtcctgcaattggtcagcgaacccgtctaagcaaaggagatatcgcacaggcaagaaagctgtatagatgtccagcatgtggagaaactctacaagaatccaatggcaacctttcctctccaggatttcccaatggctacccttcttacacacactgcatctggagagtttctgtgaccccaggggagaaggttgtattttcactctgttgattgtgtcttctgatgaacacaaattataaagtttgatgtcataccacttgtctacttttagttttattgcctgtgcttttggtgtcatagccaagaaatcatggccatatgtaatgacatgaagtttttaccctgtgttttcttctatgagttctatagttttacagtcttatatgtaggtttttaatcaatattgtgttaatagaaaccattcttgtacatgtggatatccagtttcttcaacaccatttgttaaagatttactaaatgtttttattcagcattcctgctcatgtttctgacttctattatggcttattttggtcctgcctatagcttacattatagattattttttaaattagcgtttttgtttttttctgtttgaaaatgtggattttttacatgaatttataaaactatagtttcactggatatagttggctgcacatttaactttgttttaaataaaagcttgcaaaaat

SEQ ID NO: 191637 - DNA, 558 bp, Homo sapiens
  Payload ID: 17859
  Gene Name: tolloid-like 1
  ENST ID: ENST00000506144
  CDS Start-End: 227-558
actggccgcggctcgtgtccgggcttcgggagctcctggttccttgctctattgggctgtggctgaggtgatccgcgctcagtgtggacgcacaactgtattttggggcgatattgccttagatgatgaagacttaaatatctttcaaatagataggacaattgaccttacgcagaacccctttggaaaccttggacataccacaggtggacttggagaccatgctatgtcaaagaagcgaggggccctctaccaacttatagacaggataagaagaattggctttggcttggagcaaaacaacacagttaagggaaaagtacctctacaattctcagggcaaaatgagaaaaatcgagttcccagagccgctacatcaagaacggaaagaatatggcctggaggcgttattccttatgttataggaggaaacttcactggcagccagagagccatgttcaagcaggccatgaggcactgggaaaagcacacatgtgtgactttcatagaaagaagtgatgaagagagttacattgtattcacctataggccttgtgg

SEQ ID NO: 191638 - DNA, 4818 bp, Homo sapiens
  Payload ID: 17859
  Gene Name: tolloid-like 1
  ENST ID: ENST00000507499
  CDS Start-End: 558-3668
ccttcctcggtctcccctttcaattcagatgtgctgatgtgcagaccggattcatcttctcggagctgcggcggcggctttgggctcaggcggcggcggctcgcgctcggccgcggagtcctggcagcagcggggacgcggcgcgggagtccgagctctggtggcagctgagcccgcggggcgccgctcgccgagccgcggccgcgggaagttcggcagccagaaggacgacctggcaggctgcgagcgccagcgccgccagagccgagtttgcctgcgccctccccgcctccgagtgcagagttccttacctgccctccgcccacccgtgggcccctagccaacttctccctgcgactgggggtaacaggcagtgcttgccctctctactgtcccggcggcatccacatgtttccggacacctgagcaccccggtcccgccgaggagcctccgggtggggagaagagcaccggtgcccctagccccgcacatcagcgcggaccgcggctgcctaacctctgggtcccgtcccctccttttcctccgggggaggaggatggggttgggaacgctttccccgaggatgctcgtgtggctggtggcctcggggattgttttctacggggagctatgggtctgcgctggcctcgattatgattacacttttgatgggaacgaagaggataaaacagagactatagattacaaggacccgtgtaaagccgctgtattttggggcgatattgccttagatgatgaagacttaaatatctttcaaatagataggacaattgaccttacgcagaacccctttggaaaccttggacataccacaggtggacttggagaccatgctatgtcaaagaagcgaggggccctctaccaacttatagacaggataagaagaattggctttggcttggagcaaaacaacacagttaagggaaaagtacctctacaattctcagggcaaaatgagaaaaatcgagttcccagagccgctacatcaagaacggaaagaatatggcctggaggcgttattccttatgttataggaggaaacttcactggcagccagagagccatgttcaagcaggccatgaggcactgggaaaagcacacatgtgtgactttcatagaaagaagtgatgaagagagttacattgtattcacctataggccttgtggatgctgctcctatgtaggtcggcgaggaaatggacctcaggcaatctctatcggcaagaactgtgataaatttgggattgttgttcatgaattgggtcatgtgataggcttttggcatgaacacacaagaccagatcgagataaccacgtaactatcataagagaaaacatccagccaggtcaagagtacaattttctgaagatggagcctggagaagtaaactcacttggagaaagatatgatttcgacagtatcatgcactatgccaggaacaccttctcaagggggatgtttctggataccattctcccctcccgtgatgataatggcatacgtcctgcaattggtcagcgaacccgtctaagcaaaggagatatcgcacaggcaagaaagctgtatagatgtccagcatgtggagaaactctacaagaatccaatggcaacctttcctctccaggatttcccaatggctacccttcttacacacactgcatctggagagtttctgtgaccccaggggagaagattgttttaaattttacaacgatggatctatacaagagtagtttgtgctggtatgactatattgaagtaagagacgggtactggagaaaatcacctctccttggtagattctgtggggacaaattgcctgaagttcttacttctacagacagcagaatgtggattgagtttcgtagcagcagtaattgggtaggaaaaggctttgcagctgtctatgaagcgatctgtggaggtgagatacgtaaaaatgaaggacagattcagtctcccaattatcctgatgactatcgcccgatgaaagaatgtgtgtggaaaataacagtgtctgagagctaccacgtcgggctgacctttcagtcctttgagcaggagcaccaggagaatccagggattgccagtaaagccagagaatctctcatcctcatctggaagcctattgaaagacatgacaattgtgcttatgactacctggaagttagagatggaaccagtgaaaatagccctttgatagggcgtttctgtggttatgacaaacctgaagacataagatctacctccaatactttgtggatgaagtttgtttctgacggaactgtgaacaaagcagggtttgctgctaacttttttaaagaggaagatgagtgtgccaaacctgaccgtggaggctgtgagcagcgatgtctgaacactctgggcagttaccagtgtgcctgtgagcctggctatgagctgggcccagacagaaggagctgtgaagctgcttgtggtggacttcttaccaaacttaacggcaccataaccacccctggctggcccaaggagtaccctcctaataagaactgtgtgtggcaagtggttgcaccaacccagtacagaatttctgtgaagtttgagttttttgaattggaaggcaatgaagtttgcaaatatgattatgtggagatctggagtggtctttcctctgagtctaaactgcatggcaaattctgtggcgctgaagtgcctgaagtgatcacatcccagttcaacaatatgagaattgaattcaaatctgacaatactgtatccaagaagggcttcaaagcacattttttctcagacaaagatgaatgctctaaggataatggtggatgtcagcacgaatgtgtcaacacgatggggagctacatgtgtcaatgccgtaatggatttgtgctacatgacaataaacatgattgcaaggaagctgagtgtgaacagaagatccacagtccaagtggcctcatcaccagtcccaactggccagacaagtacccaagcaggaaagaatgcacttgggaaatcagcgccactcctggccaccgaatcaaattagcctttagtgaatttgagattgagcagcatcaagaatgtgcttatgaccacttagaagtatttgatggagaaacagaaaagtcaccgattcttggacgactgtgtggcaacaagataccagatccccttgtggctactggaaataaaatgtttgttcggtttgtttctgatgcatctgttcaaagaaaaggctttcaagctacacattctacagagtgtggcggacgattgaaagcagaatcaaaaccaagagatctgtactcacatgctcagtttggtgataacaactacccaggacaggttgactgtgaatggctattagtatcagaacggggctctcgacttgaattatccttccagacatttgaagtggaggaagaagcagactgtggctatgactatgtggagctctttgatggtcttgattcaacagctgtggggcttggtcgattctgtggatccgggccaccagaagagatttattcaattggagattcagttttaattcatttccacactgatgacacaatcaacaagaagggatttcatataagatacaaaagcataagatatccagataccacacataccaaaaaataacaccaaaacctctgtcagaacacaaaggaatgtgcataatggagagaagacatattttttttaaaactgaagatattggcacaaatgttttatacaaagagtttgaacaaaaaatccctgtaagaccagaattatctttgtactaaaagagaagtttccagcaaaaccctcatcagcattacaaggatatttgaactccatgcttgatggtattaataaagctggtgaaagggcatcatatacttcaaggaagactctacaagcttttgttcacagcttgaaatagatgcctcacaattcagacagtttaattcaggaactgtgaccctgcagtgttctttttgacaatttgtcaagatttagggacataaaatgatcttgcaggtcgtaaactggaaaacagtattttggttgtcttaggataattgctgactttgtatcttggatacagtgtaaaccagatccatataaggtgaatgtgaaatgggagtcttctgagggtgatttgtactttccatgtgtatgtgtgtgtctggtgtttggaaactgggatatttcagcttcattatttccacttgcaggccagcttaacctctgaaacacaaatgatcttgagaccactttagtgtacttacatttagatgagtttgaaatctcaatggtgtctaattattgcagttaaattctagacatcagttctttaagtctcagaaaacgcccagtgaattggtaaacttagttcttttttttggaagtgctgccttttcacaccaaatccaagaagcctgtgatgtcttatgaaccttatgagaaaactccgaagaggtgtgagcaggattcttctgaatgactgtctggatggttcattactcaagttactgctgctgctattgtctttcctttgttgtcgatctgttattgttgtattattattgttgatgttgtcatggttaatctattttttaaaattgaaatgaagcagaagtaggccttgtgagaactgaaaggtctctttcatttttctcttcctgggattcattttttcaaaacacaatgctggaaaaaaaagatttgtttctgaaagacttcttatggtgctattccataaactttttttcaaacaagtttttgacctttgagccaacccacc

SEQ ID NO: 191639 - DNA, 6756 bp, Homo sapiens
  Payload ID: 17860
  Gene Name: tolloid-like 2
  Uniprot ID: Q9Y6L7
  ENST ID: ENST00000357947
  CDS Start-End: 227-3274
gcagcctcggccgccgggcaagtagctccgagcggctgcttcccggttgcctcgacgaagacagggggcgccgcgctccgcttgctccgcgcctgagccatgcccagcagccctgtgtaaccaccgagtcccggccggagccgaccgacccagtgtgcgccgtctttcggccgagctgagctttcgtgcacgcaactccctctgccccagccggccccgcgccaccatgccccgggcgactgcacttggggccctggtgtcactgctgctgctgctgccgctgcctcgcggcgccgggggactcggggagcgcccggacgccaccgcagactactcagagctggacggcgaggagggcacggagcagcagctggagcattaccacgacccttgcaaagccgctgtcttttggggagacattgccttagatgaagatgacttgaagctgtttcacattgacaaagccagagactggaccaagcagacagtgggggcaacaggacacagcacaggtgggcttgaagagcaggcatctgagagcagcccagacaccacagccatggacactggcaccaaggaagctggaaaggatggccgggagaataccacactcctgcacagccctgggaccttgcatgccgcagccaagaccttctctccccgggtccgaagagccacaacctcaaggacagagaggatatggcctggaggagtcatcccctacgtcattggagggaacttcactgggagccagagggccatttttaagcaggccatgagacactgggagaagcacacctgtgtgaccttcatagaaaggacggatgaggaaagctttattgtattcagttacagaacctgtggctgttgctcctatgttgggcgccgaggaggaggcccacaggccatatccattgggaagaactgtgacaagtttggcattgtggctcacgagctgggccatgtggttgggttttggcatgaacacacccggccagacagagaccaacatgtcaccatcatcagggaaaacatccagccaggtcaggagtataatttcttaaaaatggaagctggggaagtgagctctctgggagagacatacgactttgacagcatcatgcactacgcccggaacaccttctcaagaggagttttcttagacaccatccttccccgtcaagatgacaatggcgtcaggccaaccattggccagcgcgtgcggctcagtcagggagacatagctcaagcccggaagctgtacaaatgcccagcgtgtggggagaccctgcaggacacaacgggaaacttttctgcacctggtttcccaaatgggtacccatcttactcccactgcgtctggaggatctcggtcaccccaggggaaaagatcgtattaaacttcacatccatggatttgtttaaaagccgactgtgctggtatgattacgtggaggtccgggatggttactggagaaaagccccccttttgggcaggttttgtggcgataagatcccggagcccctcgtctccacggacagccggctctgggtggagttccgcagcagcagcaacatcttgggcaagggcttctttgcagcgtacgaagctacctgcgggggagacatgaacaaagatgccggtcagattcaatctcccaactatccggatgactacagaccttccaaggaatgtgtctggaggattacggtttcagaggggtttcacgtgggacttaccttccaagcttttgagattgaaaggcacgacagctgtgcatatgactacctggaagtccgggatggccccacggaagagagtgccctgatcggccacttttgtggctatgagaagccggaggatgtgaaatcgagctccaacagactgtggatgaagtttgtgtccgatggctctatcaataaagcgggctttgcagccaattttttcaaggaggtggatgagtgttcctggccagatcacggcgggtgcgagcatcgctgtgtgaacacgctgggcagctacaagtgtgcctgtgaccctggctacgagctggccgccgataagaagatgtgtgaagtggcctgtggcggtttcattaccaagctgaatggaaccatcaccagccctgggtggccgaaggagtatcccacaaacaaaaactgtgtctggcaggtggtggcccccgctcagtaccggatctcccttcagtttgaagtgtttgaactggaaggcaatgacgtctgtaagtacgactttgtagaggtgcgcagcggcctgtcccccgacgccaagctgcacggcaggttctgcggctctgagacgccggaggtcatcacctcgcagagcaacaacatgcgcgtggagttcaagtccgacaacaccgtctccaagcgcggcttcagggcccacttcttctcagataaggacgagtgtgccaaggacaacggcgggtgtcagcatgagtgcgtcaacaccttcgggagctacctgtgcaggtgcagaaacggctactggctccacgagaatgggcatgactgcaaagaggctggctgtgcacacaagatcagcagtgtggaggggaccctggcgagccccaactggcctgacaaataccccagccggagggagtgtacctggaacatctcttcgactgcaggccacagagtgaaactcacctttaatgagtttgagatcgagcagcaccaggaatgtgcctatgaccacctggaaatgtatgacgggccggacagcctggcccccattctgggccgtttctgcggcagcaagaaaccagaccccacggtggcttccggcagcagtatgtttctcaggttttattcggatgcctcagtgcagaggaaaggcttccaggcagtgcacagcacagagtgcgggggcaggctgaaggctgaagtgcagaccaaagagctctattcccacgcccagtttggggacaacaactacccgagcgaggcccgctgtgactgggtgatcgtggcagaggacggctacggcgtggagctgacattccggacctttgaggttgaggaggaggccgactgcggctacgactacatggaagcctacgacggctacgacagctcagcgcccaggctcggccgcttctgtggctctgggccattagaagaaatctactctgcaggtgattccctgatgattcgattccgcacagatgacaccatcaacaagaaaggctttcatgcccgatacaccagcaccaagttccaggatgccctgcacatgaagaaatagtgctgatgttcttgaaagacagaaactgagaattttttttgttttgttttgtttttaacaacaatagcaccttgaaaatctgccctaaaacagtgtacagtatttttctcaaacaaaaactcagaatccagccttagaggtatatatttgaatgaaagtcttgtaagtttggccaacaaggtggagagaaaaatgttcttttgcttctgtctgcaatgttatcattcatgaactgttaaagtgttaaagattaggattgaagtcactgaccattccggctatgcttcttcataccattctccttgtcccttgctcctatgtggcaaaaggtcagccttggggttggccgttcctctaatctggacttgcttgcaaaggtgccaggctgtcttctgtccatgttgggcataagggatgaaaacttggccgagactaatgtgtggcccacagctttggctggaatcattttctttctctctgccagggacatgtcaaccaagaaacctgaaaatatggatggatgtcaggactaaaaaaaggcatcacagtgagcagtgagcacagagggagtttcgagtataagaatcattgtcatgaagttaggagaccacaaagccatttctcagagtcattcactctccttgtccctttggtttccccccctccctaattgcagtgggggctaaggcatccattatgaatacagcagaacatttgctggcgagagtcctgtctgctgagaagacaatattgtggctcgtcctgatatttttttcattcattgactttgagaagactccacctgtgcttggaattccatgggcttcaaagaacatttcttcttttagctttggaggcacttgccgtggcacacctggactccttgacatccaattcaaactgcatttgcaaaatgtgcaaagacctcttatgagggaccaattcaggtcccttatggggtgaacactgttgaagactggttaattataagttatgtaagaatcatcgccttgtggaacaagtcaatcagtgactagcttcctgtagccaatcaggttaaagagtgcgttggtaactttgctctgattaactagtattcaatcaccaacttgcaaacagaattcataacacttggcacttgttctagagaagtgtagaggatgatgtttacataattttagcacctcaaggtataatttaaacagtgaggtagttttgaatggcatttcattaaggcatctatgggcattatgagctaaaagctgtggtatgttagctttaaaagagtatttatgttggaataatttttaaataatgtttacataactgtaagtcctgtttggttgttgttggacgcagggcggcacatgagtgtttttggttagagccaagatagctcccatgcaccggaattcctttgggatgaatcagcatcattttaaacaaagtatatgtaaaaggtgaaaggttatattttttacagatcagaatgtggcaccagaggactgtgtctcattaaagtgattgctgggagcaaaaactagaatgatacaaagaaaggtcagagaaatgcatgggaatattttttccttaaaacagaaaaaaattaaagtattattaataatatatgtctgtatatatgtatgtatgtaaaagatcagctgtcaaagccttaatcaatgcagtgtggaaaatgccaacccctggtcctcgctttactgtgggccctgcaggactggctctccatttcctgcctctcctttcaccaagctctgttttggcctttctcggccctggactgaggctcagcctacacgctcatattgtgcatatggcagaccctgcccagcgtgcgctttgatacagcaaatggagcagctgacctcatggctccaatcccacctgcctgttagggtagattccatttatctgatttttgtattttctgaggttttatttggtctcatcttgtctatgagagttgaaactggaactgggaaacctaagatgggtgttatggttctttctccaaggaaataaaaattctgcagttttaacctttagaagtctaagcaagattaacaaatttcatagaaaagtgggagggagtcagaaacagagttggtgctgctcagcaggacggtgaaacaatgatacttctttttatctctttagtatgaacattttcaaaaacacacagcttcaacaattgtcaccatatggccaatttgcaacaatgggactcttatgaaaaacctttatttaggccttctgtgtgacgtatccacagaaaagagaagctctgattcagctggggctagctgggccgctcctctggaagcccacacttgtggggacttaggcatgacacaggttcttgcaaagaaactagaggctggcttcactagagagagtccattcagcagaaagtcccaggcctctgccttggtgcttccaattatcagtgacctgcctgcaagcatccccagaagcaaacagcagaggtagaagatatcactgcagcctgctttgtgctttaattgggtaccaagctttggggatgacagtgagttgcaagaatagttttagttcagagaattgtcttaggacaacaggctaatgaaggatttggggtctgggtttttagcctggctccgttctggtgtaacccggtctagcaaaagctaagcctggattgcagggcaggaaaaaatctggaattaactttagccagtggaatttcttcaaacagagaaagagaggctgttcattgatccactattccctctattttcctctaaggtaaatatttagaggtatttacctgtaaggtgaagtttcctttttatttctactttacaatttctctctaaagcaagcttgtccaacccttggcccaggacggctttgaatatggcccgacacaaattcgtaaactttttaaaaaacattgtaagattctttctgtgatttttttttttctcgtcagctatcgttagtgtattttatgtgtggcccaagataattcttcttccaatgtggcccagggaagccaaaagatgggacacccctgctgtaaagtttcatatcactcatgaattgctcagctgatttaaataatttgtaaaatcctgctaactagcaaattcacattgagattttctattgattgggtccctttgatagctttcagattggtattgttagcgttccatttgtgaacaaatgttcccttggctttagcagatgtttttaaagtttcttttgtagaccgaacttctgaagagtaataccaaatgcctaaaattttatttttaaaaaggaaaattgtttaaagtattatatgtaaacatatgggtattttttattttgtgtaattttacatttcatgaaatgatgtcagtttcaaagagaaagtggagaggacctaacatatgtctctacctagaacggatggtttcattaaagaatgtggatttatt

SEQ ID NO: 191640 - DNA, 4502 bp, Homo sapiens
  Payload ID: 17861
  Gene Name: tonsoku-like, DNA repair protein
  Uniprot ID: Q96HA7
  ENST ID: ENST00000409379
  CDS Start-End: 31-4167
gggaagtccggatcccgcggcgatccgagcatgagcctggagcgcgagcttcgccagctgagcaaggcgaaagccaaggcgcagagggccgggcagcggcgcgaagaggccgcgctgtgccaccagctgggggagctcctggccggccatggccgctacgccgaggctctggagcagcactggcaggagctgcagcttcgggagcgcgctgacgaccctctgggctgtgccgtggcccaccgcaagatcggagagcgcctggccgagatggaggactacccggctgccttgcagcaccagcaccagtacctggagctggcacattccctgcgcaaccacacggagctgcagagggcctgggccaccatcggccgcacccacctggacatctatgaccactgccagtcgagggatgctttgctgcaggcacaggctgcctttgagaagagcttggctattgtggatgaggagctggaggggacactggcccagggagagctgaatgagatgaggacccgcctctatctcaacctgggcctcacctttgagagcctgcagcagacagccctgtgcaacgattacttcaggaagagcatcttccttgcggagcagaaccacctttacgaggacctattccgcgcccgctacaacctgggcaccatccactggcgcgcgggccagcactcccaggctatgcgctgcttggagggtgcccgggagtgtgcgcacaccatgaggaagcggttcatggagagcgagtgctgcgtggttattgcacaggtcctccaagacctgggagactttttggctgccaagcgagccctgaagaaggcctacaggctgggctcccagaagcctgtgcagagggcagccatctgtcagaacctccagcatgtgctggcagtggtccggctgcagcaacagctggaagaggctgagggcagagaccctcagggtgccatggtcatctgtgagcagctaggggacctcttctccaaggcaggagactttcccagggcagctgaggcttaccagaagcagctgcgttttgctgagctgctggacagaccgggtgctgagcgggccatcatccacgtgtccctggccaccacactgggagacatgaaggaccaccatggggccgtgcgccactatgaggaggaactgaggctgcgcagcggcaacgtgctggaggaggccaagacctggctgaacattgcactgtcccgcgaggaggccggcgatgcctacgagctgctggccccgtgcttccagaaagcgctcagctgtgcccagcaggcccagcgtccccagctgcagaggcaggtcttgcagcatctccataccgtgcagctgaggctgcagccccaggaggcccctgagaccgaaaccagactacgggagctcagtgtagctgaagatgaagatgaggaggaggaggcggaggaggcggcagccacagcggagagcgaagccctggaggccggcgaggtggagctctcagagggcgaggacgacaccgatggcctgaccccgcagctggaggaggacgaggagcttcagggccacctgggccggcggaaggggagcaagtggaaccggcgaaacgacatgggggagaccctgctgcaccgagcctgcatcgagggccagctgcgccgcgtccaggaccttgtgaggcagggccacccccttaaccctcgggactactgtggctggacacctctgcacgaggcctgcaactacgggcatctagaaattgtccgcttcctgctggaccacggggccgcagtggacgacccaggtggccagggctgcgaaggcatcacccccctccacgatgccctcaactgtggccacttcgaggtggctgagctgctgcttgaacggggggcgtccgtcaccctccgcactcgaaagggcctcagcccgctggagacgctgcagcagtgggtgaagctgtaccgcagggacctggacctggagacgcggcagaaggccagggccatggagatgctgctccaggcggctgcctcgggccaagatccccacagctcccaggccttccacaccccaagcagccttctgtttgaccccgagacctctcctcctttgagcccctgcccagaacccccctctaatagcactagactcccagaggcctctcaggcccatgtcagggtctccccagggcaggcggcaccagccatggccaggcctcggaggagcaggcatgggccagccagcagcagcagcagctcagaaggcgaggacagcgcaggccccgcacggccgtcccagaagaggcctcggtgctcggccacagcacaacgggtggcagcctggacgcctggccccgccagcaacagggaagcagccacagccagcaccagccgggcagcctaccaggcagccatccggggtgtgggcagtgctcagagccggctggggcctggcccaccgcggggccacagcaaagcccttgccccccaggcagcgctcatcccggaggaggagtgcctggccggggactggctggagctggacatgcccctgacccgcagccgccggccccgcccccggggcactggagacaaccgcaggcccagtagtacctctgggtcggacagtgaggagagcaggccccgtgcccgagccaagcaggtccgcctgacctgcatgcagagttgcagtgcgccagttaacgcagggcccagcagcctggcttcagaacctccagggagccccagcacccccagggtctcagagcccagtggggacagctctgcggcaggccagcccttgggtccggccccgccccctcccatccgggttcgagttcaagttcaggatcatctcttcctcatccctgtcccacacagcagtgacacccactctgtggcctggctggccgagcaggcggcccagcgctactaccagacctgcgggctgctgcccaggctcaccctacggaaagagggggccctgctggccccacaggacctcatccctgatgtgctgcagagcaatgacgaggtgttggctgaggtgacttcgtgggacctgcccccgttgactgaccgctaccgcagggcctgccagagcctggggcaaggggagcaccaacaggtgctgcaggccgtggagctccagggcttgggcctctcgttcagcgcctgctccctggccctggaccaggcccagcttacacccctgctgcgggccctcaagctgcacacagcactccgggagctgcgcctggcagggaaccggctgggggacaagtgtgtggctgagctggtggctgccctgggcaccatgcccagcctggccctccttgacctctcctccaatcacctgggtcccgaaggcctgcgccagcttgccatggggctcccaggccaagccaccttgcagagtttggaggagctggacttaagcatgaaccccctgggggacggctgtggccagtccctggcctccctcctgcacgcctgccccttactcagcaccctgcgcctgcaggcgtgtggcttcggccccagcttctttctgagccaccagacagcactgggtagtgctttccaagatgctgagcacctgaagaccctgtccctgtcctacaacgccctgggagcccctgccctggccaggaccctgcagagcctgcccgccggcaccctcctgcacttagagctcagctccgtggcagccggcaagggtgattcggacctcatggagcctgtattccgatacctggccaaggaaggctgtgctctagcccacctgaccctgtctgcaaaccacctgggggacaaggctgttagagacctgtgcagatgtctctctctgtgcccctcactcatctcactggatctgtctgccaaccctgagatcagctgtgccagcttggaagagctcctgtccaccctccaaaagcggccccaaggccttagcttccttggcctgtcaggctgcgccgtccagggtcccctgggcctgggcctgtgggacaagatagccgcgcagctccgggaactgcagctgtgcagcagacgcctctgcgctgaggacagggacgccctgcgccagctgcagcccagtcggccgggccccggcgagtgcacgctggaccacggctccaagctcttctttcggcgcctctgaccctggcgctgcctttccccaccctcaccgaagcccctaataaatgaagctgctggccgggcgcggtggctcacgcctgtaatcccaacactttgggaggcccaggcgggcggatcacgaggtcaggagatcgagaccatcctggctaacatggtgaaaccccgtctctactaaaaataccaaaaattagccgggcgtggtggtggaagcctgtagtcccagctactccggaggctgaggcaggagaatggcgtgaacccgggaggcggagcttgcagtgagccgagatcgcaccactgcactccagcctgggcgacagaccgagactccgtctc

SEQ ID NO: 191641 - DNA, 1713 bp, Homo sapiens
  Payload ID: 17861
  Gene Name: tonsoku-like, DNA repair protein
  ENST ID: ENST00000613741
  CDS Start-End: 240-1673
cagcagtgacttccttccacactcagcaccagcaccagtacctggagctggcacattccctgcgcaaccacacggagctgcagagggcctgggccaccatcggccgcacccacctggacatctatgaccactgccagtcgagggatgctttgctgcaggcacaggctgcctttgagaagagcttggctattgtggatgaggagctggaggggacactggcccagggagagctgaatgagatgaggacccgcctctatctcaacctgggcctcacctttgagagcctgcagcagacagccctgtgcaacgattacttcaggaagagcatcttccttgcggagcagaaccacctttacgaggacctattccgcgcccgctacaacctgggcaccatccactggcgcgcgggccagcactcccaggctatgcgctgcttggagggtgcccgggagtgtgcgcacaccatgagccttggggattctgcaaaacctttgctgctttgctctccaggtcctccaagacctgggagactttttggctgccaagcgagccctgaagaaggcctacaggctgggctcccagaagcctgtgcagagggcagccatctgtcagaacctccagcatgtgctgcagtggtccggctgcagcaacagctggaagaggctgagggcagagaccctcagggtgccatggtcatctgtgagcagctaggggacctcttctccaaggcaggagactttcccagggcagctgaggcttaccagaagcagctgcgttttgctgagctgctggacagaccgggtgctgagcgggccatcatccacgtgtccctggccaccacactgggagacatgaaggaccaccatggggccgtgcgccactatgaggaggaactgaggctgcgcagcggcaacgtgctggaggaggccaagacctggctgaacattgcactgtcccgcgaggaggcccgatgcctacgagctgctggccccgtgcttccagaaagcgctcagctgtgcccagcaggcccagcgtccccagctgcagaggcaggtcttgcagcatctccataccgtgcagctgagagccccagggcccctgagaccgaaaccagactacgggagctcagtgtagctgaagatgaagatgaggaggaggaggcggaggaggcggcacacagcggagagcgaagccctggaggccggcgaggtggagctctcagagggcgaggacgacaccgatggcctgaccccgcagctggaggaggacgaggagcttcagggccacctgggccggcgaaggggagcaagtggaaccggcgaaacgacatgggggagaccctgctgcaccgagcctgcatcgagggccagctgcgccgcgtccaggaccttgtgaggcagggccacccccttaaccctcgggactactgtggctggacacctctgcacgaggcctgcaactacgggcatctagaaattgtccgcttcctgctggaccacggggccgcagtggacgacccaggtggccagggctgcgaaggcatcacccccctccacgatgccctcaactgtggccacttcgaggtggctgagctgctgcttgaacggggggcgtccgtcaccctccgcactcgaaaggcctcagcccgctggagacgctgcagcagtgggtgaagctgtaccgcagggacctggacctggagacgcggcagaa

SEQ ID NO: 191642 - DNA, 6775 bp, Homo sapiens
  Payload ID: 17862
  Gene Name: TOPBP1-interacting checkpoint and replication regulator
  Uniprot ID: Q7Z2Z1
  ENST ID: ENST00000268138
  CDS Start-End: 106-5838
gggtcccaaaggaaagcagtgagtggtgctgtttccctgaaggaagggactaagggacggtggcgcgggcccggaccggggccccggggcggcggcacggccgatatggcatgctgtcacaaagtaatgctgctgctggacaccgcgggcggcgccgcccgccacagccgggtccggcgggccgccctgcgcctcctcacctatctgagttgccgattcggcctggccagggtccactgggccttcaagttctttgactcgcagggggcgcggagccggccgtcccgcgtgtctgacttccgcgagctggggtcccgctcgtgggaggactttgaggaggagctggaggccaggctcgaggatcgcgcccacctgcccggcccggcgcccagggccacccacacgcacggcgccctgatggagacgctgctagactaccagtgggaccggcccgagatcacgtcgcccacgaagccgatcctgcggagcagcgggaggagactgctggacgtggagagcgaggccaaggaggccgaggccgcgctcgggggcttggtgaacgccgtcttcctcctggccccctgtccgcactcgcagagggagctgctgcagttcgtgtctgggtgcgaggcccaggcccagcgcctgccgcccacccctaagcaggtgatggagaagttgttgcccaagagagtccgggaagtcatggtcgcccgaaaaatcaccttctactgggtggataccaccgaatggtctaagttgtgggaatccccagaccaccttggatactggactgtttgtgaactgctccaccacggaggtggcactgtcttgccatctgaatctttcagctgggattttgctcaagctggggaaatgctgctcaggagtggaataaagctgtcaagtgaacctcatctttctccgtggatttcaatgctgccaactgatgccactttaaaccgtttgctctacaattctcctgagtatgaggcctcgtttccacgaatggaaggaatgttatttctccctgttgaagcaggcaaagagattcaagaaacatggacagtcaccctagagcccttggccatgcatcagagacattttcagaaaccagtcagaatttttctaaaaggctcagtggcccagtggtctctcccaacgagcagcactttgggcactgacagctggatgctaggaagtccagaggagagcacagcaactcaaaggctgttatttcagcagttggtaagcaggctgactgctgaagagttacacctggttgctgatgtggaccctggtgaaggccggccccccatcactggagttatttccccactctctgccagtgctatgatcctcactgtgtgccgcaccaaggaggctgaatttcaacgacatgttctccaaacagctgtggctgacagcccccgggacacagcttcccttttctcagatgttgtggatagtatattgaatcagactcatgattcgcttgcagatactgcttctgctgcttctcctgttccagagtgggcccagcaggagcttggccacaccactccctggagtccagctgttgtggaaaagtggtttcctttctgtaacatcagtggtgccagttccgatttgatggagtcatttgggttactacaggctgcctcagctaataaggaagagtcttccaaaactgaaggcgaattaatacattgccttgccgagctctaccagagaaaatctcgtgaagaatccactatagctcatcaagaagacagcaaaaagaaacgaggggtccctcgtactccagtgagacagaagatgaataccatgtgccgttccttaaagatgttgaatgtcgcaaggctgaatgtgaaggcccagaagttacatccagatggcagtccggatgtggctggggagaaaggaatccaaaagatacctagtgggagaacagtggataaattggaagacagaggaagaacactaagaagttctaaacctaaagattttaaaactgaggaagagctgctatcatatatacgtgaaaattaccaaaagactgtggccacaggagaaatcatgttgtatgcatgtgctcgaaacatgatctcaaccgttaaaatgttcctaaaatcaaaaggcaccaaggaattagaagtgaactgcctgaatcaagtaaaaagtagtctcttaaaaactagtaaaagtcttcgacagaatctaggaaaaaaactggataaggaagacaaagttagagagtgccagcttcaggtatttcttcgtttggagatgtgtctgcaatgcccttcaataaatgaaagtacagatgatatggaacaagtagtggaggaggtgacagatttgctgcgcatggtgtgtttaactgaggattcagcgtacctagcagagtttctggaggaaattttgagattgtatattgactctatcccaaagacacttggaaatctttacaacagcctagggtttgtgattcctcagaagctggctggtgtccttcctacagattttttcagtgatgactccatgacacaagagaacaaatcaccacttctttctgtgccttttttgtcaagtgctcgtagatcagtgtcaggcagccctgaatctgatgaactgcaggaacttcgtaccagatcagccaagaagagaaggaaaaatgcattaataagacataaaagcattgctgaggtttcacagaatcttcgacaaattgaaattcctaaagtgtcaaagagagctacgaaaaaagagaactctcaccctgctcctcagcagccttcccagccagtgaaagatacagtgcaagaagtgaccaaagttcgaagaaatcttttcaaccaggaattgctttccccttcaaagagatcactaaagcgggggttgcctagaagccattctgtgtcagctgtggatggtctagaggataaacttgacaacttcaagaagaacaaaggttatcacaaactgctgactaagagtgtggccgagactccagtgcataagcagatctccaaaaggctgctgcacagacaaatcaagggcaggtcctctgatcctggtcctgatattggtgttgttgaagagtcccctgaaaaaggagatgaaataagtctgagacgaagtcctcgaatcaagcagttgtcatttagcaggacacattctgcctccttctattctgtgtctcagccgaagtctcgaagtgtgcaaagagtccactctttccagcaagataagtcagaccaaagagaaaattctccagtccaaagtattcggtctcccaagagtcttctttttggggcaatgtctgagatgatcagcccctcagaaaagggttcagctcgaatgaaaaagcgttcaagaaacactttggattcggaggtacctgcagcttaccagactcccaagaagagtcaccagaaatctctgagcttttctaaaactacaccaagaaggatctctcatacaccacaaactccgttgtatactccagaaaggctgcagaagtcccctgcaaaaatgacccctacaaagcaggcagcttttaaggagtccttaaaagactcctcctcacccggccatgactcaccattggattcaaaaatcactcctcaaaaacgacatacccaggcaggagaaggtacctctcttgaaacgaagacaccaagaactcctaagaggcaaggtactcagccgcctgggtttttgccaaactgtacttggccacattcagtgaattccagtccagaaagcccctcctgtccagcccctccaacttcatcgactgcccagcccaggagagagtgtctcactcccatcagagaccctctcagaacacctccgagagcagcagccttcatgggcacgcctcagaatcaaacacaccaacagccccatgtcctcagagctgctcgggcagaggaaccagcccagaaactaaaggataaagctatcaaaactccaaaaagaccagggaattcaactgtgacttcttccccacctgttacgccaaagaaactgtttacctctcctttatgtgatgtctccaagaagagtccatttaggaaatctaaaatagagtgtccttccccaggagaactggatcagaaagagccccagatgtcacccagcgtagctgcatctctctcctgccctgttccctcaactccccctgaactctcacagagagctacattggacaccgtccctcctccacccccttctaaagttgggaaacggtgtagaaagacctctgatcccagaaggagcatcgtggagtgtcagcctgatgcctccgctactcctggggttggcacagctgacagcccagctgcccccacagactctagagatgaccagaagggactgagcctctctcctcagtctcctcctgaaagacggggctacccaggccctggtctcaggagtgattggcatgcatcctctcctctgctcattacaagtgacacagagcatgtcactctcctcagtgaagccgaacaccatggcattggtgacttgaaaagtaacgtcttatcagtggaagagggtgaggggctaaggacagcagatgctgagaagtcttctctgtctcaccctgggattcccccatctcctccttcctgtgggcctggctctcctctgatgccttcccgtgacgtgcactgtaccacagatgggagacagtgccaggcttcggcacaactagacaacctgccagcatcagcttggcattccacagactctgccagcccacagacctatgaggttgagctggagatgcaagcttctggccttcccaaacttcgaattaagaagatagaccccagctcttcattagaggctgagcccctcagcaaggaggagagctctctgggagaagagagcttcctccctgctctcagcatgcccagggccagcaggtccttaagcaaacctgaacccacctatgtgtcacccccctgcccccgcctctcccacagcacacctggcaagagcagggggcaaacctacatctgccaggcctgtacccccacccacggcccttctagtaccccctctccatttcaaacagatggggttccttggacaccatcccccaagcacagtgggaagacaactccagacataattaaagactggcccaggaggaagagggcggtgggctgtggcgccggctcctcttccgggaggggcgaggtcggtgcagaccttcctgggagcctgtcactgcttgagtcagagggcaaggaccacggccttgaactcagcatccacaggacgcccatcttggaggattttgagctcgagggagtgtgccagctcccagaccagtcgcctcccaggaacagcatgcctaaggccgaggaagcctcttcctggggacagtttgggttgagttccaggaagagagtcctgttggccaaggaagaagctgaccgtggagccaaaaggatctgtgacctgagagaagattcagaagttagtaagagtaaagaggggtctccaagttggagtgcatggcagctaccctccacgggagacgaagaggtgtttgtttccggctccaccccacctcccagctgtgccgtgcggagctgcctctctgccagtgccctccaggctctgacccagtctccgctgctgttccaggggaaaacaccttcctctcagagcaaagaccccagagatgaggatgtggatgttcttccctccactgtagaagactctcctttcagtcgcgctttctccaggaggcgccccatcagcagaacttatacacggaagaagctcatgggaacctggctggaggacttatagccacaaacattactgagcccaaaagatcaaggagtcagccaggaccctgtggacataaagaagttggatgcctggtcccaagcctcttttgccatggtcagtgttcagattgccattagaatgccttagggttttctaattccccttatggatccaatccatctcctggccctgccccttgttggggaagttgcaggaggagaggtggatggcaatgtgattggtgctataactcaggcagcctgggagtcaggaacccagacaaggaatcccattccagcctcaccccaaccatgaccttggcaagtcagggggccactctgcctcatttatgcaaatggagaaaggcgccctccctggggtcccttgagctgctgtaaggctgggctgctgcgacacaggcagcgctttgtaaactgtgaagccatatacgtgaaactgaagagtgcattgggcagtggaagctattttttgccttccctgtgtaacagtaaaatcatctctagtgactgagcactcagtacatttttgtttaatgttgggcctgaggttaactgtgaccatggtccagcttgagtggcttctggagcagccacattttcaaggactgtccaagagccagccagttcagggctcaggcctcacccattgcccactcctggggagaccatcacctggctcatcgtttccaccaagagtgccccacaggagtgccccacagacccgctggaccagcctgctgcgggtcctggccaggggtctggctaacggtgagggctgactctgaactgtctctcagtctccagaaagtgttcaagcctgttgtgttcccaaatctgattcctcctattgtcttgtaaatcaaactctaagtgaaaacttcccatttgtcccttcaaagatttttttttattaaatggttttttaagatcctaaa

SEQ ID NO: 191643 - DNA, 6656 bp, Homo sapiens
  Payload ID: 17862
  Gene Name: TOPBP1-interacting checkpoint and replication regulator
  Uniprot ID: Q7Z2Z1
  ENST ID: ENST00000560985
  CDS Start-End: 1-5730
atggcatgctgtcacaaagtaatgctgctgctggacaccgcgggcggcgccgcccgccacagccgggtccggcgggccgccctgcgcctcctcacctatctgagttgccgattcggcctggccagggtccactgggccttcaagttctttgactcgcagggggcgcggagccggccgtcccgcgtgtctgacttccgcgagctggggtcccgctcgtgggaggactttgaggaggagctggaggccaggctcgaggatcgcgcccacctgcccggcccggcgcccagggccacccacacgcacggcgccctgatggagacgctgctagactaccagtgggaccggcccgagatcacgtcgcccacgaagccgatcctgcggagcagcgggaggagactgctggacgtggagagcgaggccaaggaggccgaggccgcgctcgggggcttggtgaacgccgtcttcctcctggccccctgtccgcactcgcagagggagctgctgcagttcgtgtctgggtgcgaggcccaggcccagcgcctgccgcccacccctaagcaggtgatggagaagttgttgcccaagagagtccgggaagtcatggtcgcccgaaaaatcaccttctactgggtggataccaccgaatggtctaagttgtgggaatccccagaccaccttggatactggactgtttgtgaactgctccaccacggaggtggcactgtcttgccatctgaatctttcagctgggattttgctcaagctggggaaatgctgctcaggagtggaataaagctgtcaagtgaacctcatctttctccgtggatttcaatgctgccaactgatgccactttaaaccgtttgctctacaattctcctgagtatgaggcctcgtttccacgaatggaaggaatgttatttctccctgttgaaggcaaagagattcaagaaacatggacagtcaccctagagcccttggccatgcatcagagacattttcagaaaccagtcagaatttttctaaaaggctcagtggcccagtggtctctcccaacgagcagcactttgggcactgacagctggatgctaggaagtccagaggagagcacagcaactcaaaggctgttatttcagcagttggtaagcaggctgactgctgaagagttacacctggttgctgatgtggaccctggtgaaggccggccccccatcactggagttatttccccactctctgccagtgctatgatcctcactgtgtgccgcaccaaggaggctgaatttcaacgacatgttctccaaacagctgtggctgacagcccccgggacacagcttcccttttctcagatgttgtggatagtatattgaatcagactcatgattcgcttgcagatactgcttctgctgcttctcctgttccagagtgggcccagcaggagcttggccacaccactccctggagtccagctgttgtggaaaagtggtttcctttctgtaacatcagtggtgccagttccgatttgatggagtcatttgggttactacaggctgcctcagctaataaggaagagtcttccaaaactgaaggcgaattaatacattgccttgccgagctctaccagagaaaatctcgtgaagaatccactatagctcatcaagaagacagcaaaaagaaacgaggggtccctcgtactccagtgagacagaagatgaataccatgtgccgttccttaaagatgttgaatgtcgcaaggctgaatgtgaaggcccagaagttacatccagatggcagtccggatgtggctggggagaaaggaatccaaaagatacctagtgggagaacagtggataaattggaagacagaggaagaacactaagaagttctaaacctaaagattttaaaactgaggaagagctgctatcatatatacgtgaaaattaccaaaagactgtggccacaggagaaatcatgttgtatgcatgtgctcgaaacatgatctcaaccgttaaaatgttcctaaaatcaaaaggcaccaaggaattagaagtgaactgcctgaatcaagtaaaaagtagtctcttaaaaactagtaaaagtcttcgacagaatctaggaaaaaaactggataaggaagacaaagttagagagtgccagcttcaggtatttcttcgtttggagatgtgtctgcaatgcccttcaataaatgaaagtacagatgatatggaacaagtagtggaggaggtgacagatttgctgcgcatggtgtgtttaactgaggattcagcgtacctagcagagtttctggaggaaattttgagattgtatattgactctatcccaaagacacttggaaatctttacaacagcctagggtttgtgattcctcagaagctggctggtgtccttcctacagattttttcagtgatgactccatgacacaagagaacaaatcaccacttctttctgtgccttttttgtcaagtgctcgtagatcagtgtcaggcagccctgaatctgatgaactgcaggaacttcgtaccagatcagccaagaagagaaggaaaaatgcattaataagacataaaagcattgctgaggtttcacagaatcttcgacaaattgaaattcctaaagtgtcaaagagagctacgaaaaaagagaactctcaccctgctcctcagcagccttcccagccagtgaaagatacagtgcaagaagtgaccaaagttcgaagaaatcttttcaaccaggaattgctttccccttcaaagagatcactaaagcgggggttgcctagaagccattctgtgtcagctgtggatggtctagaggataaacttgacaacttcaagaagaacaaaggttatcacaaactgctgactaagagtgtggccgagactccagtgcataagcagatctccaaaaggctgctgcacagacaaatcaagggcaggtcctctgatcctggtcctgatattggtgttgttgaagagtcccctgaaaaaggagatgaaataagtctgagacgaagtcctcgaatcaagcagttgtcatttagcaggacacattctgcctccttctattctgtgtctcagccgaagtctcgaagtgtgcaaagagtccactctttccagcaagataagtcagaccaaagagaaaattctccagtccaaagtattcggtctcccaagagtcttctttttggggcaatgtctgagatgatcagcccctcagaaaagggttcagctcgaatgaaaaagcgttcaagaaacactttggattcggaggtacctgcagcttaccagactcccaagaagagtcaccagaaatctctgagcttttctaaaactacaccaagaaggatctctcatacaccacaaactccgttgtatactccagaaaggctgcagaagtcccctgcaaaaatgacccctacaaagcaggcagcttttaaggagtccttaaaagactcctcctcacccggccatgactcaccattggattcaaaaatcactcctcaaaaacgacatacccaggcaggagaaggtacctctcttgaaacgaagacaccaagaactcctaagaggcaaggtactcagccgcctgggtttttgccaaactgtacttggccacattcagtgaattccagtccagaaagcccctcctgtccagcccctccaacttcatcgactgcccagcccaggagagagtgtctcactcccatcagagaccctctcagaacacctccgagagcagcagccttcatgggcacgcctcagaatcaaacacaccaacagccccatgtcctcagagctgctcgggcagaggaaccagcccagaaactaaaggataaagctatcaaaactccaaaaagaccagggaattcaactgtgacttcttccccacctgttacgccaaagaaactgtttacctctcctttatgtgatgtctccaagaagagtccatttaggaaatctaaaatagagtgtccttccccaggagaactggatcagaaagagccccagatgtcacccagcgtagctgcatctctctcctgccctgttccctcaactccccctgaactctcacagagagctacattggacaccgtccctcctccacccccttctaaagttgggaaacggtgtagaaagacctctgatcccagaaggagcatcgtggagtgtcagcctgatgcctccgctactcctggggttggcacagctgacagcccagctgcccccacagactctagagatgaccagaagggactgagcctctctcctcagtctcctcctgaaagacggggctacccaggccctggtctcaggagtgattggcatgcatcctctcctctgctcattacaagtgacacagagcatgtcactctcctcagtgaagccgaacaccatggcattggtgacttgaaaagtaacgtcttatcagtggaagagggtgaggggctaaggacagcagatgctgagaagtcttctctgtctcaccctgggattcccccatctcctccttcctgtgggcctggctctcctctgatgccttcccgtgacgtgcactgtaccacagatgggagacagtgccaggcttcggcacaactagacaacctgccagcatcagcttggcattccacagactctgccagcccacagacctatgaggttgagctggagatgcaagcttctggccttcccaaacttcgaattaagaagatagaccccagctcttcattagaggctgagcccctcagcaaggaggagagctctctgggagaagagagcttcctccctgctctcagcatgcccagggccagcaggtccttaagcaaacctgaacccacctatgtgtcacccccctgcccccgcctctcccacagcacacctggcaagagcagggggcaaacctacatctgccaggcctgtacccccacccacggcccttctagtaccccctctccatttcaaacagatggggttccttggacaccatcccccaagcacagtgggaagacaactccagacataattaaagactggcccaggaggaagagggcggtgggctgtggcgccggctcctcttccgggaggggcgaggtcggtgcagaccttcctgggagcctgtcactgcttgagtcagagggcaaggaccacggccttgaactcagcatccacaggacgcccatcttggaggattttgagctcgagggagtgtgccagctcccagaccagtcgcctcccaggaacagcatgcctaaggccgaggaagcctcttcctggggacagtttgggttgagttccaggaagagagtcctgttggccaaggaagaagctgaccgtggagccaaaaggatctgtgacctgagagaagattcagaagttagtaagagtaaagaggggtctccaagttggagtgcatggcagctaccctccacgggagacgaagaggtgtttgtttccggctccaccccacctcccagctgtgccgtgcggagctgcctctctgccagtgccctccaggctctgacccagtctccgctgctgttccaggggaaaacaccttcctctcagagcaaagaccccagagatgaggatgtggatgttcttccctccactgtagaagactctcctttcagtcgcgctttctccaggaggcgccccatcagcagaacttatacacggaagaagctcatgggaacctggctggaggacttatagccacaaacattactgagcccaaaagatcaaggagtcagccaggaccctgtggacataaagaagttggatgcctggtcccaagcctcttttgccatggtcagtgttcagattgccattagaatgccttagggttttctaattccccttatggatccaatccatctcctggccctgccccttgttggggaagttgcaggaggagaggtggatggcaatgtgattggtgctataactcaggcagcctgggagtcaggaacccagacaaggaatcccattccagcctcaccccaaccatgaccttggcaagtcagggggccactctgcctcatttatgcaaatggagaaaggcgccctccctggggtcccttgagctgctgtaaggctgggctgctgcgacacaggcagcgctttgtaaactgtgaagccatatacgtgaaactgaagagtgcattgggcagtggaagctattttttgccttccctgtgtaacagtaaaatcatctctagtgactgagcactcagtacatttttgtttaatgttgggcctgaggttaactgtgaccatggtccagcttgagtggcttctggagcagccacattttcaaggactgtccaagagccagccagttcagggctcaggcctcacccattgcccactcctggggagaccatcacctggctcatcgtttccaccaagagtgccccacaggagtgccccacagacccgctggaccagcctgctgcgggtcctggccaggggtctggctaacggtgagggctgactctgaactgtctctcagtctccagaaagtgttcaagcctgttgtgttcccaaatctgattcctcctattgtcttgtaaatcaaactctaagtgaaaacttcccatttgtcccttcaaagatttttttttattaaatggtttttt

SEQ ID NO: 191644 - DNA, 2367 bp, Homo sapiens
  Payload ID: 17862
  Gene Name: TOPBP1-interacting checkpoint and replication regulator
  ENST ID: ENST00000561095
  CDS Start-End: 1-644
gctcctcttccgggaggggcgaggtcggtgcagaccttcctgggagcctgtcactgcttgagtcagagggcaaggaccacggccttgaactcagcatccacaggacgcccatcttggaggattttgagctcgagggagtgtgccagctcccagaccagtcgcctcccaggaacagcatgcctaaggccgaggaagcctcttcctggggacagtttgggttgagttccaggaagagagtcctgttggccaaggaagaagctgaccgtggagccaaaaggatctgtgacctgagagaagattcagaagttagtaagagtaaagaggggtctccaagttggagtgcatggcagctaccctccacgggagacgaagaggtgtttgtttccggctccaccccacctcccagctgtgccgtgcggagctgcctctctgccagtgccctccaggctctgacccagtctccgctgctgttccaggggaaaacaccttcctctcagagcaaagaccccagagatgaggatgtggatgttcttccctccactgtagaagactctcctttcagtcgcgctttctccaggaggcgccccatcagcagaacttatacacggaagaagctcatgggaacctggctggaggacttatagccacaaacattactgagcccaaaagatcaaggagtcagccaggaccctgtggacataaagaagttggatgcctggtcccaagcctcttttgccatgggtcagctggcggtccatctccaggcgctgccgctccagggccacctccagccagtacaccagcctctgctgctcctccagctgcatctccagttccgagaaggcaatctgctgctggtgctgctcctctcggagcgtcaccacctgtcccaagacccagccaggctcagccctcatcatgacccctcttcatccagctaatcctcaatcacagacacagtattggcacacttgccaccacggcactaagaaatcaccagggtcttccctgctgagccaagactcagcctcagacacctcagcagtgctctagttatcttccaacgatcagagctggctctcaccttatctgctatctctgccacaaaccctttcctagccacacactatggagctgggcagagcgtcaagttgtgggatttcatctagaccaacctcagcactatggacatctgggaccagataattcttggttgtgggggcctgtcctgtgtgttataggatgtttagtaacatccctggcctccacccccaccactgtgacaaccaaaagtatctccagccatggccaaatgtcacaaaagggcaaaaacttcccctactgagagctactattgtggccatggaccaccctgaggttagccaatcagagcagaagtggggggcgggtaggaaactgggtcttagtttcacaagtaaaataggctttaaggtcaggcggccctgcagatgagttggtcctgattctgtcccccagtctgggaggaaacgggatatccgctggagcagctgccatgagacacctccccacacgtgccgctgaggaggagctggggggccatgggctgctggcccaccttgtcaaaatacttgcagaggagggctctggtctctgaggatgagaggtagctgagcttggccatgaggttcatctcgcactgggacagcaacgaggctgaggcccgaagcacccgctggcggcatgtgatggcctcattcttatactcaatggcagcatccagggcctcgatggcctcatccaactggaacagcgtccgctcctcctgcagagacgggcacgcgtggaggaacagcacccactgcctgaatgctgaagtcctgggcagacatgcaacagccaacacgtagccacaactgggccttaagggtcccctcgtcccaagggccaagtcagcccatcgagagaggtgccccctgctcactgtcacagccccaaccccagggtgagctgggggcactgctcagaggtggcctgctcaactgcaagcctctgtgaatgatctacattcaggaagttcagagcaccctaaccaaacaaaaggcatggttgggacagccacggaggcaccacggtgtctgctgggtaagcttctacagatggggatacgttctaagaaatgcatcattaggcgttttcgacgtcgtgcaaacatcagaatatactcacacaaacctagatggtatagcccaccacacacctaggctacaagcctggacagcatgtgactgtactgaatactgtaggcagttgttaaccatggtgagtatttgtgtatctaaacatagaaaacgcacagtaaaaatgcggtgttataattttctggga

SEQ ID NO: 191645 - DNA, 3738 bp, Homo sapiens
  Payload ID: 17863
  Gene Name: topoisomerase (DNA) I
  Uniprot ID: P11387
  ENST ID: ENST00000361337
  CDS Start-End: 251-2548
agcccaaatgcgaacttaggctgttacacaactgctggggtctgttctcgccgcccgcccggcagtcaggcagcgtcgccgccgtggtagcagcctcagccgtttctggagtctcgggcccacagtcaccgccgcttacctgcgcctcctcgagcctccggagtccccgtccgcccgcacaggccggttcgccgtctgcgtctcccccacgccgcctcgcctgccgccgcgctcgtccctccgggccgacatgagtggggaccacctccacaacgattcccagatcgaagcggatttccgattgaatgattctcataaacacaaagataaacacaaagatcgagaacaccggcacaaagaacacaagaaggagaaggaccgggaaaagtccaagcatagcaacagtgaacataaagattctgaaaagaaacacaaagagaaggagaagaccaaacacaaagatggaagctcagaaaagcataaagacaaacataaagacagagacaaggaaaaacgaaaagaggaaaaggttcgagcctctggggatgcaaaaataaagaaggagaaggaaaatggcttctctagtccaccacaaattaaagatgaacctgaagatgatggctattttgttcctcctaaagaggatataaagccattaaagagacctcgagatgaggatgatgctgattataaacctaagaaaattaaaacagaagataccaagaaggagaagaaaagaaaactagaagaagaagaggatggtaaattgaaaaaacccaagaataaagataaagataaaaaagttcctgagccagataacaagaaaaagaagccgaagaaagaagaggaacagaagtggaaatggtgggaagaagagcgctatcctgaaggcatcaagtggaaattcctagaacataaaggtccagtatttgccccaccatatgagcctcttccagagaatgtcaagttttattatgatggtaaagtcatgaagctgagccccaaagcagaggaagtagctacgttctttgcaaaaatgctcgaccatgaatatactaccaaggaaatatttaggaaaaatttctttaaagactggagaaaggaaatgactaatgaagagaagaatattatcaccaacctaagcaaatgtgattttacccagatgagccagtatttcaaagcccagacggaagctcggaaacagatgagcaaggaagagaaactgaaaatcaaagaggagaatgaaaaattactgaaagaatatggattctgtattatggataaccacaaagagaggattgctaacttcaagatagagcctcctggacttttccgtggccgcggcaaccaccccaagatgggcatgctgaagagacgaatcatgcccgaggatataatcatcaactgtagcaaagatgccaaggttccttctcctcctccaggacataagtggaaagaagtccggcatgataacaaggttacttggctggtttcctggacagagaacatccaaggttccattaaatacatcatgcttaaccctagttcacgaatcaagggtgagaaggactggcagaaatacgagactgctcggcggctgaaaaaatgtgtggacaagatccggaaccagtatcgagaagactggaagtccaaagagatgaaagtccggcagagagctgtagccctgtacttcatcgacaagcttgctctgagagcaggcaatgaaaaggaggaaggagaaacagcggacactgtgggctgctgctcacttcgtgtggagcacatcaatctacacccagagttggatggtcaggaatatgtggtagagtttgacttcctcgggaaggactccatcagatactataacaaggtccctgttgagaaacgagtttttaagaacctacaactatttatggagaacaagcagcccgaggatgatctttttgatagactcaatactggtattctgaataagcatcttcaggatctcatggagggcttgacagccaaggtattccgtacatacaatgcctccatcacgctacagcagcagctaaaagaactgacagccccggatgagaacatcccagcgaagatcctttcttataaccgtgccaatcgagctgttgcaattctttgtaaccatcagagggcaccaccaaaaacttttgagaagtctatgatgaacttgcaaactaagattgatgccaagaaggaacagctagcagatgcccggagagacctgaaaagtgctaaggctgatgccaaggtcatgaaggatgcaaagacgaagaaggtagtagagtcaaagaagaaggctgttcagagactggaggaacagttgatgaagctggaagttcaagccacagaccgagaggaaaataaacagattgccctgggaacctccaaactcaattatctggaccctaggatcacagtggcttggtgcaagaagtggggtgtcccaattgagaagatttacaacaaaacccagcgggagaagtttgcctgggccattgacatggctgatgaagactatgagttttagccagtctcaagaggcagagttctgtgaagaggaacagtgtggtttgggaaagatggataaactgagcctcacttgccctcgtgcctgggggagagaggcagcaagtcttaacaaaccaacatctttgcgaaaagataaacctggagatattataagggagagctgagccagttgtcctatggacaacttatttaaaaatatttcagatatcaaaattctagctgtatgatttgttttgaattttgtttttattttcaagagggcaagtggatgggaatttgtcagcgttctaccaggcaaattcactgtttcactgaaatgtttggattctcttagctactgtatgcaaagtccgattatattggtgcgtttttacagttagggttttgcaataacttctatattttaatagaaataaattcctaaactcccttccctctctcccatttcaggaatttaaaattaagtagaacaaaaaacccagcgcacctgttagagtcgtcactctctattgtcatggggatcaattttcattaaacttgaagcagtcgtggctttggcagtgttttggttcagacacctgttcacagaaaaagcatgatgggaaaatatttcctgacttgagtgttcctttttaaatgtgaatttttatttctttttaattattttaaaatatttaaacctttttcttgatcttaaagatcgtgtagattggggttggggagggatgaagggcgagtgaatctaaggataatgaaataatcagtgactgaaaccattttcccatcatcctttgttctgagcattcgctgtaccctttaagatatccatctttttctttttaaccctaatctttcacttgaaagattttattgtataaaaagtttcacaggtcaataaacttagaggaaaatgagtatttggtccaaaaaaaggaaaaataatcaagattttagggcttttattttttcttttgtaattgtgtaaaaaatggaaaaaaacataaaaagcagaattttaatgtgaagacattttttgctataatcattagttttagaggcattgttagtttagtgtgtgtgcagagtccatttcccacatctttcctcaagtatcttctatttttatcatgaattcccttttaatcaactgtaggttatttaaaataaattcctacaacttaatggaaa

SEQ ID NO: 191646 - DNA, 1958 bp, Homo sapiens
  Payload ID: 17864
  Gene Name: topoisomerase (DNA) I, mitochondrial
  Uniprot ID: Q969P6
  ENST ID: ENST00000329245
  CDS Start-End: 36-1841
ggcccagcttgtcgctctttcccggaggctggcagatgcgcgtggtgcggctgctgcggctccgggcggctctgacgctgctcggggaggtcccccgccgcccggcctcccggggtgtcccgggctcgcgcaggacgcagaagggcagtggagccaggtgggagaaggagaagcacgaagacggggtgaagtggagacagctggagcacaagggcccgtacttcgcacccccatacgagccccttcccgacggagtgcgtttcttctatgaaggaaggcctgtgagattgagcgtggcagcggaggaggtcgccactttttatgggaggatgttagatcatgaatacacaacaaaggaggttttccggaagaacttcttcaatgactggcgaaaggaaatggcggtggaagagagggaagtcatcaagagcctggacaagtgtgacttcacggagatccacagatactttgtggacaaggccgcagcccggaaagtcctgagcagggaggagaagcagaagctaaaagaagaggcagaaaaacttcagcaagagttcggctactgtattttagatggtcaccaagaaaaaataggcaacttcaagattgagccgcctggcttgttccgtggccgtggcgaccatcccaagatggggatgctgaagagaaggatcacgccagaggatgtggttatcaactgcagcagggactcgaagatccccgagccgccggcggggcaccagtggaaggaggtgcgctccgataacaccgtcacgtggctggcagcttggaccgagagcgttcagaactccatcaagtacatcatgctgaacccttgctcgaagctgaagggggagacagcttggcagaagtttgaaacagctcgacgcctgcggggatttgtggacgagatccgctcccagtaccgggctgactggaagtctcgggaaatgaagacgagacagcgggcggtggccctgtatttcatcgataagctggcactgagagcaggaaatgagaaggaggacggtgaggcggccgacaccgtgggctgctgttccctccgcgtggagcacgtccagctgcacccggaggccgatggctgccaacacgtggtggaatttgacttcctggggaaggactgcatccgctactacaacagagtgccggtggagaagccggtgtacaagaacttacagctctttatggagaacaaggacccccgggacgacctcttcgacaggctgaccacgaccagcctgaacaagcacctccaggagctgatggacgggctgacggccaaggtgttccggacctacaacgcctccatcactctgcaggagcagctgcgggccctgacgcgcgccgaggacagcatagcagctaagatcttatcctacaaccgagccaaccgagtcgtggccattctctgcaaccatcagcgagcaacccccagtacgttcgagaagtcgatgcagaatctccagacgaagatccaggcaaagaaggagcaggtggctgaggccagggcagagctgaggagggcgagggctgagcacaaagcccaaggggatggcaagtccaggagtgtcctggagaagaagaggcggctcctggagaagctgcaggagcagctggcgcagctgagtgtgcaggccacggacaaggaggagaacaagcaggtggccctgggcacgtccaagctcaactacctggaccccaggatcagcattgcctggtgcaagcggttcagggtgccagtggagaagatctacagcaaaacacagcgggagaggttcgcctgggctctcgccatggcaggagaagactttgaattctaacgacgagccgtgttgaaacttcttttgtatgtgtgtgtgtttttttcactattaaagcagtactggggaattttgtacaataaaatgtgtgcaagtgcttgtacatcactagaaaaa

SEQ ID NO: 191647 - DNA, 892 bp, Homo sapiens
  Payload ID: 17864
  Gene Name: topoisomerase (DNA) I, mitochondrial
  ENST ID: ENST00000519977
  CDS Start-End: 1-334
ggagcaggtggctgaggccagggcagagctgaggagggcgagggctgagcacaaagcccaaggggatggcaagtccaggagtgtcctggagaagaagaggcggctcctggagaagctgcaggagcagctggcgcagctgagtgtgcaggccacggacaaggaggagaacaagcaggtggccctgggcacgtccaagctcaactacctggaccccaggatcagcattgcctggtgcaagcggttcagggtgccagtggagaagatctacagcaaaacacagcgggagaggttcgcctgggctctcgccatggcaggagaagactttgaattctaacgacgagccgtgttgaaacttcttttatgctttaggtactgattttctcctctccgcctggctggaacatccgtctgcatcggacgggcttccttctgcacctgtgacctcacaagggctctccttggggaggcaggaccagagcagccctgagtaaccgggcacagccgaggaacaggccccagggaggccaggacccgggtcctcacgcctgcggccacagaagcaccgtgtccctgcagctgtgagccaccaggcgtctgggtgggtggttactcagcaagtgccagtagagaaactgggtcccagagttggggttgctgtggactggatacttgtccctcacctccagttcacatgttaaagtcctcacccccagcaagacagtgttggaggtggggcctttgggaggggagcaggtttagagaagatcctgggggaccctcacgatgagatgagtgccctcatgggaagagacaccggagcctcctctccaggagcacacacgggacggtcacatgagcaagaggctgctgtccgtaagctgggggtggtccc

SEQ ID NO: 191648 - DNA, 906 bp, Homo sapiens
  Payload ID: 17864
  Gene Name: topoisomerase (DNA) I, mitochondrial
  ENST ID: ENST00000522041
  CDS Start-End: 242-906
cactggctgcactgctggacccccttccacccagctcctcggaggcagggctctctcataagcagccaggtgggagaaggagaagcacgaagacggggtgaagtggagacagctggagcacaagggcccgtacttcgcacccccatacgagccccttcccgacggagtgcgtttcttctatgaaggaaggcctgtgagattgagcgtggcagcggaggaggtcgccactttttatgggaggatgttagatcatgaatacacaacaaaggaggttttccggaagaacttcttcaatgactggcgaaaggaaatggcggtggaagagagggaagtcatcaagagcctggacaagtgtgacttcacggagatccacagatactttgtggacaaggccgcagcccggaaagtcctgagcagggaggagaagcagaagctaaaagaagaggcagaaaaacttcagcaagagttcggctactgtattttagatggtcaccaagaaaaaataggcaacttcaagattgagccgcctggcttgttccgtggccgtggcgaccatcccaagatggggatgctgaagagaaggatcacgccagaggatgtggttatcaactgcagcagggactcgaagatccccgagccgccggcggggcaccagtggaaggaggtgcgctccgataacaccgtcacgtggctggcagcttggaccgagagcgttcagaactccatcaagtacatcatgctgaacccttgctcgaagctgaagggggagacagcttggcagaagtttgaaacagctcgacgcctgcggggatttgtggacgagatccgctcccagtaccgggctgactggaagtctcgggaaatgaagacgagacagcgggcggtggccctgtatttcatcgataa

SEQ ID NO: 191649 - DNA, 1960 bp, Homo sapiens
  Payload ID: 17864
  Gene Name: topoisomerase (DNA) I, mitochondrial
  Uniprot ID: Q969P6
  ENST ID: ENST00000521193
  CDS Start-End: 364-1875
gagccgtggtgcggtgggaccgcgtgggtcctggaagagctgcagaggagagtgacggctttggatgcgctttgccccagggcctttcttcccggagttggccttttccctgcccttctcttctcctggcgtggtgacctgcctcccttctcctggatcgctttgctggcagccaccttgtaacacctcaggtgggagaaggagaagcacgaagacggggtgaagtggagacagctggagcacaagggcccgtacttcgcacccccatacgagccccttcccgacggagtgcgtttcttctatgaaggaaggcctgtgagattgagcgtggcagcggaggaggtcgccactttttatgggaggatgttagatcatgaatacacaacaaaggaggttttccggaagaacttcttcaatgactggcgaaaggaaatggcggtggaagagagggaagtcatcaagagcctggacaagtgtgacttcacggagatccacagatactttgtggacaaggccgcagcccggaaagtcctgagcagggaggagaagcagaagctaaaagaagaggcagaaaaacttcagcaagagttcggctactgtattttagatggtcaccaagaaaaaataggcaacttcaagattgagccgcctggcttgttccgtggccgtggcgaccatcccaagatggggatgctgaagagaaggatcacgccagaggatgtggttatcaactgcagcagggactcgaagatccccgagccgccggcggggcaccagtggaaggaggtgcgctccgataacaccgtcacgtggctggcagcttggaccgagagcgttcagaactccatcaagtacatcatgctgaacccttgctcgaagctgaagggggagacagcttggcagaagtttgaaacagctcgacgcctgcggggatttgtggacgagatccgctcccagtaccgggctgactggaagtctcgggaaatgaagacgagacagcgggcggtggccctgtatttcatcgataagctggcactgagagcaggaaatgagaaggaggacggtgaggcggccgacaccgtgggctgctgttccctccgcgtggagcacgtccagctgcacccggaggccgatggctgccaacacgtggtggaatttgacttcctggggaaggactgcatccgctactacaacagagtgccggtggagaagccggtgtacaagaacttacagctctttatggagaacaaggacccccgggacgacctcttcgacaggctgaccacgaccagcctgaacaagcacctccaggagctgatggacgggctgacggccaaggtgttccggacctacaacgcctccatcactctgcaggagcagctgcgggccctgacgcgcgccgaggacagcatagcagctaagatcttatcctacaaccgagccaaccgagtcgtggccattctctgcaaccatcagcgagcaacccccagtacgttcgagaagtcgatgcagaatctccagacgaagatccaggcaaagaaggagcaggtggctgaggccagggcagagctgaggagggcgagggctgagcacaaagcccaaggggatggcaagtccaggagtgtcctggagaagaagaggcggctcctggagaagctgcaggagcagctggcgcagctgagtgtgcaggccacggacaaggaggagaacaagcaggtggccctgggcacgtccaagctcaactacctggaccccaggatcagcattgcctggtgcaagcggttcagggtgccagtggagaagatctacagcaaaacacagcgggagaggttcgcctgggctctcgccatggcaggagaagactttgaattctaacgacgagccgtgttgaaacttcttttgtatgtgtgtgtgtttttttcactattaaagcagtactggggaattttgtacaataaaa

SEQ ID NO: 191650 - DNA, 1561 bp, Homo sapiens
  Payload ID: 17864
  Gene Name: topoisomerase (DNA) I, mitochondrial
  ENST ID: ENST00000519139
  CDS Start-End: 434-1561
attcacttagtgcttccagcgtggcatgtctctgtgacctggtggtgcgctatcagcatacccattcacagctgagggcctgcacagctgcctaaggccatgctgcagaaatgtcctgtctgcctgcaggagcttgggacccaaagagagccccagatggggcagggtgtcttgggaggagggagttctggcctgcgcttggagctggggctggctgtgggccctgcattgaggcacatctctccgagggtgcacaggcaggtgggagaaggagaagcacgaagacggggtgaagtggagacagctggagcacaagggcccgtacttcgcacccccatacgagccccttcccgacggagtgcgtttcttctatgaaggaaggcctgtgagattgagcgtggcagcggaggaggtcgccactttttatgggaggatgttagatcatgaatacacaacaaaggaggttttccggaagaacttcttcaatgactggcgaaaggaaatggcggtggaagagagggaagtcatcaagagcctggacaagtgtgacttcacggagatccacagatactttgtggacaaggccgcagcccggaaagtcctgagcagggaggagaagcagaagctaaaagaagaggcagaaaaacttcagcaagagttcggctactgtattttagatggtcaccaagaaaaaataggcaacttcaagattgagccgcctggcttgttccgtggccgtggcgaccatcccaagatggggatgctgaagagaaggatcacgccagaggatgtggttatcaactgcagcagggactcgaagatccccgagccgccggcggggcaccagtggaaggaggtgcgctccgataacaccgtcacgtggctggcagcttggaccgagagcgttcagaactccatcaagtacatcatgctgaacccttgctcgaagctgaagggggagacagcttggcagaagtttgaaacagctcgacgcctgcggggatttgtggacgagatccgctcccagtaccgggctgactggaagtctcgggaaatgaagacgagacagcgggcggtggccctgtatttcatcgataagctggcactgagagcaggaaatgagaaggaggacggtgaggcggccgacaccgtgggctgctgttccctccgcgtggagcacgtccagctgcacccggaggccgatggctgccaacacgtggtggaatttgacttcctggggaaggactgcatccgctactacaacagagtgccggtggagaagccggtgtacaagaacttacagctctttatggagaacaaggacccccgggacgacctcttcgacaggctgaccgtaagctgggacggccccgcaaaaccacgtaattatagagaccattttcctccccagacgaccagcctgaacaagcacctccaggagctgatggacgggctgacggccaaggtgttccggacctacaacgcctccatcactctgcaggagcagctgcgggccctgacgcgcgccgaggacagcatagcagctaagatcttatcctac

SEQ ID NO: 191651 - DNA, 613 bp, Homo sapiens
  Payload ID: 17864
  Gene Name: topoisomerase (DNA) I, mitochondrial
  ENST ID: ENST00000518760
  CDS Start-End: 121-613
gtgacttatagcagtgcttgagggaagaaaataaattctccgtttcaaaagaaaatccagggcgggacaatcttactgttggatttgcacagatcaccacgccagtgaagactaatcaccatgaaaagccacccaagaaaaaaggccaaaaacagccagaaaggccctttcagaaatgtctgttgcacatgctttcccctctcagacccttcagagacttcctgttgctctgaggacactcatcccagccgaccaggcccaccaggcccccaacagcactacctggctggggtcacgtgcaggtctcctggctctggcaggtgggagaaggagaagcacgaagacggggtgaagtggagacagctggagcacaagggcccgtacttcgcacccccatacgagccccttcccgacggagtgcgtttcttctatgaaggaaggcctgtgagattgagcgtggcagcggaggaggtcgccactttttatgggaggatgttagatcatgaatacacaacaaaggaggttttccggaagaacttcttcaatgactggcgaaaggaaatggcggtggaagagagggaagtcatcaagagcctggacaagtgtgacttca

SEQ ID NO: 191652 - DNA, 1461 bp, Homo sapiens
  Payload ID: 17864
  Gene Name: topoisomerase (DNA) I, mitochondrial
  ENST ID: ENST00000518951
  CDS Start-End: 3-506
agatgcgcgtggtgcggctgctgcggctccgggcggctctgacgctgctcggggaggtcccccgccgcccggcctcccggggtgtcccgggctcgcgcaggacgcagaagggcagtggagccaggtgggagaaggagaagcacgaagacggggtgaagtggagacagctggagcacaagggcccgtacttcgcacccccatacgagccccttcccgacggagtgcgtttcttctatgaaggaaggcctgtgagattgagcgtggcagcggaggaggtcgccactttttatgggaggatgttagatcatgaatacacaacaaaggaggttttccggaagaacttcttcaatgactggcgaaaggaaatggcggtggaagagagggaagtcatcaagagcctggacaagtgtgacttcacggagatccacagatactttgtggacaaggccgcagcccggaaagtcctgagcagggaggagaagcagatggtcaccaagaaaaaataggcaacttcaagattgagccgcctggcttgttccgtggccgtggcgaccatcccaagatggggatgctgaagagaaggatcacgccagaggatgtggttatcaactgcagcagggactcgaagatccccgagccgccggcggggcaccagtggaaggaggtgcgctccgataacaccgtcacgtggctggcagcttggaccgagagcgttcagaactccatcaagtacatcatgctgaacccttgctcgaagctgaagggggagacagcttggcagaagtttgaaacagctcgacgcctgcggggatttgtggacgagatccgctcccagtaccgggctgactggaagtctcgggaaatgaagacgagacagcgggcggtggccctgtatttcatcgataagctggcactgagagcaggaaatgagaaggaggacggtgaggcggccgacaccgtgggctgctgttccctccgcgtggagcacgtccagctgcacccggaggccgatggctgccaacacgtggtggaatttgacttcctggggaaggactgcatccgctactacaacagagtgccggtggagaagccggtgtacaagaacttacagctctttatggagaacaaggacccccgggacgacctcttcgacaggctgaccgtaagctgggacggccccgcaaaaccacgtaattatagagaccattttcctccccagacgaccagcctgaacaagcacctccaggagctgatggacgggctgacggccaaggtgttccggacctacaacgcctccatcactctgcaggagcagctgcgggccctgacgcgcgccgaggacagcatagcagctaagatcttatcctacaaccgagccaaccgagtcgtggccattctctgcaaccatcagcgagcaacccccagtacgttcgagaagtcgatgcagaatctccagacgaa

SEQ ID NO: 191653 - DNA, 499 bp, Homo sapiens
  Payload ID: 17864
  Gene Name: topoisomerase (DNA) I, mitochondrial
  ENST ID: ENST00000522043
  CDS Start-End: 6-499
ggcagatgcgcgtggtgcggctgctgcggctccgggcggctctgacgctgctcggggaggtcccccgccgcccggcctcccggggtgtcccgggctcgcgcaggacgcagaagggcagtggagccagaaacagccagaaaggccctttcagaaatgtctgttgcacatgctttcccctctcagacccttcagagacttcctgttgctctgaggacactcatcccagccgaccaggcccaccaggcccccaacagcactacctggctggggtcacgtgcaggtctcctggctctggcaggtgggagaaggagaagcacgaagacggggtgaagtggagacagctggagcacaagggcccgtacttcgcacccccatacgagccccttcccgacggagtgcgtttcttctatgaaggaaggcctgtgagattgagcgtggcagcggaggaggtcgccactttttatgggaggatgttagatcatgaatacacaacaaagga

SEQ ID NO: 191654 - DNA, 1868 bp, Homo sapiens
  Payload ID: 17864
  Gene Name: topoisomerase (DNA) I, mitochondrial
  Uniprot ID: Q969P6
  ENST ID: ENST00000519148
  CDS Start-End: 276-1787
gctcgggccttcccggcgtctccgcgcaggcctcggggaagcggggtccgggggagccgtggtgcggtgggaccgcgtgggtcctggaagagctgcagaggaggtgggagaaggagaagcacgaagacggggtgaagtggagacagctggagcacaagggcccgtacttcgcacccccatacgagccccttcccgacggagtgcgtttcttctatgaaggaaggcctgtgagattgagcgtggcagcggaggaggtcgccactttttatgggaggatgttagatcatgaatacacaacaaaggaggttttccggaagaacttcttcaatgactggcgaaaggaaatggcggtggaagagagggaagtcatcaagagcctggacaagtgtgacttcacggagatccacagatactttgtggacaaggccgcagcccggaaagtcctgagcagggaggagaagcagaagctaaaagaagaggcagaaaaacttcagcaagagttcggctactgtattttagatggtcaccaagaaaaaataggcaacttcaagattgagccgcctggcttgttccgtggccgtggcgaccatcccaagatggggatgctgaagagaaggatcacgccagaggatgtggttatcaactgcagcagggactcgaagatccccgagccgccggcggggcaccagtggaaggaggtgcgctccgataacaccgtcacgtggctggcagcttggaccgagagcgttcagaactccatcaagtacatcatgctgaacccttgctcgaagctgaagggggagacagcttggcagaagtttgaaacagctcgacgcctgcggggatttgtggacgagatccgctcccagtaccgggctgactggaagtctcgggaaatgaagacgagacagcgggcggtggccctgtatttcatcgataagctggcactgagagcaggaaatgagaaggaggacggtgaggcggccgacaccgtgggctgctgttccctccgcgtggagcacgtccagctgcacccggaggccgatggctgccaacacgtggtggaatttgacttcctggggaaggactgcatccgctactacaacagagtgccggtggagaagccggtgtacaagaacttacagctctttatggagaacaaggacccccgggacgacctcttcgacaggctgaccacgaccagcctgaacaagcacctccaggagctgatggacgggctgacggccaaggtgttccggacctacaacgcctccatcactctgcaggagcagctgcgggccctgacgcgcgccgaggacagcatagcagctaagatcttatcctacaaccgagccaaccgagtcgtggccattctctgcaaccatcagcgagcaacccccagtacgttcgagaagtcgatgcagaatctccagacgaagatccaggcaaagaaggagcaggtggctgaggccagggcagagctgaggagggcgagggctgagcacaaagcccaaggggatggcaagtccaggagtgtcctggagaagaagaggcggctcctggagaagctgcaggagcagctggcgcagctgagtgtgcaggccacggacaaggaggagaacaagcaggtggccctgggcacgtccaagctcaactacctggaccccaggatcagcattgcctggtgcaagcggttcagggtgccagtggagaagatctacagcaaaacacagcgggagaggttcgcctgggctctcgccatggcaggagaagactttgaattctaacgacgagccgtgttgaaacttcttttgtatgtgtgtgtgtttttttcactattaaagcagtactggggaattttgtacaat

SEQ ID NO: 191655 - DNA, 1007 bp, Homo sapiens
  Payload ID: 17864
  Gene Name: topoisomerase (DNA) I, mitochondrial
  ENST ID: ENST00000519591
  CDS Start-End: 403-1007
tggtgcggctgctgcggctccgggcggctctgacgctgctcggggaggtcccccgccgcccggcctcccggggtgtcccgggctcgcgcaggacgcagaagggcagtggagccagacccttcagagacttcctgttgctctgaggacactcatcccagccgaccaggcccaccaggcccccaacagcactacctggctggggtcacgtgcaggtctcctggctctggcaggtgggagaaggagaagcacgaagacggggtgaagtggagacagctggagcacaagggcccgtacttcgcacccccatacgagccccttcccgacggagtgcgtttcttctatgaaggaaggcctgtgagattgagcgtggcagcggaggaggtcgccactttttatgggaggatgttagatcatgaatacacaacaaaggaggttttccggaagaacttcttcaatgactggcgaaaggaaatggcggtggaagagagggaagtcatcaagagcctggacaagtgtgacttcacggagatccacagatactttgtggacaaggccgcagcccggaaagtcctgagcagggaggagaagcagaagctaaaagaagaggcagaaaaacttcagcaagagttcggctactgtattttagatggtcaccaagaaaaaataggcaacttcaagattgagccgcctggcttgttccgtggccgtggcgaccatcccaagatggggatgctgaagagaaggatcacgccagaggatgtggttatcaactgcagcagggactcgaagatccccgagccgccggcggggcaccagtggaaggaggtgcgctccgataacaccgtcacgtggctggcagcttggaccgagagcgttcagaactccatcaagtacatcatgctgaacccttgctcgaagctgaagggggagacagcttggcagaagtttgaaacagctcgacgcctgcggggatttgtggacgagatccgctcccagtaccgggctga

SEQ ID NO: 191656 - DNA, 1982 bp, Homo sapiens
  Payload ID: 17864
  Gene Name: topoisomerase (DNA) I, mitochondrial
  Uniprot ID: Q969P6
  ENST ID: ENST00000523676
  CDS Start-End: 407-1918
ccggcctcccggggtgtcccgggctcgcgcaggacgcagaagggcagtggagccaggcacaagccgcatggatccagtggccctggtggccgttggtggtcccaggcgctttcctggaggacatgtgagaagccctgccggcgcatactgggcctggggtagccgcatggggatgggtctctgcgcatgaaatgctggagtttccgaagagctggagagttgacagcctcactggtgggagaaggagaagcacgaagacggggtgaagtggagacagctggagcacaagggcccgtacttcgcacccccatacgagccccttcccgacggagtgcgtttcttctatgaaggaaggcctgtgagattgagcgtggcagcggaggaggtcgccactttttatgggaggatgttagatcatgaatacacaacaaaggaggttttccggaagaacttcttcaatgactggcgaaaggaaatggcggtggaagagagggaagtcatcaagagcctggacaagtgtgacttcacggagatccacagatactttgtggacaaggccgcagcccggaaagtcctgagcagggaggagaagcagaagctaaaagaagaggcagaaaaacttcagcaagagttcggctactgtattttagatggtcaccaagaaaaaataggcaacttcaagattgagccgcctggcttgttccgtggccgtggcgaccatcccaagatggggatgctgaagagaaggatcacgccagaggatgtggttatcaactgcagcagggactcgaagatccccgagccgccggcggggcaccagtggaaggaggtgcgctccgataacaccgtcacgtggctggcagcttggaccgagagcgttcagaactccatcaagtacatcatgctgaacccttgctcgaagctgaagggggagacagcttggcagaagtttgaaacagctcgacgcctgcggggatttgtggacgagatccgctcccagtaccgggctgactggaagtctcgggaaatgaagacgagacagcgggcggtggccctgtatttcatcgataagctggcactgagagcaggaaatgagaaggaggacggtgaggcggccgacaccgtgggctgctgttccctccgcgtggagcacgtccagctgcacccggaggccgatggctgccaacacgtggtggaatttgacttcctggggaaggactgcatccgctactacaacagagtgccggtggagaagccggtgtacaagaacttacagctctttatggagaacaaggacccccgggacgacctcttcgacaggctgaccacgaccagcctgaacaagcacctccaggagctgatggacgggctgacggccaaggtgttccggacctacaacgcctccatcactctgcaggagcagctgcgggccctgacgcgcgccgaggacagcatagcagctaagatcttatcctacaaccgagccaaccgagtcgtggccattctctgcaaccatcagcgagcaacccccagtacgttcgagaagtcgatgcagaatctccagacgaagatccaggcaaagaaggagcaggtggctgaggccagggcagagctgaggagggcgagggctgagcacaaagcccaaggggatggcaagtccaggagtgtcctggagaagaagaggcggctcctggagaagctgcaggagcagctggcgcagctgagtgtgcaggccacggacaaggaggagaacaagcaggtggccctgggcacgtccaagctcaactacctggaccccaggatcagcattgcctggtgcaagcggttcagggtgccagtggagaagatctacagcaaaacacagcgggagaggttcgcctgggctctcgccatggcaggagaagactttgaattctaacgacgagccgtgttgaaacttcttttgtatgtgtgtgtgtttttttcactattaaagcagtact

SEQ ID NO: 191657 - DNA, 874 bp, Homo sapiens
  Payload ID: 17864
  Gene Name: topoisomerase (DNA) I, mitochondrial
  ENST ID: ENST00000522121
  CDS Start-End: 1-150
gccactttttatgggaggatgttagatcatgaatacacaacaaaggaggttttccggaagaacttcttcaatgactggcgaaaggctccgcttctggaccctcttctttggcctgatgccacccctctgcctttcacgacagctttgtgaggtggcaccagctgcccggcatcctcattctccctctggtcagcacttcttccagtcactagcagagctaggaagggaggcagtgtcacaaagcagcagaacaggagtgggtggcacatccggcggccccgggagacacagggacggaccctgagcccgtggttgtggccgagcagggctccatcctggcacagatggtgtcgtacctgagctcctcggaagaggcggatcatccccatcccacagcgagacacgtttgacagcagctcctgaggtctcacaggcctaagtggccgagcctggactgggaccgtgagctggtgcccgcaagcctgggcttttgtccatgggctgtgcagagtttttgttgtgtaggaaacgaaaggagaaacagttgcctgtgatctgcggctctccctcaggaaatggcggtggaagagagggaagtcatcaagagcctggacaagtgtgacttcacggagatccacagatactttgtggacaaggccgcagcccggaaagtcctgagcagggaggagaagcagaagctaaaagaagaggcagaaaaacttcagcaagagttcggctactgtattttagatggtcaccaagaaaaaataggcaacttcaagattgagccgcctggcttgttccgtggccgtggcgaccatcccaagatggggatgctgaagagaaggatcacgccagaggatgtggttatcaa

SEQ ID NO: 191658 - DNA, 509 bp, Homo sapiens
  Payload ID: 17864
  Gene Name: topoisomerase (DNA) I, mitochondrial
  ENST ID: ENST00000518007
  CDS Start-End: 108-509
cagactgcagcccgtgctgatgactgtggctgtgatgaattcgtgcctgtgaccacagctgctctccagatttgcacagatcaccacgccagtgaagactaatcaccatgaaaagccacccaagaaaaaaggccaagtgggagaaggagaagcacgaagacggggtgaagtggagacagctggagcacaagggcccgtacttcgcacccccatacgagccccttcccgacggagtgcgtttcttctatgaaggaaggcctgtgagattgagcgtggcagcggaggaggtcgccactttttatgggaggatgttagatcatgaatacacaacaaaggaggttttccggaagaacttcttcaatgactggcgaaaggaaatggcggtggaagagagggaagtcatcaagagcctggacaagtgtgacttcacggagatccacagatactttgtggacaaggccgcagcccggaaagtcctgagcagggaggagaagcagaagctaaaagaa

SEQ ID NO: 191659 - DNA, 564 bp, Homo sapiens
  Payload ID: 17864
  Gene Name: topoisomerase (DNA) I, mitochondrial
  ENST ID: ENST00000520950
  CDS Start-End: 466-564
gtctccgcgcaggcctcggggaagcggggtccgggggagccgtggtgcggtgggaccgcgtgggtcctggaagagctgcagaggagagtgacggctttggatgcgctttgccccagggcctttcttcccggagttggccttttccctgcccttctcttctcctggcgtggtgacctgcctcccttctcctggatcgctttgctggcagccaccttgtaacacctcagactgcagcccgtgctgatgactgtggctgtgatgaattcgtgcctgtgaccacagctgctctccaggtgggagaaggagaagcacgaagacggggtgaagtggagacagctggagcacaagggcccgtacttcgcacccccatacgagccccttcccgacggagtgcgtttcttctatgaaggaaggcctgtgagattgagcgtggcagcggaggaggtcgccactttttatgggaggatgttagatcatgaatacacaacaaaggaggttttccggaagaacttcttcaatgactggcgaaaggaaatggcggtggaagagagggaagtcatcaag

SEQ ID NO: 191660 - DNA, 698 bp, Homo sapiens
  Payload ID: 17864
  Gene Name: topoisomerase (DNA) I, mitochondrial
  ENST ID: ENST00000523417
  CDS Start-End: 1-370
gctgcggctccgggcggctctgacgctgctcggggaggtcccccgccgcccggcctcccggggtgtcccgggctcgcgcaggacgcagaagggcagtggagccaggtgggagaaggagaagcacgaagacggggtgaagtggagacagctggagcacaagggcccgtacttcgcacccccatacgagccccttcccgacggagtgcgtttcttctatgaaggaaggcctgtgagattgagcgtggcagcggaggaggtcgccactttttatgggaggatgttagatcatgaatacacaacaaaggaggttttccggaagaacttcttcaatgactggcgaaaggttctttgccagacgcacatgctgtgaatgtcatctcccagactttgccttttcacttctcagtgaggtctccaaacagaaaactgtaacttagttatgccgtttatcaatctgtcttttatggaaatggcggtggaagagagggaagtcatcaagagcctggacaagtgtgacttcacggagatccacagatactttgtggacaaggccgcagcccggaaagtcctgagcagggaggagaagcagaagctaaaagaagaggcagaaaaacttcagcaagagttcggctactgtattttagatggtcaccaagaaaaaataggcaacttcaagattgagccgcctggcttgttcc

SEQ ID NO: 191661 - DNA, 5758 bp, Homo sapiens
  Payload ID: 17865
  Gene Name: topoisomerase (DNA) II alpha
  Uniprot ID: P11388
  ENST ID: ENST00000423485
  CDS Start-End: 160-4755
gattggctggtctgcttcgggcgggctaaaggaaggttcaagtggagctctcctaaccgacgcgcgtctgtggagaagcggcttggtcgggggtggtctcgtggggtcctgcctgtttagtcgctttcagggttcttgagccccttcacgaccgtcaccatggaagtgtcaccattgcagcctgtaaatgaaaatatgcaagtcaacaaaataaagaaaaatgaagatgctaagaaaagactgtctgttgaaagaatctatcaaaagaaaacacaattggaacatattttgctccgcccagacacctacattggttctgtggaattagtgacccagcaaatgtgggtttacgatgaagatgttggcattaactatagggaagtcacttttgttcctggtttgtacaaaatctttgatgagattctagttaatgctgcggacaacaaacaaagggacccaaaaatgtcttgtattagagtcacaattgatccggaaaacaatttaattagtatatggaataatggaaaaggtattcctgttgttgaacacaaagttgaaaagatgtatgtcccagctctcatatttggacagctcctaacttctagtaactatgatgatgatgaaaagaaagtgacaggtggtcgaaatggctatggagccaaattgtgtaacatattcagtaccaaatttactgtggaaacagccagtagagaatacaagaaaatgttcaaacagacatggatggataatatgggaagagctggtgagatggaactcaagcccttcaatggagaagattatacatgtatcacctttcagcctgatttgtctaagtttaaaatgcaaagcctggacaaagatattgttgcactaatggtcagaagagcatatgatattgctggatccaccaaagatgtcaaagtctttcttaatggaaataaactgccagtaaaaggatttcgtagttatgtggacatgtatttgaaggacaagttggatgaaactggtaactccttgaaagtaatacatgaacaagtaaaccacaggtgggaagtgtgtttaactatgagtgaaaaaggctttcagcaaattagctttgtcaacagcattgctacatccaagggtggcagacatgttgattatgtagctgatcagattgtgactaaacttgttgatgttgtgaagaagaagaacaagggtggtgttgcagtaaaagcacatcaggtgaaaaatcacatgtggatttttgtaaatgccttaattgaaaacccaacctttgactctcagacaaaagaaaacatgactttacaacccaagagctttggatcaacatgccaattgagtgaaaaatttatcaaagctgccattggctgtggtattgtagaaagcatactaaactgggtgaagtttaaggcccaagtccagttaaacaagaagtgttcagctgtaaaacataatagaatcaagggaattcccaaactcgatgatgccaatgatgcagggggccgaaactccactgagtgtacgcttatcctgactgagggagattcagccaaaactttggctgtttcaggccttggtgtggttgggagagacaaatatggggttttccctcttagaggaaaaatactcaatgttcgagaagcttctcataagcagatcatggaaaatgctgagattaacaatatcatcaagattgtgggtcttcagtacaagaaaaactatgaagatgaagattcattgaagacgcttcgttatgggaagataatgattatgacagatcaggaccaagatggttcccacatcaaaggcttgctgattaattttatccatcacaactggccctctcttctgcgacatcgttttctggaggaatttatcactcccattgtaaaggtatctaaaaacaagcaagaaatggcattttacagccttcctgaatttgaagagtggaagagttctactccaaatcataaaaaatggaaagtcaaatattacaaaggtttgggcaccagcacatcaaaggaagctaaagaatactttgcagatatgaaaagacatcgtatccagttcaaatattctggtcctgaagatgatgctgctatcagcctggcctttagcaaaaaacagatagatgatcgaaaggaatggttaactaatttcatggaggatagaagacaacgaaagttacttgggcttcctgaggattacttgtatggacaaactaccacatatctgacatataatgacttcatcaacaaggaacttatcttgttctcaaattctgataacgagagatctatcccttctatggtggatggtttgaaaccaggtcagagaaaggttttgtttacttgcttcaaacggaatgacaagcgagaagtaaaggttgcccaattagctggatcagtggctgaaatgtcttcttatcatcatggtgagatgtcactaatgatgaccattatcaatttggctcagaattttgtgggtagcaataatctaaacctcttgcagcccattggtcagtttggtaccaggctacatggtggcaaggattctgctagtccacgatacatctttacaatgctcagctctttggctcgattgttatttccaccaaaagatgatcacacgttgaagtttttatatgatgacaaccagcgtgttgagcctgaatggtacattcctattattcccatggtgctgataaatggtgctgaaggaatcggtactgggtggtcctgcaaaatccccaactttgatgtgcgtgaaattgtaaataacatcaggcgtttgatggatggagaagaacctttgccaatgcttccaagttacaagaacttcaagggtactattgaagaactggctccaaatcaatatgtgattagtggtgaagtagctattcttaattctacaaccattgaaatctcagagcttcccgtcagaacatggacccagacatacaaagaacaagttctagaacccatgttgaatggcaccgagaagacacctcctctcataacagactatagggaataccatacagataccactgtgaaatttgttgtgaagatgactgaagaaaaactggcagaggcagagagagttggactacacaaagtcttcaaactccaaactagtctcacatgcaactctatggtgctttttgaccacgtaggctgtttaaagaaatatgacacggtgttggatattctaagagacttttttgaactcagacttaaatattatggattaagaaaagaatggctcctaggaatgcttggtgctgaatctgctaaactgaataatcaggctcgctttatcttagagaaaatagatggcaaaataatcattgaaaataagcctaagaaagaattaattaaagttctgattcagaggggatatgattcggatcctgtgaaggcctggaaagaagcccagcaaaaggttccagatgaagaagaaaatgaagagagtgacaacgaaaaggaaactgaaaagagtgactccgtaacagattctggaccaaccttcaactatcttcttgatatgcccctttggtatttaaccaaggaaaagaaagatgaactctgcaggctaagaaatgaaaaagaacaagagctggacacattaaaaagaaagagtccatcagatttgtggaaagaagacttggctacatttattgaagaattggaggctgttgaagccaaggaaaaacaagatgaacaagtcggacttcctgggaaaggggggaaggccaaggggaaaaaaacacaaatggctgaagttttgccttctccgcgtggtcaaagagtcattccacgaataaccatagaaatgaaagcagaggcagaaaagaaaaataaaaagaaaattaagaatgaaaatactgaaggaagccctcaagaagatggtgtggaactagaaggcctaaaacaaagattagaaaagaaacagaaaagagaaccaggtacaaagacaaagaaacaaactacattggcatttaagccaatcaaaaaaggaaagaagagaaatccctggtctgattcagaatcagataggagcagtgacgaaagtaattttgatgtccctccacgagaaacagagccacggagagcagcaacaaaaacaaaattcacaatggatttggattcagatgaagatttctcagattttgatgaaaaaactgatgatgaagattttgtcccatcagatgctagtccacctaagaccaaaacttccccaaaacttagtaacaaagaactgaaaccacagaaaagtgtcgtgtcagaccttgaagctgatgatgttaagggcagtgtaccactgtcttcaagccctcctgctacacatttcccagatgaaactgaaattacaaacccagttcctaaaaagaatgtgacagtgaagaagacagcagcaaaaagtcagtcttccacctccactaccggtgccaaaaaaagggctgccccaaaaggaactaaaagggatccagctttgaattctggtgtctctcaaaagcctgatcctgccaaaaccaagaatcgccgcaaaaggaagccatccacttctgatgattctgactctaattttgagaaaattgtttcgaaagcagtcacaagcaagaaatccaagggggagagtgatgacttccatatggactttgactcagctgtggctcctcgggcaaaatctgtacgggcaaagaaacctataaagtacctggaagagtcagatgaagatgatctgttttaaaatgtgaggcgattattttaagtaattatcttaccaagcccaagactggttttaaagttacctgaagctcttaacttcctcccctctgaatttagtttggggaaggtgtttttagtacaagacatcaaagtgaagtaaagcccaagtgttctttagctttttataatactgtctaaatagtgaccatctcatgggcattgttttcttctctgctttgtctgtgttttgagtctgctttcttttgtctttaaaacctgatttttaagttcttctgaactgtagaaatagctatctgatcacttcagcgtaaagcagtgtgtttattaaccatccactaagctaaaactagagcagtttgatttaaaagtgtcactcttcctccttttctactttcagtagatatgagatagagcataattatctgttttatcttagttttatacataatttaccatcagatagaactttatggttctagtacagatactctactacactcagcctcttatgtgccaagtttttctttaagcaatgagaaattgctcatgttcttcatcttctcaaatcatcagaggccgaagaaaaacactttggctgtgtctataacttgacacagtcaatagaatgaagaaaattagagtagttatgtgattatttcagctcttgacctgtcccctctggctgcctctgagtctgaatctcccaaagagagaaaccaatttctaagaggactggattgcagaagactcggggacaacatttgatccaagatcttaaatgttatattgataaccatgctcagcaatgagctattagattcattttgggaaatctccataatttcaatttgtaaactttgttaagacctgtctacattgttatatgtgtgtgacttgagtaatgttatcaacgtttttgtaaatatttactatgtttttctattagctaaattccaacaattttgtactttaataaaatgttctaaacattgcaacccatagaa

SEQ ID NO: 191662 - DNA, 579 bp, Homo sapiens
  Payload ID: 17865
  Gene Name: topoisomerase (DNA) II alpha
  ENST ID: ENST00000581055
  CDS Start-End: 138-579
gtgacgggtgaagctctggggctgcggtcaggccggcgaccggcttgggagcccatattctccattcccggttccggggtgatcgtggagaggcggaagccccttctggtgctagtagtgaacctgtaaatgaaaatatgcaagtcaacaaaataaagaaaaatgaagatgctaagaaaagactgtctgttgaaagaatctatcaaaagaaaacacaattggaacatattttgctccgcccagacacctacattggttctgtggaattagtgacccagcaaatgtgggtttacgatgaagatgttggcattaactatagggaagtcacttttgttcctggtttgtacaaaatctttgatgagattctagttaatgctgcggacaacaaacaaagggacccaaaaatgtcttgtattagagtcacaattgatccggaaaacaatttaattagtatatggaataatggaaaaggtattcctgttgttgaacacaaagttgaaaagatgtatgtcccagctctcatatttggacagctcctaacttctagtaactatgatgatgatgaaaagaaagtgacag

SEQ ID NO: 191663 - DNA, 420 bp, Homo sapiens
  Payload ID: 17865
  Gene Name: topoisomerase (DNA) II alpha
  ENST ID: ENST00000577541
  CDS Start-End: 1-84
gctgtggctcctcgggcaaaatctgtacgggcaaagaaacctataaagtacctggaagagtcagatgaagatgatctgttttaaaatctcttgacctgtcccctctggctgcctctgagtctgaatctcccaaagagagaaaccaatttctaagaggactggattgcagaagactcggggacaacatttgatccaagatcttaaatgttatattgataaccatgctcagcaatgagctattagattcattttgggaaatctccataatttcaatttgtaaactttgttaagacctgtctacattgttatatgtgtgtgacttgagtaatgttatcaacgtttttgtaaatatttactatgtttttctattagctaaattccaacaattttgtactttaataaaatgttctaaacattgca

SEQ ID NO: 191664 - DNA, 5358 bp, Homo sapiens
  Payload ID: 17866
  Gene Name: topoisomerase (DNA) II beta
  Uniprot ID: Q02880
  ENST ID: ENST00000264331
  CDS Start-End: 76-4956
gcggggcccagcggcccgcagggaggcgggagcggcggctgcggcctcagggcctgtgagctggaggcactcgccatggccaagtcgggtggctgcggcgcgggagccggcgtgggcggcggcaacggggcactgacctgggtgactctttttgatcagaacaatgctgcaaaaaaagaagagtcagaaactgccaacaaaaatgattcttcaaagaagttgtctgttgagagagtgtatcagaagaagacacaacttgaacacattcttcttcgtcctgatacatatattgggtcagtggagccattgacgcagttcatgtgggtgtatgatgaagatgtaggaatgaattgcagggaggttacctttgtgccaggtttatacaagatctttgatgaaattttggttaatgctgctgacaataaacagagggataagaacatgacttgtattaaagtttctattgatcctgaatctaacattataagcatttggaataatgggaaaggcattccagtagtagaacacaaggtagagaaagtttatgttcctgctttaatttttggacagcttttaacatccagtaactatgatgatgatgagaaaaaagttacaggtggtcgtaatggttatggtgcaaaactttgtaatattttcagtacaaagtttacagtagaaacagcttgcaaagaatacaaacacagttttaagcagacatggatgaataatatgatgaagacttctgaagccaaaattaaacattttgatggtgaagattacacatgcataacattccaaccagatctgtccaaatttaagatggaaaaacttgacaaggatattgtggccctcatgactagaagggcatatgatttggctggttcgtgtagaggggtcaaggtcatgtttaatggaaagaaattgcctgtaaatggatttcgcagttatgtagatctttatgtgaaagacaaattggatgaaactggggtggccctgaaagttattcatgagcttgcaaatgaaagatgggatgtttgtctcacattgagtgaaaaaggattccagcaaatcagctttgtaaatagtattgcaactacaaaaggtggacggcacgtggattatgtggtagatcaagttgttggtaaactgattgaagtagttaagaaaaagaacaaagctggtgtatcagtgaaaccatttcaagtaaaaaaccatatatgggtttttattaattgccttattgaaaatccaacttttgattctcagactaaggaaaacatgactctgcagcccaaaagttttgggtctaaatgccagctgtcagaaaaattttttaaagcagcctctaattgtggcattgtagaaagtatcctgaactgggtgaaatttaaggctcagactcagctgaataagaagtgttcatcagtaaaatacagtaaaatcaaaggtattcccaaactggatgatgctaatgatgctggtggtaaacattccctggagtgtacactgatattaacagagggagactctgccaaatcactggctgtgtctggattaggtgtgattggacgagacagatacggagtttttccactcaggggcaaaattcttaatgtacgggaagcttctcataaacagatcatggaaaatgctgaaataaataatattattaaaatagttggtctacaatataagaaaagttacgatgatgcagaatctctgaaaaccttacgctatggaaagattatgattatgaccgatcaggatcaagatggttctcacataaaaggcctgcttattaatttcatccatcacaattggccatcacttttgaagcatggttttcttgaagagttcattactcctattgtaaaggcaagcaaaaataagcaggaactttccttctacagtattcctgaatttgacgaatggaaaaaacatatagaaaaccagaaagcctggaaaataaagtactataaaggattgggtactagtacagctaaagaagcaaaggaatattttgctgatatggaaaggcatcgcatcttgtttagatatgctggtcctgaagatgatgctgccattaccttggcatttagtaagaagaagattgatgacagaaaagaatggttaacaaattttatggaagaccggagacagcgtaggctacatggcttaccagagcaatttttatatggtactgcaacaaagcatttgacttataatgatttcatcaacaaggaattgattctcttctcaaactcagacaatgaaagatctataccatctcttgttgatggctttaaacctggccagcggaaagttttatttacctgtttcaagaggaatgataaacgtgaagtaaaagttgcccagttggctggctctgttgctgagatgtcggcttatcatcatggagaacaagcattgatgatgactattgtgaatttggctcagaactttgtgggaagtaacaacattaacttgcttcagcctattggtcagtttggaactcggcttcatggtggcaaagatgctgcaagccctcgttatattttcacaatgttaagcactttagcaaggctactttttcctgctgtggatgacaacctccttaagttcctttatgatgataatcaacgtgtagagcctgagtggtatattcctataattcccatggttttaataaatggtgctgagggcattggtactggatgggcttgtaaactacccaactatgatgctagggaaattgtgaacaatgtcagacgaatgctagatggcctggatcctcatcccatgcttccaaactacaaaaactttaaaggcacgattcaagaacttggtcaaaaccagtatgcagtcagtggtgaaatatttgtagtggacagaaacacagtagaaattacagagcttccagttagaacttggacacaggtatataaagaacaggttttagaacctatgctaaatggaacagataaaacaccagcattaatttctgattataaagaatatcatactgacacaactgtgaaatttgtggtgaaaatgactgaagagaaactagcacaagcagaagctgctggactgcataaagtttttaaacttcaaactactcttacttgtaattccatggtactttttgatcatatgggatgtctgaagaaatatgaaactgtgcaagacattctgaaagaattctttgatttacgattaagttattacggtttacgtaaggagtggcttgtgggaatgttgggagcagaatctacaaagcttaacaatcaagcccgtttcattttagagaagatacaagggaaaattactatagagaataggtcaaagaaagatttgattcaaatgttagtccagagaggttatgaatctgacccagtgaaagcctggaaagaagcacaagaaaaggcagcagaagaggatgaaacacaaaaccagcatgatgatagttcctccgattcaggaactccttcaggcccagattttaattatattttaaatatgtctctgtggtctcttactaaagaaaaagttgaagaactgattaaacagagagatgcaaaagggcgagaggtcaatgatcttaaaagaaaatctccttcagatctttggaaagaggatttagcggcatttgttgaagaactggataaagtggaatctcaagaacgagaagatgttctggctggaatgtctggaaaagcaattaaaggtaaagttggcaaacctaaggtgaagaaactccagttggaagagacaatgccctcaccttatggcagaagaataattcctgaaattacagctatgaaggcagatgccagcaaaaagttgctgaagaagaagaagggtgatcttgatactgcagcagtaaaagtggaatttgatgaagaattcagtggagcaccagtagaaggtgcaggagaagaggcattgactccatcagttcctataaataaaggtcccaaacctaagagggagaagaaggagcctggtaccagagtgagaaaaacacctacatcatctggtaaacctagtgcaaagaaagtgaagaaacggaatccttggtcagatgatgaatccaagtcagaaagtgatttggaagaaacagaacctgtggttattccaagagattctttgcttaggagagcagcagccgaaagacctaaatacacatttgatttctcagaagaagaggatgatgatgctgatgatgatgatgatgacaataatgatttagaggaattgaaagttaaagcatctcccataacaaatgatggggaagatgaatttgttccttcagatgggttagataaagatgaatatacattttcaccaggcaaatcaaaagccactccagaaaaatctttgcatgacaaaaaaagtcaggattttggaaatctcttctcatttccttcatattctcagaagtcagaagatgattcagctaaatttgacagtaatgaagaagattctgcttctgttttttcaccatcatttggtctgaaacagacagataaagttccaagtaaaacggtagctgctaaaaagggaaaaccgtcttcagatacagtccctaagcccaagagagccccaaaacagaagaaagtagtagaggctgtaaactctgactcggattcagaatttggcattccaaagaagactacaacaccaaaaggtaaaggccgaggggcaaagaaaaggaaagcatctggctctgaaaatgaaggcgattataaccctggcaggaaaacatccaaaacaacaagcaagaaaccgaagaagacatcttttgatcaggattcagatgtggacatcttcccctcagacttccctactgagccaccttctctgccacgaaccggtcgggctaggaaagaagtaaaatattttgcagagtctgatgaagaagaagatgatgttgattttgcaatgtttaattaagtgcccaaagagcacaaacatttttcaacaaatatcttgtgttgtccttttgtcttctctgtctcagacttttgtacatctggcttattttaatgtgatgatgtaattgacggttttttattattgtggtaggccttttaacattttgttcttacacatacagttttatgctcttttttactcattgaaatgtcacgtactgtctgattggcttgtagaattgttatagactgccgtgcattagcacagattttaattgtcatggttacaaactacagacctgctttttgaaatgaaatttaaacattaaaaatggaactgtgttctctgtctctttactgaagataaaggtgtagtaaaagctcccacacacctttaaaataaatatattttattctttgc

SEQ ID NO: 191665 - DNA, 2049 bp, Homo sapiens
  Payload ID: 17866
  Gene Name: topoisomerase (DNA) II beta
  ENST ID: ENST00000413971
  CDS Start-End: 1-213
gtactttttgatcatatgggatgtctgaagaaatatgaaactgtgcaagacattctgaaagaattctttgatttacgattaagttattacggtttacgtaaggagtggcttgtgggaatgttgggagcagaatctacaaagcttaacaatcaagcccgtttcattttagagaagatacaagggaaaattactataggcagcagaagaggatgaaacacaaaaccagcatgatgatagttcctccgattcaggaactccttcaggcccagattttaattatattttaaatatgtctctgtggtctcttactaaagaaaaagttgaagaactgattaaacagagagatgcaaaagggcgagaggtcaatgatcttaaaagaaaatctccttcagatctttggaaagaggatttagcggcatttgttgaagaactggataaagtggaatctcaagaacgagaagatgttctggctggaatgtctggaaaagcaattaaaggtaaagttggcaaacctaaggtgaagaaactccagttggaagagacaatgccctcaccttatggcagaagaataattcctgaaattacagctatgaaggcagatgccagcaaaaagttgctgaagaagaagaagggtgatcttgatactgcagcagtaaaagtggaatttgatgaagaattcagtggagcaccagtagaaggtgcaggagaagaggcattgactccatcagttcctataaataaaggtcccaaacctaagagggagaagaaggagcctggtaccagagtgagaaaaacacctacatcatctggtaaacctagtgcaaagaaagtgaagaaacggaatccttggtcagatgatgaatccaagtcagaaagtgatttggaagaaacagaacctgtggttattccaagagattctttgcttaggagagcagcagccgaaagacctaaatacacatttgatttctcagaagaagaggatgatgatgctgatgatgatgatgatgacaataatgatttagaggaattgaaagttaaagcatctcccataacaaatgatggggaagatgaatttgttccttcagatgggttagataaagatgaatatacattttcaccaggcaaatcaaaagccactccagaaaaatctttgcatgacaaaaaaagtcaggattttggaaatctcttctcatttccttcatattctcagaagtcagaagatgattcagctaaatttgacagtaatgaagaagattctgcttctgttttttcaccatcatttggtctgaaacagacagataaagttccaagtaaaacggtagctgctaaaaagggaaaaccgtcttcagatacagtccctaagcccaagagagccccaaaacagaagaaagtagtagaggctgtaaactctgactcggattcagaatttggcattccaaagaagactacaacaccaaaaggtaaaggccgaggggcaaagaaaaggaaagcatctggctctgaaaatgaaggcgattataaccctggcaggaaaacatccaaaacaacaagcaagaaaccgaagaagacatcttttgatcaggattcagatgtggacatcttcccctcagacttccctactgagccaccttctctgccacgaaccggtcgggctaggaaagaagtaaaatattttgcagagtctgatgaagaagaagatgatgttgattttgcaatgtttaattaagtgcccaaagagcacaaacatttttcaacaaatatcttgtgttgtccttttgtcttctctgtctcagacttttgtacatctggcttattttaatgtgatgatgtaattgacggttttttattattgtggtaggccttttaacattttgttcttacacatacagttttatgctcttttttactcattgaaatgtcacgtactgtctgattggcttgtagaattgttatagactgccgtgcattagcacagattttaattgtcatggttacaaactacagacctgctttttgaaatgaaatttaaacattaaaaatggaactgtg

SEQ ID NO: 191666 - DNA, 3525 bp, Homo sapiens
  Payload ID: 17866
  Gene Name: topoisomerase (DNA) II beta
  ENST ID: ENST00000424225
  CDS Start-End: 76-3525
gtgtgtgcggtgttatgccggacaagagggagcggcggctgcggcctcagggcctgtgagctggaggcactcgccatggccaagtcgggtggctgcggcgcgggagccggcgtgggcggcggcaacggggcactgacctgggtgaacaatgctgcaaaaaaagaagagtcagaaactgccaacaaaaatgattcttcaaagaagttgtctgttgagagagtgtatcagaagaagacacaacttgaacacattcttcttcgtcctgatacatatattgggtcagtggagccattgacgcagttcatgtgggtgtatgatgaagatgtaggaatgaattgcagggaggttacctttgtgccaggtttatacaagatctttgatgaaattttggttaatgctgctgacaataaacagagggataagaacatgacttgtattaaagtttctattgatcctgaatctaacattataagcatttggaataatgggaaaggcattccagtagtagaacacaaggtagagaaagtttatgttcctgctttaatttttggacagcttttaacatccagtaactatgatgatgatgagaaaaaagttacaggtggtcgtaatggttatggtgcaaaactttgtaatattttcagtacaaagtttacagtagaaacagcttgcaaagaatacaaacacagttttaagcagacatggatgaataatatgatgaagacttctgaagccaaaattaaacattttgatggtgaagattacacatgcataacattccaaccagatctgtccaaatttaagatggaaaaacttgacaaggatattgtggccctcatgactagaagggcatatgatttggctggttcgtgtagaggggtcaaggtcatgtttaatggaaagaaattgcctgtaaatggatttcgcagttatgtagatctttatgtgaaagacaaattggatgaaactggggtggccctgaaagttattcatgagcttgcaaatgaaagatgggatgtttgtctcacattgagtgaaaaaggattccagcaaatcagctttgtaaatagtattgcaactacaaaaggtggacggcacgtggattatgtggtagatcaagttgttggtaaactgattgaagtagttaagaaaaagaacaaagctggtgtatcagtgaaaccatttcaagtaaaaaaccatatatgggtttttattaattgccttattgaaaatccaacttttgattctcagactaaggaaaacatgactctgcagcccaaaagttttgggtctaaatgccagctgtcagaaaaattttttaaagcagcctctaattgtggcattgtagaaagtatcctgaactgggtgaaatttaaggctcagactcagctgaataagaagtgttcatcagtaaaatacagtaaaatcaaaggtattcccaaactggatgatgctaatgatgctggtggtaaacattccctggagtgtacactgatattaacagagggagactctgccaaatcactggctgtgtctggattaggtgtgattggacgagacagatacggagtttttccactcaggggcaaaattcttaatgtacgggaagcttctcataaacagatcatggaaaatgctgaaataaataatattattaaaatagttggtctacaatataagaaaagttacgatgatgcagaatctctgaaaaccttacgctatggaaagattatgattatgaccgatcaggatcaagatggttctcacataaaaggcctgcttattaatttcatccatcacaattggccatcacttttgaagcatggttttcttgaagagttcattactcctattgtaaaggcaagcaaaaataagcaggaactttccttctacagtattcctgaatttgacgaatggaaaaaacatatagaaaaccagaaagcctggaaaataaagtactataaaggattgggtactagtacagctaaagaagcaaaggaatattttgctgatatggaaaggcatcgcatcttgtttagatatgctggtcctgaagatgatgctgccattaccttggcatttagtaagaagaagattgatgacagaaaagaatggttaacaaattttatggaagaccggagacagcgtaggctacatggcttaccagagcaatttttatatggtactgcaacaaagcatttgacttataatgatttcatcaacaaggaattgattctcttctcaaactcagacaatgaaagatctataccatctcttgttgatggctttaaacctggccagcggaaagttttatttacctgtttcaagaggaatgataaacgtgaagtaaaagttgcccagttggctggctctgttgctgagatgtcggcttatcatcatggagaacaagcattgatgatgactattgtgaatttggctcagaactttgtgggaagtaacaacattaacttgcttcagcctattggtcagtttggaactcggcttcatggtggcaaagatgctgcaagccctcgttatattttcacaatgttaagcactttagcaaggctactttttcctgctgtggatgacaacctccttaagttcctttatgatgataatcaacgtgtagagcctgagtggtatattcctataattcccatggttttaataaatggtgctgagggcattggtactggatgggcttgtaaactacccaactatgatgctagggaaattgtgaacaatgtcagacgaatgctagatggcctggatcctcatcccatgcttccaaactacaaaaactttaaaggcacgattcaagaacttggtcaaaaccagtatgcagtcagtggtgaaatatttgtagtggacagaaacacagtagaaattacagagcttccagttagaacttggacacaggtatataaagaacaggttttagaacctatgctaaatggaacagataaaacaccagcattaatttctgattataaagaatatcatactgacacaactgtgaaatttgtggtgaaaatgactgaagagaaactagcacaagcagaagctgctggactgcataaagtttttaaacttcaaactactcttacttgtaattccatggtactttttgatcatatgggatgtctgaagaaatatgaaactgtgcaagacattctgaaagaattctttgatttacgattaagttattacggtttacgtaaggagtggcttgtgggaatgttgggagcagaatctacaaagcttaacaatcaagcccgtttcattttagagaagatacaagggaaaattactatagagaataggtcaaagaaagatttgattcaaatgttagtccagagaggttatgaatctgacccagtgaaagcctggaaagaagcacaagaaaaggcagcagaagaggatgaaacacaaaaccagcatgatgatagttcctccgattcaggaactccttcaggcccagattttaattatattttaaatatgtctctgtggtctcttact

SEQ ID NO: 191667 - DNA, 5389 bp, Homo sapiens
  Payload ID: 17866
  Gene Name: topoisomerase (DNA) II beta
  Uniprot ID: Q02880
  ENST ID: ENST00000435706
  CDS Start-End: 203-5068
tttgagggcagccggcggcgcggcctcctcagcgggctcggctggacgtccgctccggatcttcgcgatggggcgcgggggtcggcgcggctaggagtgcggcgagtggagcggtgggtgcggagcggcggggcccagcggcccgcagggaggcgggagcggcggctgcggcctcagggcctgtgagctggaggcactcgccatggccaagtcgggtggctgcggcgcgggagccggcgtgggcggcggcaacggggcactgacctgggtgaacaatgctgcaaaaaaagaagagtcagaaactgccaacaaaaatgattcttcaaagaagttgtctgttgagagagtgtatcagaagaagacacaacttgaacacattcttcttcgtcctgatacatatattgggtcagtggagccattgacgcagttcatgtgggtgtatgatgaagatgtaggaatgaattgcagggaggttacctttgtgccaggtttatacaagatctttgatgaaattttggttaatgctgctgacaataaacagagggataagaacatgacttgtattaaagtttctattgatcctgaatctaacattataagcatttggaataatgggaaaggcattccagtagtagaacacaaggtagagaaagtttatgttcctgctttaatttttggacagcttttaacatccagtaactatgatgatgatgagaaaaaagttacaggtggtcgtaatggttatggtgcaaaactttgtaatattttcagtacaaagtttacagtagaaacagcttgcaaagaatacaaacacagttttaagcagacatggatgaataatatgatgaagacttctgaagccaaaattaaacattttgatggtgaagattacacatgcataacattccaaccagatctgtccaaatttaagatggaaaaacttgacaaggatattgtggccctcatgactagaagggcatatgatttggctggttcgtgtagaggggtcaaggtcatgtttaatggaaagaaattgcctgtaaatggatttcgcagttatgtagatctttatgtgaaagacaaattggatgaaactggggtggccctgaaagttattcatgagcttgcaaatgaaagatgggatgtttgtctcacattgagtgaaaaaggattccagcaaatcagctttgtaaatagtattgcaactacaaaaggtggacggcacgtggattatgtggtagatcaagttgttggtaaactgattgaagtagttaagaaaaagaacaaagctggtgtatcagtgaaaccatttcaagtaaaaaaccatatatgggtttttattaattgccttattgaaaatccaacttttgattctcagactaaggaaaacatgactctgcagcccaaaagttttgggtctaaatgccagctgtcagaaaaattttttaaagcagcctctaattgtggcattgtagaaagtatcctgaactgggtgaaatttaaggctcagactcagctgaataagaagtgttcatcagtaaaatacagtaaaatcaaaggtattcccaaactggatgatgctaatgatgctggtggtaaacattccctggagtgtacactgatattaacagagggagactctgccaaatcactggctgtgtctggattaggtgtgattggacgagacagatacggagtttttccactcaggggcaaaattcttaatgtacgggaagcttctcataaacagatcatggaaaatgctgaaataaataatattattaaaatagttggtctacaatataagaaaagttacgatgatgcagaatctctgaaaaccttacgctatggaaagattatgattatgaccgatcaggatcaagatggttctcacataaaaggcctgcttattaatttcatccatcacaattggccatcacttttgaagcatggttttcttgaagagttcattactcctattgtaaaggcaagcaaaaataagcaggaactttccttctacagtattcctgaatttgacgaatggaaaaaacatatagaaaaccagaaagcctggaaaataaagtactataaaggattgggtactagtacagctaaagaagcaaaggaatattttgctgatatggaaaggcatcgcatcttgtttagatatgctggtcctgaagatgatgctgccattaccttggcatttagtaagaagaagattgatgacagaaaagaatggttaacaaattttatggaagaccggagacagcgtaggctacatggcttaccagagcaatttttatatggtactgcaacaaagcatttgacttataatgatttcatcaacaaggaattgattctcttctcaaactcagacaatgaaagatctataccatctcttgttgatggctttaaacctggccagcggaaagttttatttacctgtttcaagaggaatgataaacgtgaagtaaaagttgcccagttggctggctctgttgctgagatgtcggcttatcatcatggagaacaagcattgatgatgactattgtgaatttggctcagaactttgtgggaagtaacaacattaacttgcttcagcctattggtcagtttggaactcggcttcatggtggcaaagatgctgcaagccctcgttatattttcacaatgttaagcactttagcaaggctactttttcctgctgtggatgacaacctccttaagttcctttatgatgataatcaacgtgtagagcctgagtggtatattcctataattcccatggttttaataaatggtgctgagggcattggtactggatgggcttgtaaactacccaactatgatgctagggaaattgtgaacaatgtcagacgaatgctagatggcctggatcctcatcccatgcttccaaactacaaaaactttaaaggcacgattcaagaacttggtcaaaaccagtatgcagtcagtggtgaaatatttgtagtggacagaaacacagtagaaattacagagcttccagttagaacttggacacaggtatataaagaacaggttttagaacctatgctaaatggaacagataaaacaccagcattaatttctgattataaagaatatcatactgacacaactgtgaaatttgtggtgaaaatgactgaagagaaactagcacaagcagaagctgctggactgcataaagtttttaaacttcaaactactcttacttgtaattccatggtactttttgatcatatgggatgtctgaagaaatatgaaactgtgcaagacattctgaaagaattctttgatttacgattaagttattacggtttacgtaaggagtggcttgtgggaatgttgggagcagaatctacaaagcttaacaatcaagcccgtttcattttagagaagatacaagggaaaattactatagagaataggtcaaagaaagatttgattcaaatgttagtccagagaggttatgaatctgacccagtgaaagcctggaaagaagcacaagaaaaggcagcagaagaggatgaaacacaaaaccagcatgatgatagttcctccgattcaggaactccttcaggcccagattttaattatattttaaatatgtctctgtggtctcttactaaagaaaaagttgaagaactgattaaacagagagatgcaaaagggcgagaggtcaatgatcttaaaagaaaatctccttcagatctttggaaagaggatttagcggcatttgttgaagaactggataaagtggaatctcaagaacgagaagatgttctggctggaatgtctggaaaagcaattaaaggtaaagttggcaaacctaaggtgaagaaactccagttggaagagacaatgccctcaccttatggcagaagaataattcctgaaattacagctatgaaggcagatgccagcaaaaagttgctgaagaagaagaagggtgatcttgatactgcagcagtaaaagtggaatttgatgaagaattcagtggagcaccagtagaaggtgcaggagaagaggcattgactccatcagttcctataaataaaggtcccaaacctaagagggagaagaaggagcctggtaccagagtgagaaaaacacctacatcatctggtaaacctagtgcaaagaaagtgaagaaacggaatccttggtcagatgatgaatccaagtcagaaagtgatttggaagaaacagaacctgtggttattccaagagattctttgcttaggagagcagcagccgaaagacctaaatacacatttgatttctcagaagaagaggatgatgatgctgatgatgatgatgatgacaataatgatttagaggaattgaaagttaaagcatctcccataacaaatgatggggaagatgaatttgttccttcagatgggttagataaagatgaatatacattttcaccaggcaaatcaaaagccactccagaaaaatctttgcatgacaaaaaaagtcaggattttggaaatctcttctcatttccttcatattctcagaagtcagaagatgattcagctaaatttgacagtaatgaagaagattctgcttctgttttttcaccatcatttggtctgaaacagacagataaagttccaagtaaaacggtagctgctaaaaagggaaaaccgtcttcagatacagtccctaagcccaagagagccccaaaacagaagaaagtagtagaggctgtaaactctgactcggattcagaatttggcattccaaagaagactacaacaccaaaaggtaaaggccgaggggcaaagaaaaggaaagcatctggctctgaaaatgaaggcgattataaccctggcaggaaaacatccaaaacaacaagcaagaaaccgaagaagacatcttttgatcaggattcagatgtggacatcttcccctcagacttccctactgagccaccttctctgccacgaaccggtcgggctaggaaagaagtaaaatattttgcagagtctgatgaagaagaagatgatgttgattttgcaatgtttaattaagtgcccaaagagcacaaacatttttcaacaaatatcttgtgttgtccttttgtcttctctgtctcagacttttgtacatctggcttattttaatgtgatgatgtaattgacggttttttattattgtggtaggccttttaacattttgttcttacacatacagttttatgctcttttttactcattgaaatgtcacgtactgtctgattggcttgtagaattgttatagactgccgtgcattagcacagattttaattgtcatggttacaaactacagacctgctttttgaaatgaaatttaaacattaaaaatggaactg

SEQ ID NO: 191668 - DNA, 5378 bp, Homo sapiens
  Payload ID: 17867
  Gene Name: topoisomerase (DNA) II binding protein 1
  Uniprot ID: Q92547
  ENST ID: ENST00000260810
  CDS Start-End: 133-4701
ggggtaggggcggcgccgagtcgggggagggggctgtgcgccgggctggcgcccgaccccagccaccgccctgcggccagcgcgtcccccgactcgccgcccggagaccccgaggctccaacgagttcagaaatgtccagaaatgacaaagaaccgttttttgtgaagtttttaaagtcttcagacaattccaaatgtttttttaaagctctcgagtccataaaagaattccaatcagaagaatatcttcagattattacagaagaagaggcattgaagataaaggagaatgatagatcactttatatctgtgacccttttagtggcgttgtctttgatcacctcaaaaagcttggctgcagaattgttggtcctcaagtagtcatattttgtatgcaccaccagcgatgtgtcccaagagccgaacatccagtttataatatggttatgtctgatgtaaccatatcttgtacaagtctggaaaaagaaaaaagggaagaagttcataaatatgtacaaatgatgggcggacgagtatacagagaccttaatgtatcagtaactcaccttattgcaggagaagttggtagcaaaaaatatttagttgctgcaaacctgaagaaacctattttgcttccctcttggataaaaacactttgggagaagtcacaagagaaaaaaataactagatatactgatataaacatggaagatttcaagtgtcctatttttcttggttgcataatctgtgtgactggcttatgtggcttagacaggaaagaagttcagcaactcacagttaagcatggaggtcaatacatgggacaattgaaaatgaatgaatgtacacacctcattgtgcaagaaccaaaaggtcagaagtatgagtgtgccaagagatggaatgtacactgtgtgaccacacagtggttttttgacagtattgagaaaggtttttgtcaggatgaatccatatacaagacagaacctagaccagaagcaaagactatgcccaattcttcaactcctaccagccagatcaacacaattgatagtcgtactctttcagatgtcagcaatatttccaacataaatgcaagttgcgtaagtgaatcaatatgtaattcacttaacagcaaactggagcctacacttgaaaatctagaaaatctggatgtcagtgcatttcaagcacctgaagatttattagatggttgtcggatatatctttgcggttttagtggcagaaagctagataaactgagaagacttattaacagtggaggtggagttcgttttaaccagctaaatgaagatgtaactcatgttattgtgggagattatgatgatgaattgaagcagttttggaataaatcagcccacaggcctcatgtagtgggagcaaagtggttgctagagtgtttcagtaaaggttatatgctttctgaagaaccatatatccatgctaattaccagccagtggaaattccagtttcacataagcctgaaagtaaagcagctcttttaaaaaagaagaacagcagcttctctaagaaagactttgctcctagtgaaaagcatgagcaagctgatgaagatctgctctctcaatatgaaaatggtagctccacagtagttgaggctaagacgtctgaagccaggccctttaatgattctactcatgctgagcccttgaatgattctactcacatttctttgcaagaagaaaaccagtcttctgtcagtcattgtgtccctgatgtttctacaattactgaagaaggcttatttagccaaaagagtttccttgttttgggttttagtaatgaaaatgaatctaacatcgcaaacatcataaaagaaaatgctgggaaaatcatgtcccttctgagcagaactgttgcggattatgctgtggttcctctgctggggtgtgaagtggaagccactgtgggagaagttgttacaaatacatggctggttacttgcatagactatcagactttgtttgatccaaagtcgaatcctctcttcacaccagttccagtaatgacaggaatgactcctttagaggattgtgttatttcatttagccagtgtgctggagcagaaaaagagtctttaacattcctagcaaacctccttggagcaagtgttcaagaatactttgttcgcaaatccaatgcaaagaaaggcatgtttgccagtactcatcttatactgaaagaacgtggtggctctaaatatgaagctgcaaagaagtggaatttacctgccgttactatagcttggctgttggagactgctagaacgggaaagagagcagacgaaagccattttctgattgaaaattcaactaaagaagaacgaagtttggaaacagaaataacaaatggaatcaatctaaattcagatactgcagagcatcctggcacacgcctgcaaactcacagaaaaaccgtcgttacacctttagatatgaaccgctttcagagtaaagctttccgtgctgtggtctcacaacatgccagacaggtcgcagcctccccagcagtaggacaaccacttcagaaggagccctcgttacacctggatacaccatcaaaattcctgtccaaggacaaactcttcaagccttcctttgatgtgaaggatgcacttgcagccttggaaactccaggacgtcccagccaacagaaaaggaaaccgagtacgccactctcagaagttattgtcaaaaacttgcaacttgctttggcaaatagctctcgaaatgctgtcgctctttctgccagccctcaactgaaagaggcccagtcagagaaggaagaagccccaaagccacttcacaaagtagtggtatgtgttagtaaaaaactcagtaagaagcagagtgaactaaatgggatcgcagcctctctaggagcagattacaggtggagttttgatgaaacagtgactcatttcatctatcaagggcggccaaatgacactaatcgggagtataaatctgtaaaagaaagaggagtacacattgtttccgagcactggcttttagattgtgcccaagagtgtaaacatcttcctgaatctctttatccacatacttataatcccaaaatgagcttggatatcagcgcagtgcaagatggccggctctgtaatagtcgactactctcagctgtgtcttcaacaaaggatgatgagccagatcctttgattttagaagaaaatgatgtagacaatatggccaccaataataaagagtcagcaccatcaaatggaagtggaaagaatgactctaaaggagttctgacacagaccttagagatgagagagaactttcagaagcagttacaggagataatgtctgcaacatcaatagtgaaaccccaagggcagaggacttccctttcaagaagtggttgtaacagcgcatcttcaacccctgacagcactcgctctgctcgcagtggacgaagtagagtcctagaggcactgaggcagtctcgtcagacagtacctgatgtcaacacagagccttcccaaaatgaacagatcatttgggatgaccctacagcaagggaggagagagcaaggcttgccagcaatttgcagtggcctagttgtcccacacaatactctgagcttcaggttgacattcaaaacttggaggattctccttttcaaaagcctttacatgattcagaaattgctaaacaggctgtctgtgatcctggaaacatacgtgtgactgaagctcccaaacacccaatctctgaagaactggaaactcccataaaagacagccacctgatccctacgcctcaagcccccagtattgcctttccactcgccaacccccctgtggctccgcaccctagagaaaagattataacgatagaggagactcatgaagaattaaaaaaacagtacatatttcagttatcatctctgaatcctcaagaacgtattgactattgtcatctgattgagaaactaggtggattggtgatagaaaagcagtgctttgatcccacctgtacacacattgttgtgggacatccacttcgaaacgagaagtatttagcctcagtggcagctgggaagtgggtgcttcatcgctcctaccttgaagcctgcaggactgctggacacttcgtgcaggaagaagactatgaatggggaagtagttccatacttgatgttctgactggaatcaatgtacagcaacgaagactagcacttgcagcaatgagatggagaaaaaaaatccagcaaagacaagaatctggcattgttgagggagcatttagtgggtggaaggttattttacatgtggatcagtctcgagaagcaggcttcaaacgccttcttcagtcaggaggagcaaaggtgctacctggtcattctgtacctttatttaaagaggccacacatcttttttctgacttgaataaactgaaaccagatgactcaggagttaatatagcagaagctgctgcccagaacgtgtactgcttgagaacagaatacattgctgattatctcatgcaggaatcacctcctcatgtagaaaattactgtctaccagaagctatttcatttattcagaataataaggaacttgggactggattatcacaaaagaggaaagctcctacagaaaaaaataaaatcaaacgacctagagtacactaatcgcatctaccctttagttaccaaacattaaatgtttttaaaaattgaaagcctgaatgtgactgtgatagatttgggtagtaatttaaagatgagtacctgaagaattctgcttcagagtataatgatgacccttcttgagttttgaacacctgaaattgtaatcactgaaatattaactgtttcttaataaaaagttacctgaaataacaacaaaatacaactcctcagctagcttgctgttaaaccacattgaagtctgttaaaagatatttatttttcttgtaaatatctgaagctgtagcttagtggaaattttagcaaggtaatggattttgctttaaaatgtctgccttacaaattcataacaacaagatttgtcagtcagcatttattcatgttttccctgatttttatcttctcaccattttacctcttttaacaggagcctgagcacaaggtttaatgaggaagctggggctataaatatgtgtgtatatatgtatatgtatgtttgtacaaatctccatgatgtttgccaagtttgaatgcgcaaaacttggaaaatgtgacaataaagaataaaagtagtaactcaaattagtattaagatgtgtttacatagataaattttttaaaagagcaccctggcatctgttcttctgttgaagcaacaa

SEQ ID NO: 191669 - DNA, 618 bp, Homo sapiens
  Payload ID: 17867
  Gene Name: topoisomerase (DNA) II binding protein 1
  ENST ID: ENST00000508524
  CDS Start-End: 1-618
atttagttgctgcaaacctgaagaaacctattttgcttccctcttggataaaaacactttgggagaagtcacaagagaaaaaaataactagatatactgatataaacatggaagatttcaagtgtcctatttttcttggttgcataatctgtgtgactggcttatgtggcttagacaggaaagaagttcagcaactcacagttaagcatggaggtcaatacatgggacaattgaaaatgaatgaatgtacacacctcattgtgcaagaaccaaaaggtcagaagtatgagtgtgccaagagatggaatgtacactgtgtgaccacacagtggttttttgacagtattgagaaaggtttttgtcaggatgaatccatatacaagacagaacctagaccagaagcaaagactatgcccaattcttcaactcctaccagccagatcaacacaattgataatgtcagcaatatttccaacataaatgcaagttgcgtaagtgaatcaatatgtaattcacttaacagcaaactggagcctacacttgaaaatctagaaaatctggatgtcagtgcatttcaagcacctgaagatttattagatggttgtcggatatatcttt

SEQ ID NO: 191670 - DNA, 402 bp, Homo sapiens
  Payload ID: 17867
  Gene Name: topoisomerase (DNA) II binding protein 1
  ENST ID: ENST00000572787
  CDS Start-End: 1-153
ttttttgacagtattgagaaaggtttttgtcaggatgaatccatatacaagacagaacctagaccagaagcaaagactatgcccaattcttcaactcctaccagccagatcaacacaattgatacaaactggagcctacacttgaaaatctagaaaatctggatgtcagtgcatttcaagcacctgaagatttattagatggttgtcggatatatctttgcggttttagtggcagaaagctagataaactgagaagacttattaacagtggaggtggagttcgttttaaccagctaaatgaagatgtaactcatgttattgtgggagattatgatgatgaattgaagcagttttggaataaatcagcccacaggcctcatgtagtgggagcaaagtggttgc

SEQ ID NO: 191671 - DNA, 4056 bp, Homo sapiens
  Payload ID: 17868
  Gene Name: topoisomerase (DNA) III alpha
  Uniprot ID: Q13472
  ENST ID: ENST00000321105
  CDS Start-End: 216-3221
gaagttccacgccaagatactggattcggtgctgaggcggcggctgcggcacgggaaaggctcagtgactgaagctccaaaggccagcaggctggtggggacgtgaccgaagcgaggctctggttccctttcggtgggcgccatttgagcctcatctctggcttccccaggatgcgccggcagccggggagcggctccgggcgcgaggtctgaggatgatctttcctgtcgcccgctacgcgctccggtggctgcgacggcccgaagaccgtgccttttcccgcgccgccatggagatggccctccgaggcgtgcggaaagtcctctgtgtggccgaaaaaaacgacgcggccaaggggatcgccgacctgctgtcaaacggtcgcatgaggcggagagaaggactttcaaaattcaacaagatctatgaatttgattatcatctgtatggccagaatgttaccatggtaatgacttcagtttctggacatttactggctcatgatttccagatgcagtttcgaaaatggcagagctgcaaccctcttgtcctctttgaagcagaaattgaaaagtactgcccagagaattttgtagacatcaagaaaactttggaacgagagactcgccagtgccaggctctggtgatctggactgactgtgatagagaaggcgaaaacatcgggtttgagattatccacgtgtgtaaggctgtaaagcccaatctgcaggtgttgcgagcccgattctctgagatcacaccccatgccgtcaggacagcttgtgaaaacctgaccgagcctgatcagagggtgagcgatgctgtggatgtgaggcaggagctggacctgaggattggagctgcctttactaggttccagaccctgcggcttcagaggatttttcctgaggtgctggcagagcagctcatcagttacggcagctgccagttccccacactgggctttgtggtggagcggttcaaagccattcaggcttttgtaccagaaatcttccacagaattaaagtaactcatgaccacaaagatggtatcgtagaattcaactggaaaaggcatcgactctttaaccacacggcttgcctagttctctatcagttgtgtgtggaggatcccatggcaactgtggtagaggtcagatctaagcccaagagcaagtggcggcctcaagccttggacactgtggagcttgagaagctggcttctcgaaagttgagaataaatgctaaagaaaccatgaggattgctgagaagctctacactcaagggtacatcagctatccccgaacagaaacaaacatttttcccagagacttaaacctgacggtgttggtggaacagcagacccccgatccacgctggggggcctttgcccagagcattctagagcggggtggtcccaccccacgcaatgggaacaagtctgaccaagctcaccctcccattcaccccaccaaatacaccaacaacttacagggagatgaacagcgactgtacgagtttattgttcgccatttcctggcttgctgctcccaggatgctcaggggcaggagaccacagtggagatcgacatcgctcaggaacgctttgtggcccatggcctcatgattctggcccgaaactatctggatgtgtatccatatgatcactggagtgacaagatcctccctgtctatgagcaaggatcccactttcagcccagcaccgtggagatggtggacggggagaccagcccacccaagctgctcaccgaggccgacctcattgccctcatggagaagcatggcattggtacggatgccactcatgcggagcacatcgagaccatcaaagcccggatgtacgtgggcctcaccccagacaagcggttcctccctgggcacctgggcatgggacttgtggaaggttatgattccatgggctatgaaatgtctaagcctgacctccgggctgaactggaagctgatctgaagctgatctgtgatggcaaaaaggacaaatttgtggttctaaggcagcaagtgcagaaatacaagcaggttttcattgaagcggtggctaaagcaaagaaattggacgaggccttggcccagtactttgggaatgggacagagttggcccagcaagaagatatctacccagccatgccagagcccatcaggaagtgcccacagtgcaacaaggacatggtccttaagaccaagaagaatggcgggttctacctcagctgcatgggtttcccagagtgtcgctcagctgtgtggcttcctgactcggtgctggaggccagcagggacagcagtgtgtgtccagtttgtcagccacaccctgtgtacaggttaaagttaaagtttaagcgcggtagccttcccccgaccatgcctctggagtttgtttgctgcatcggcggatgcgacgacaccctgagggagatcctggacctgagattttcagggggcccccccagggctagccagccctctggccgcctgcaggctaaccagtccctgaacaggatggacaacagccagcacccccagcctgctgacagcagacagactgggtcctcaaaggctctggcccagaccctcccaccacccacggctgctggtgaaagcaattctgtgacctgcaactgtggccaggaggctgtgctgctcactgtccgtaaggagggccccaaccggggccggcagttctttaagtgcaacggaggtagctgcaacttcttcctgtgggcagacagccccaatccgggagcaggagggcctcctgccttggcatatagacccctgggcgcctccctgggatgcccaccaggcccagggatccacctaggtgggtttggcaaccctggtgatggcagtggtagtggcacatcctgcctttgcagccagccctccgtcacacggactgtgcagaaggatggacccaacaaggggcgccagttccacacatgtgccaagccgagagagcagcagtgtggctttttccagtgggtcgatgagaacaccgctccagggacttctggagccccgtcctggacaggagacagaggaagaaccctggagtcggaagccagaagcaaaaggccccgggccagttcctcagacatggggtccacagcaaagaaaccccggaaatgcagcctttgccaccagcctggacacacccgtcccttttgtcctcagaacagatgagctcagggtagggtagagaacgccactttctcagacctgtcccctttgtgtttagaaatgagttaaccaggaccaagtggccatttagtgtcctggaaacttagaggacagtgttggcctttggagtcgggccttcttgtgttaaggggcacaaggtccagatcactctggagcaggccagctctgctggacagtgaccctcttcccaggcctcaggagtgaccatagccactgctgaaaagtcacgcagctgctccctcggaccccccaaggatggttgctgttagcagaggattggtgcagtcccagctgaagcccactgtgtgccaaaggaagaagctcccagggctgcttccttcacctgcagaaagccccaagtgagccaccagcactcatggggcagtccctgtccaggctgcccagggcttctcatagacgtcctgagaaggacggtgtaatgcaaggaaatggctgtggtaacactgatccttcagaagaagcttcattccctcttaatctagttaagccaggacatccagaattcattgctttaataaagaacccaggccgggtgcagtggctcatgcctgtaatcccagcactttgggaggctgtggggggcggattgcctgagctcaggagttcgagaccagccagggcaacatggtgaaaccctgtctctactaaaatacaaaaaattagccaggtgtggcggtgtgcgcctgtagacccggctactcaggaggctgaggcaggagaattgcttgaacccgggaggcggaggttgcagttagctgagattgcgccactggacgacagagcgagactcagtctc

SEQ ID NO: 191672 - DNA, 4116 bp, Homo sapiens
  Payload ID: 17868
  Gene Name: topoisomerase (DNA) III alpha
  Uniprot ID: Q13472
  ENST ID: ENST00000542570
  CDS Start-End: 230-3235
ggagaaggcgggcggaagttccacgccaagatactggattcggtgctgaggcggcggctgcggcacgggaaaggctcagtgactgaagctccaaaggccagcaggctggtggggacgtgaccgaagcgaggctctggttccctttcggtgggcgccatttgagcctcatctctggcttccccaggatgcgccggcagccggggagcggctccgggcgcgaggtctgaggatgatctttcctgtcgcccgctacgcgctccggtggctgcgacggcccgaagaccgtgccttttcccgcgccgccatggagatggccctccgaggcgtgcggaaagtcctctgtgtggccgaaaaaaacgacgcggccaaggggatcgccgacctgctgtcaaacggtcgcatgaggcggagagaaggactttcaaaattcaacaagatctatgaatttgattatcatctgtatggccagaatgttaccatggtaatgacttcagtttctggacatttactggctcatgatttccagatgcagtttcgaaaatggcagagctgcaaccctcttgtcctctttgaagcagaaattgaaaagtactgcccagagaattttgtagacatcaagaaaactttggaacgagagactcgccagtgccaggctctggtgatctggactgactgtgatagagaaggcgaaaacatcgggtttgagattatccacgtgtgtaaggctgtaaagcccaatctgcaggtgttgcgagcccgattctctgagatcacaccccatgccgtcaggacagcttgtgaaaacctgaccgagcctgatcagagggtgagcgatgctgtggatgtgaggcaggagctggacctgaggattggagctgcctttactaggttccagaccctgcggcttcagaggatttttcctgaggtgctggcagagcagctcatcagttacggcagctgccagttccccacactgggctttgtggtggagcggttcaaagccattcaggcttttgtaccagaaatcttccacagaattaaagtaactcatgaccacaaagatggtatcgtagaattcaactggaaaaggcatcgactctttaaccacacggcttgcctagttctctatcagttgtgtgtggaggatcccatggcaactgtggtagaggtcagatctaagcccaagagcaagtggcggcctcaagccttggacactgtggagcttgagaagctggcttctcgaaagttgagaataaatgctaaagaaaccatgaggattgctgagaagctctacactcaagggtacatcagctatccccgaacagaaacaaacatttttcccagagacttaaacctgacggtgttggtggaacagcagacccccgatccacgctggggggcctttgcccagagcattctagagcggggtggtcccaccccacgcaatgggaacaagtctgaccaagctcaccctcccattcaccccaccaaatacaccaacaacttacagggagatgaacagcgactgtacgagtttattgttcgccatttcctggcttgctgctcccaggatgctcaggggcaggagaccacagtggagatcgacatcgctcaggaacgctttgtggcccatggcctcatgattctggcccgaaactatctggatgtgtatccatatgatcactggagtgacaagatcctccctgtctatgagcaaggatcccactttcagcccagcaccgtggagatggtggacggggagaccagcccacccaagctgctcaccgaggccgacctcattgccctcatggagaagcatggcattggtacggatgccactcatgcggagcacatcgagaccatcaaagcccggatgtacgtgggcctcaccccagacaagcggttcctccctgggcacctgggcatgggacttgtggaaggttatgattccatgggctatgaaatgtctaagcctgacctccgggctgaactggaagctgatctgaagctgatctgtgatggcaaaaaggacaaatttgtggttctaaggcagcaagtgcagaaatacaagcaggttttcattgaagcggtggctaaagcaaagaaattggacgaggccttggcccagtactttgggaatgggacagagttggcccagcaagaagatatctacccagccatgccagagcccatcaggaagtgcccacagtgcaacaaggacatggtccttaagaccaagaagaatggcgggttctacctcagctgcatgggtttcccagagtgtcgctcagctgtgtggcttcctgactcggtgctggaggccagcagggacagcagtgtgtgtccagtttgtcagccacaccctgtgtacaggttaaagttaaagtttaagcgcggtagccttcccccgaccatgcctctggagtttgtttgctgcatcggcggatgcgacgacaccctgagggagatcctggacctgagattttcagggggcccccccagggctagccagccctctggccgcctgcaggctaaccagtccctgaacaggatggacaacagccagcacccccagcctgctgacagcagacagactgggtcctcaaaggctctggcccagaccctcccaccacccacggctgctggtgaaagcaattctgtgacctgcaactgtggccaggaggctgtgctgctcactgtccgtaaggagggccccaaccggggccggcagttctttaagtgcaacggaggtagctgcaacttcttcctgtgggcagacagccccaatccgggagcaggagggcctcctgccttggcatatagacccctgggcgcctccctgggatgcccaccaggcccagggatccacctaggtgggtttggcaaccctggtgatggcagtggtagtggcacatcctgcctttgcagccagccctccgtcacacggactgtgcagaaggatggacccaacaaggggcgccagttccacacatgtgccaagccgagagagcagcagtgtggctttttccagtgggtcgatgagaacaccgctccagggacttctggagccccgtcctggacaggagacagaggaagaaccctggagtcggaagccagaagcaaaaggccccgggccagttcctcagacatggggtccacagcaaagaaaccccggaaatgcagcctttgccaccagcctggacacacccgtcccttttgtcctcagaacagatgagctcagggtagggtagagaacgccactttctcagacctgtcccctttgtgtttagaaatgagttaaccaggaccaagtggccatttagtgtcctggaaacttagaggacagtgttggcctttggagtcgggccttcttgtgttaaggggcacaaggtccagatcactctggagcaggccagctctgctggacagtgaccctcttcccaggcctcaggagtgaccatagccactgctgaaaagtcacgcagctgctccctcggaccccccaaggatggttgctgttagcagaggattggtgcagtcccagctgaagcccactgtgtgccaaaggaagaagctcccagggctgcttccttcacctgcagaaagccccaagtgagccaccagcactcatggggcagtccctgtccaggctgcccagggcttctcatagacgtcctgagaaggacggtgtaatgcaaggaaatggctgtggtaacactgatccttcagaagaagcttcattccctcttaatctagttaagccaggacatccagaattcattgctttaataaagaacccaggccgggtgcagtggctcatgcctgtaatcccagcactttgggaggctgtggggggcggattgcctgagctcaggagttcgagaccagccagggcaacatggtgaaaccctgtctctactaaaatacaaaaaattagccaggtgtggcggtgtgcgcctgtagacccggctactcaggaggctgaggcaggagaattgcttgaacccgggaggcggaggttgcagttagctgagattgcgccactggacgacagagcgagactcagtctcaaaaaaaatttaaaaatttaaaaaaataaaaagaatccaaccccgg

SEQ ID NO: 191673 - DNA, 3661 bp, Homo sapiens
  Payload ID: 17868
  Gene Name: topoisomerase (DNA) III alpha
  ENST ID: ENST00000584582
  CDS Start-End: 216-425
gaagttccacgccaagatactggattcggtgctgaggcggcggctgcggcacgggaaaggctcagtgactgaagctccaaaggccagcaggctggtggggacgtgaccgaagcgaggctctggttccctttcggtgggcgccatttgagcctcatctctggcttccccaggatgcgccggcagccggggagcggctccgggcgcgaggtctgaggatgatctttcctgtcgcccgctacgcgctccggtggctgcgacggcccgaagaccgtgccttttcccgcgccgccatggagatggccctccgaggcgtgcggaaagtcctctgtgtggccgaaaaaaacgacgcggccaaggggatcgccgacctgctgtcaaacggtcgcatgaggcgggcagagctgcaaccctcttgtcctctttgaagcagaaattgaaaagtactgcccagagaattttgtagacatcaagaaaactttggaacgagagactcgccagtgccaggctctggtgatctggactgactgtgatagagaaggcgaaaacatcgggtttgagattatccacgtgtgtaaggctgtaaagcccaatctgcaggtgttgcgagcccgattctctgagatcacaccccatgccgtcaggacagcttgtgaaaacctgaccgagcctgatcagagggtgagcgatgctgtggatgtgaggcaggagctggacctgaggattggagctgcctttactaggttccagaccctgcggcttcagaggatttttcctgaggtgctggcagagcagctcatcagttacggcagctgccagttccccacactgggctttgtggtggagcggttcaaagccattcaggcttttgtaccagaaatcttccacagaattaaagtaactcatgaccacaaagatggtatcgtagaattcaactggaaaaggcatcgactctttaaccacacggcttgcctagttctctatcagttgtgtgtggaggatcccatggcaactgtggtagaggtcagatctaagcccaagagcaagtggcggcctcaagccttggacactgtggagcttgagaagctggcttctcgaaagttgagaataaatgctaaagaaaccatgaggattgctgagaagctctacactcaagggtacatcagctatccccgaacagaaacaaacatttttcccagagacttaaacctgacggtgttggtggaacagcagacccccgatccacgctggggggcctttgcccagagcattctagagcggggtggtcccaccccacgcaatgggaacaagtctgaccaagctcaccctcccattcaccccaccaaatacaccaacaacttacagggagatgaacagcgactgtacgagtttattgttcgccatttcctggcttgctgctcccaggatgctcaggggcaggagaccacagtggagatcgacatcgctcaggaacgctttgtggcccatggcctcatgattctggcccgaaactatctggatgtgtatccatatgatcactggagtgacaagatcctccctgtctatgagcaaggatcccactttcagcccagcaccgtggagatggtggacggggagaccagcccacccaagctgctcaccgaggccgacctcattgccctcatggagaagcatggcattggtacggatgccactcatgcggagcacatcgagaccatcaaagcccggatgtacgtgggcctcaccccagacaagcggttcctccctgggcacctgggcatgggacttgtggaaggttatgattccatgggctatgaaatgtctaagcctgacctccgggctgaactggaagctgatctgaagctgatctgtgatggcaaaaaggacaaatttgtggttctaaggcagcaagtgcagaaatacaagcaggttttcattgaagcggtggctaaagcaaagaaattggacgaggccttggcccagtactttgggaatgggacagagttggcccagcaagaagatatctacccagccatgccagagcccatcaggaagtgcccacagtgcaacaaggacatggtccttaagaccaagaagaatggcgggttctacctcagctgcatgggtttcccagagtgtcgctcagctgtgtggcttcctgactcggtgctggaggccagcagggacagcagtgtgtgtccagtttgtcagccacaccctgtgtacaggttaaagttaaagtttaagcgcggtagccttcccccgaccatgcctctggagtttgtttgctgcatcggcggatgcgacgacaccctgagggagatcctggacctgagattttcagggggcccccccagggctagccagccctctggccgcctgcaggctaaccagtccctgaacaggatggacaacagccagcacccccagcctgctgacagcagacagactgggtcctcaaaggctctggcccagaccctcccaccacccacggctgctggtgaaagcaattctgtgacctgcaactgtggccaggaggctgtgctgctcactgtccgtaaggagggccccaaccggggccggcagttctttaagtgcaacggaggtagctgcaacttcttcctgtgggcagacagccccaatccgggagcaggagggcctcctgccttggcatatagacccctgggcgcctccctgggatgcccaccaggcccagggatccacctaggtgggtttggcaaccctggtgatggcagtggtagtggcacatcctgcctttgcagccagccctccgtcacacggactgtgcagaaggatggacccaacaaggggcgccagttccacacatgtgccaagccgagagagcagcagtgtggctttttccagtgggtcgatgagaacaccgctccagggacttctggagccccgtcctggacaggagacagaggaagaaccctggagtcggaagccagaagcaaaaggccccgggccagttcctcagacatggggtccacagcaaagaaaccccggaaatgcagcctttgccaccagcctggacacacccgtcccttttgtcctcagaacagatgagctcagggtagggtagagaacgccactttctcagacctgtcccctttgtgtttagaaatgagttaaccaggaccaagtggccatttagtgtcctggaaacttagaggacagtgttggcctttggagtcgggccttcttgtgttaaggggcacaaggtccagatcactctggagcaggccagctctgctggacagtgaccctcttcccaggcctcaggagtgaccatagccactgctgaaaagtcacgcagctgctccctcggaccccccaaggatggttgctgttagcagaggattggtgcagtcccagctgaagcccactgtgtgccaaaggaagaagctcccagggctgcttccttcacctgcagaaagccccaagtgagccaccagcactcatggggcagtccctgtccaggctgcccagggcttctcatagacgtcctgagaaggacggtgtaatgcaaggaaatggctgtggtaacactgatccttcagaagaagcttcattccctcttaatctagttaagccaggacatccagaattcattgctttaataaagaacccaggccgggtg

SEQ ID NO: 191674 - DNA, 3239 bp, Homo sapiens
  Payload ID: 17868
  Gene Name: topoisomerase (DNA) III alpha
  ENST ID: ENST00000582981
  CDS Start-End: 230-499
ggagaaggcgggcggaagttccacgccaagatactggattcggtgctgaggcggcggctgcggcacgggaaaggctcagtgactgaagctccaaaggccagcaggctggtggggacgtgaccgaagcgaggctctggttccctttcggtgggcgccatttgagcctcatctctggcttccccaggatgcgccggcagccggggagcggctccgggcgcgaggtctgaggatgatctttcctgtcgcccgctacgcgctccggtggctgcgacggcccgaagaccgtgccttttcccgcgccgccatggagatggccctccgaggcgtgcggaaagtcctctgtgtggccgaaaaaaacgacgcggccaaggggatcgccgacctgctgtcaaacggtcgcatgaggcggagagaaggactttcaaaattcaacaagatctatgaatttgattatcatctgtatggccaggcagagctgcaaccctcttgtcctctttgaagcagaaattgaaaagtactgcccagagaattttgtagacatcaagaaaactttggaacgagagactcgccagtgccaggctctggtgatctggactgactgtgatagagaaggcgaaaacatcgggtttgagattatccacgtgtgtaaggctgtaaagcccaatctgcaggtgttgcgagcccgattctctgagatcacaccccatgccgtcaggacagcttgtgaaaacctgaccgagcctgatcagagggtgagcgatgctgtggatgtgaggcaggagctggacctgaggattggagctgcctttactaggttccagaccctgcggcttcagaggatttttcctgaggtgctggcagagcagctcatcagttacggcagctgccagttccccacactgggctttgtggtggagcggttcaaagccattcaggcttttgtaccagaaatcttccacagaattaaagtaactcatgaccacaaagatggtatcgtagaattcaactggaaaaggcatcgactctttaaccacacggcttgcctagttctctatcagttgtgtgtggaggatcccatggcaactgtggtagaggtcagatctaagcccaagagcaagtggcggcctcaagccttggacactgtggagcttgagaagctggcttctcgaaagttgagaataaatgctaaagaaaccatgaggattgctgagaagctctacactcaagggtacatcagctatccccgaacagaaacaaacatttttcccagagacttaaacctgacggtgttggtggaacagcagacccccgatccacgctggggggcctttgcccagagcattctagagcggggtggtcccaccccacgcaatgggaacaagtctgaccaagctcaccctcccattcaccccaccaaatacaccaacaacttacagggagatgaacagcgactgtacgagtttattgttcgccatttcctggcttgctgctcccaggatgctcaggggcaggagaccacagtggagatcgacatcgctcaggaacgctttgtggcccatggcctcatgattctggcccgaaactatctggatgtgtatccatatgatcactggagtgacaagatcctccctgtctatgagcaaggatcccactttcagcccagcaccgtggagatggtggacggggagaccagcccacccaagctgctcaccgaggccgacctcattgccctcatggagaagcatggcattggtacggatgccactcatgcggagcacatcgagaccatcaaagcccggatgtacgtgggcctcaccccagacaagcggttcctccctgggcacctgggcatgggacttgtggaaggttatgattccatgggctatgaaatgtctaagcctgacctccgggctgaactggaagctgatctgaagctgatctgtgatggcaaaaaggacaaatttgtggttctaaggcagcaagtgcagaaatacaagcaggttttcattgaagcggtggctaaagcaaagaaattggacgaggccttggcccagtactttgggaatgggacagagttggcccagcaagaagatatctacccagccatgccagagcccatcaggaagtgcccacagtgcaacaaggacatggtccttaagaccaagaagaatggcgggttctacctcagctgcatgggtttcccagagtgtcgctcagctgtgtggcttcctgactcggtgctggaggccagcagggacagcagtgtgtgtccagtttgtcagccacaccctgtgtacaggttaaagttaaagtttaagcgcggtagccttcccccgaccatgcctctggagtttgtttgctgcatcggcggatgcgacgacaccctgagggagatcctggacctgagattttcagggggcccccccagggctagccagccctctggccgcctgcaggctaaccagtccctgaacaggatggacaacagccagcacccccagcctgctgacagcagacagactgggtcctcaaaggctctggcccagaccctcccaccacccacggctgctggtgaaagcaattctgtgacctgcaactgtggccaggaggctgtgctgctcactgtccgtaaggagggccccaaccggggccggcagttctttaagtgcaacggaggtagctgcaacttcttcctgtgggcagacagccccaatccgggagcaggagggcctcctgccttggcatatagacccctgggcgcctccctgggatgcccaccaggcccagggatccacctaggtgggtttggcaaccctggtgatggcagtggtagtggcacatcctgcctttgcagccagccctccgtcacacggactgtgcagaaggatggacccaacaaggggcgccagttccacacatgtgccaagccgagagagcagcagtgtggctttttccagtgggtcgatgagaacaccgctccagggacttctggagccccgtcctggacaggagacagaggaagaaccctggagtcggaagccagaagcaaaaggccccgggccagttcctcagacatggggtccacagcaaagaaaccccggaaatgcagcctttgccaccagcctggacacacccgtcccttttgtcctcagaacagatgagctcagggtagggtagagaacgccactttctcagacctgtcccctttgtgtttagaaatgagttaaccaggaccaagt

SEQ ID NO: 191675 - DNA, 2929 bp, Homo sapiens
  Payload ID: 17868
  Gene Name: topoisomerase (DNA) III alpha
  Uniprot ID: Q13472
  ENST ID: ENST00000580095
  CDS Start-End: 1-2929
atggagatggccctccgaggcgtgcggaaagtcctctgtgtggccgaaaaaaacgacgcggccaaggggatcgccgacctgctgtcaaacggtcgcatgaggcggagagaaggactttcaaaattcaacaagatctatgaatttgattatcatctgtatggccagaatgttaccatggtaatgacttcagtttctggacatttactggctcatgatttccagatgcagtttcgaaaatggcagagctgcaaccctcttgtcctctttgaagcagaaattgaaaagtactgcccagagaattttgtagacatcaagaaaactttggaacgagagactcgccagtgccaggctctggtgatctggactgactgtgatagagaaggcgaaaacatcgggtttgagattatccacgtgtgtaaggctgtaaagcccaatctgcaggtgttgcgagcccgattctctgagatcacaccccatgccgtcaggacagcttgtgaaaacctgaccgagcctgatcagagggtgagcgatgctgtggatgtgaggcaggagctggacctgaggattggagctgcctttactaggttccagaccctgcggcttcagaggatttttcctgaggtgctggcagagcagctcatcagttacggcagctgccagttccccacactgggctttgtggtggagcggttcaaagccattcaggcttttgtaccagaaatcttccacagaattaaagtaactcatgaccacaaagatggtatcgtagaattcaactggaaaaggcatcgactctttaaccacacggcttgcctagttctctatcagttgtgtgtggaggatcccatggcaactgtggtagaggtcagatctaagcccaagagcaagtggcggcctcaagccttggacactgtggagcttgagaagctggcttctcgaaagttgagaataaatgctaaagaaaccatgaggattgctgagaagctctacactcaagggtacatcagctatccccgaacagaaacaaacatttttcccagagacttaaacctgacggtgttggtggaacagcagacccccgatccacgctggggggcctttgcccagagcattctagagcggggtggtcccaccccacgcaatgggaacaagtctgaccaagctcaccctcccattcaccccaccaaatacaccaacaacttacagggagatgaacagcgactgtacgagtttattgttcgccatttcctggcttgctgctcccaggatgctcaggggcaggagaccacagtggagatcgacatcgctcaggaacgctttgtggcccatggcctcatgattctggcccgaaactatctggatgtgtatccatatgatcactggagtgacaagatcctccctgtctatgagcaaggatcccactttcagcccagcaccgtggagatggtggacggggagaccagcccacccaagctgctcaccgaggccgacctcattgccctcatggagaagcatggcattggtacggatgccactcatgcggagcacatcgagaccatcaaagcccggatgtacgtgggcctcaccccagacaagcggttcctccctgggcacctgggcatgggacttgtggaaggttatgattccatgggctatgaaatgtctaagcctgacctccgggctgaactggaagctgatctgaagctgatctgtgatggcaaaaaggacaaatttgtggttctaaggcagcaagtgcagaaatacaagcaggttttcattgaagcggtggctaaagcaaagaaattggacgaggccttggcccagtactttgggaatgggacagagttggcccagcaagaagatatctacccagccatgccagagcccatcaggaagtgcccacagtgcaacaaggacatggtccttaagaccaagaagaatggcgggttctacctcagctgcatgggtttcccagagtgtcgctcagctgtgtggcttcctgactcggtgctggaggccagcagggacagcagtgtgtgtccagtttgtcagccacaccctgtgtacaggttaaagttaaagtttaagcgcggtagccttcccccgaccatgcctctggagtttgtttgctgcatcggcggatgcgacgacaccctgagggagatcctggacctgagattttcagggggcccccccagggctagccagccctctggccgcctgcaggctaaccagtccctgaacaggatggacaacagccagcacccccagcctgctgacagcagacagactgggtcctcaaaggctctggcccagaccctcccaccacccacggctgctggtgaaagcaattctgtgacctgcaactgtggccaggaggctgtgctgctcactgtccgtaaggagggccccaaccggggccggcagttctttaagtgcaacggaggtagctgcaacttcttcctgtgggcagacagccccaatccgggagcaggagggcctcctgccttggcatatagacccctgggcgcctccctgggatgcccaccaggcccagggatccacctaggtgggtttggcaaccctggtgatggcagtggtagtggcacatcctgcctttgcagccagccctccgtcacacggactgtgcagaaggatggacccaacaaggggcgccagttccacacatgtgccaagccgagagagcagcagtgtggctttttccagtgggtcgatgagaacaccgctccagggacttctggagccccgtcctggacaggagacagaggaagaaccctggagtcggaagccagaagcaaaaggccccgggccagttcctcagacatggggtccacagcaaagaaaccccggaaatgcagcctttgccaccagcctggacacacccgtcccttttgtcctcagaacagat

SEQ ID NO: 191676 - DNA, 823 bp, Homo sapiens
  Payload ID: 17868
  Gene Name: topoisomerase (DNA) III alpha
  ENST ID: ENST00000461127
  CDS Start-End: 167-586
cacgggaaaggctcagtgactgaagctccaaaggccagcaggctggtggggacgtgaccgaagcgaggctctggttccctttcggtgggcgccatttgagcctcatctctggcttccccaggatgcgccggcagccggggagcggctccgggcgcgaggtctgaggatgatctttcctgtcgcccgctacgcgctccggtggctgcgacggcccgaagaccgtgccttttcccgcgccgccatggagatggccctccgaggcgtgcggaaagtcctctgtgtggccgaaaaaaacgacgcggccaaggggatcgccgacctgctgtcaaacggtcgcatgaggcggagagaaggactttcaaaattcaacaagatctatgaatttgattatcatctgtatggccagaatgttaccatggtaatgacttcagtttctggacatttactggctcatgatttccagatgcagtttcgaaaatggtcagtacaattctcaagggaaggactttcagattatagcagagctgcaaccctcttgtcctctttgaagcagaaattgaaaagtactgcccagagaattttgtagacatcaagaaaactttggaacgagagactcgccagtgccaggctctggtgatctggactgactgtgatagagaaggcgaaaacatcgggtttgagattatccacgtgtgtaaggctgtaaagcccaatctgcaggtgttgcgagcccgattctctgagatcacaccccatgccgtcaggacagcttgtgaaaacctgaccgagcctgatcagagggtgagcgatgctgtggatgtga

SEQ ID NO: 191677 - DNA, 575 bp, Homo sapiens
  Payload ID: 17868
  Gene Name: topoisomerase (DNA) III alpha
  ENST ID: ENST00000585031
  CDS Start-End: 197-484
ctggattcggtgctgaggcggcggctgcggcacgggaaaggctcagtgactgaagctccaaaggccagcaggctggtggggacgtgaccgaagcgaggctctggttccctttcggtgggcgccatttgagcctcatctctggcttccccaggatgcgccggcagccggggagcggctccgggcgcgaggtctgaggatgatctttcctgtcgcccgctacgcgctccggtggctgcgacggcccgaagaccgtgccttttcccgcgccgccatggagatggccctccgaggcgtgcggaaagtcctctgtgtggccgaaaaaaacgacgcggccaaggggatcgccgacctgctgtcaaacggtcgcatgaggcggagagaaggactttcaaaattcaacaagatctatgaatttgattatcatctgtatggccagaatgttaccatggctggagtgcagtggcacaatcttgactcattgtaacctccacctcccgggttcaagcgattctcctgcctcagactcccgagtagctgggactacagagctgcaaccctcttgtcctctttgaagc

SEQ ID NO: 191678 - DNA, 503 bp, Homo sapiens
  Payload ID: 17868
  Gene Name: topoisomerase (DNA) III alpha
  ENST ID: ENST00000493648
  CDS Start-End: 1-157
gacaggagacagaggaagaaccctggagtcggaagccagaagcaaaaggccccgggccagttcctcagacatggggtccacagcaaagaaaccccggaaatgcagcctttgccaccagcctggacacacccgtcccttttgtcctcagaacagatgagctcaggtggtggccatgttcccccgtttgccttcacaaaaaccttgtgaataatacaagccatatggactctgatttacagtttagaagatgagcagaggcaactgtgtgtctcaaaagcaaactgcaggattgggctgcaccatggactgggccaggcatctgagatcagacagacccaggctcagctcccacttcctggcctcttctgccaccctgggtgtgcagcctcatccttggagccccagttgcctcatccgtaatggggtgtccttgttcatattgaggctctctagtgaaggcttacggtcaggcacgactgcaaattaaagcttcacaaatcaaa

SEQ ID NO: 191679 - DNA, 582 bp, Homo sapiens
  Payload ID: 17868
  Gene Name: topoisomerase (DNA) III alpha
  ENST ID: ENST00000489131
  CDS Start-End: 1-76
agcaaagaaaccccggaaatgcagcctttgccaccagcctggacacacccgtcccttttgtcctcagaacagatgagctcaggtggtggccatgttcccccgtttgccttcacaaaaaccttgtgaataatacaagccatatggactctgatttacagtttagaagatgagcagaggtgggtgtgagttgcccagtcatgttgctagttgttgaagaaactaggattgttctcaggtcttgggctcctggcccatagaccagtggctctgtgttctgatggggtattggggaggatttttacaaatgcaggttcctgagattgttcctggaacatctccgagtgggtgtgggttgtggccctgcgtgtgtgattttgcctatcccagctccggggtaccaccaaccactttttgtctctgtgggtttacctactctggatattttgtttaaatggaatcataccaggctgggcacagtggctcacgcctgtaatcctagcactttgggaggccaaggtgggcagatcacctgaggtcaggagttcgagaccagcctgaccaatatgatgaaaccccgtctct

SEQ ID NO: 191680 - DNA, 553 bp, Homo sapiens
  Payload ID: 17868
  Gene Name: topoisomerase (DNA) III alpha
  ENST ID: ENST00000582122
  CDS Start-End: 1-402
tttgtggcccatggcctcatgattctggcccgaaactatctggatgtgtatccatatgatcactggagtgacaagatcctccctgtctatgagcaaggatcccactttcagcccagcaccgtggagatggtggacggggagaccagcccacccaagctgctcaccgaggccgacctcattgccctcatggagaagcatggcattggtcagtggctcctctgggtacggatgccactcatgcggagcacatcgagaccatcaaagcccggatgtacgtgggcctcaccccagacaagcggttcctccctgggcacctgggcatgggacttgtggaaggttatgattccatgggctatgaaatgtctaagcctgacctccgggctgaactggaagctgatctgaagctgatctgtgatggcaaaaaggacaaatttgtggttctaaggcagcaagtgcagaaatacaagcaggttttcattgaagcggtggctaaagcaaagaaattggacgaggccttggcccagtactttgggaatgggacagagttggccca

SEQ ID NO: 191681 - DNA, 766 bp, Homo sapiens
  Payload ID: 17868
  Gene Name: topoisomerase (DNA) III alpha
  ENST ID: ENST00000581536
  CDS Start-End: 1-490
cagttacggcagctgccagttccccacactgggctttgtggtggagcggttcaaagccattcaggcttttgtaccagaaatcttccacagaattaaagtaactcatgaccacaaagatggtatcgtagaattcaactggaaaaggcatcgactctttaaccacacggcttgcctagttctctatcagttgtgtgtggaggatcccatggcaactgtggtagaggtcagatctaagcccaagagcaagtggcggcctcaagccttggacactgtggagcttgagaagctggcttctcgaaagttgagaataaatgctaaagaaaccatgaggattgctgagaagctctacactcaaggggagatgaacagcgactgtacgagtttattgttcgccatttcctggcttgctgctcccaggatgctcaggggcaggagaccacagtggagatcgacatcgctcaggaacgctttgtggcccatggcctcatgattctggcccgaaactatctggatgtgtatccatatgatcactggagtgacaagatcctccctgtctatgagcaaggatcccactttcagcccagcaccgtggagatggtggacggggagaccagcccacccaagctgctcaccgaggccgacctcattgccctcatggagaagcatggcattggtacggatgccactcatgcggagcacatcgagaccatcaaagcccggatgtacgtgggcctcaccccagacaagcggttcctccctgggcacc

SEQ ID NO: 191682 - DNA, 2863 bp, Homo sapiens
  Payload ID: 17869
  Gene Name: topoisomerase (DNA) III beta
  Uniprot ID: O95985
  ENST ID: ENST00000357179
  CDS Start-End: 186-2774
gccagaagcggctggacccggaaataggggttgtcggtagccgccccgggaacaaggaccggagctggatccgcggtgcggctgtgggagtcagcattggtaatagtgctgtgctgcggaagagtggagtctaaactttttcattgccagtgccccgaaactggagtgtgaaggaccgagacaaaatgaagactgtgctcatggttgctgaaaagccgtccttggcacagtcaattgccaaaatcctctctagagggagcctgtcctcacacaaagggctgaacggggcctgctcagtccacgagtacactgggacctttgctggccagccagtgcgcttcaagatgacgtctgtctgtggtcacgtgatgaccctggatttcctgggaaaatacaacaaatgggacaaagtggaccccgcagaactgttcagccaagctcccacggagaagaaagaagctaaccccaagctgaacatggtgaagttcctgcaggtggagggcagaggctgcgactacatcgtgctgtggctggactgcgacaaggagggggagaacatctgctttgaggttcttgatgctgttctgcccgtcatgaacaaggcccatggtggcgagaagaccgtgttccgggccaggtttagctccatcacggacacagacatctgtaatgccatggcctgcctaggcgagcctgaccacaacgaggcgctctcagtggatgctcgccaggagctggacctgcgaatcggctgtgcattcaccaggtttcagactaaatatttccaggggaaatacggtgatttagacagctctctcatctcctttgggccgtgtcagactccaaccctgggattctgtgtggagagacatgataaaatccagtccttcaaaccagagacctactgggtgctgcaggccaaggttaacactgacaaagacagatctctccttttggactgggaccgagtaagagtgtttgaccgggagatcgcacagatgtttttaaacatgacaaagctggagaaggaagcccaggtggaggccacaagcaggaaagaaaaggccaagcagaggcccctggccctgaacactgtggagatgctgcgtgtggccagctcttctctgggcatggggccgcagcacgccatgcagacggctgagcggctctacacgcaaggctacatcagctacccacggacagagaccacccactaccctgagaactttgacctgaagggctctctgcggcagcaggccaaccacccctactgggccgacacggtgaagcggttgttagcagaaggtatcaaccgcccgcggaaaggccatgacgccggcgaccatccccccatcacccccatgaagtctgccacagaggccgaattagggggtgacgcgtggcggctctatgagtacatcaccagacacttcatcgccacggtcagccatgactgcaagtacctgcagagcaccatctccttcagaattgggcccgagctcttcacctgctccgggaagaccgtcctctcaccaggcttcacggaggtcatgccctggcagagcgtgcccctggaggagagcctgcccacttgccagcggggtgatgccttccctgtgggcgaggtgaagatgctggagaagcagacgaacccacccgactacctgacggaggccgagctcatcacgctcatggagaagcatggcatcggcacggatgccagcatccctgtgcatatcaacaacatctgccagcgcaactatgtcacggtggagagcgggcgccggctcaagcccaccaacctcggcatcgtcctggtgcacggctactataagattgatgcagagctggtgctccccaccatccgcagtgcagtggagaagcagctgaacctgatcgcccagggcaaggccgactaccgccaggtcctgggccacaccctggacgtgttcaagaggaagttccactactttgtcgactccattgctggcatggatgagttgatggaggtgtctttctcgcccctggcggccacaggcaagcccctctcacgctgtgggaagtgccaccgcttcatgaagtacatccaggccaagccaagccgcctgcactgctcccactgcgatgagacctacacgctcccccagaacggcaccatcaagctctacaaggagctccgctgccctctggatgacttcgagctggtcctgtggtcatcaggctctcggggcaagagctacccgctgtgcccctactgctacaaccacccacccttccgagacatgaagaaaggcatgggctgcaacgagtgtacgcacccctcctgccagcactcgctgagcatgctgggcatcggccagtgcgtggaatgtgagagcggggtgctggtgctggaccccacctcgggccccaagtggaaggtggcctgcaacaagtgcaacgtggtagcgcactgcttcgagaacgcccaccgcgtgcgggtgtccgccgacacctgcagtgtctgtgaggccgccttgcttgatgtggacttcaacaaggccaagtccccactcccgggcgatgagacgcagcacatgggctgcgtcttttgtgaccccgtcttccaggagctggtggagctgaagcatgcggcctcctgccaccccatgcaccgcggtggaccagggagaaggcagggtcgagggcggggccgggccaggaggccccctgggaagcccaaccccagacggcccaaggacaagatgtcagccctggccgcctactttgtatgatgaccctgtcctccctcacccaggctgcagtgccatgcagacacctcatggcacttcaaactattaaaatgcattttatcttatccaga

SEQ ID NO: 191683 - DNA, 3107 bp, Homo sapiens
  Payload ID: 17869
  Gene Name: topoisomerase (DNA) III beta
  Uniprot ID: O95985
  ENST ID: ENST00000398793
  CDS Start-End: 436-3024
ggatccgcggtgcggctgtgggtgagcggcgggctgcgggaccctcgcccggcggctcagaaaggcgggaagcgcacgcatttttctggcttgtttcctgaacgttggccggcggaggacccgcgagctcgggagagcgcccgggccgggctctgcattcttgttgcctcttccctggcgggggtgatactctcccgcggggcttgctgtgggggttcagggaggtggagatgggcccgccatgtgcctgcagggagcaggcgctgtggttaatacttttcttcttcgaaccctcccacagctctttagggtgagatctgctgtaccagtctcacaggagtcagcattggtaatagtgctgtgctgcggaagagtggagtctaaactttttcattgccagtgccccgaaactggagtgtgaaggaccgagacaaaatgaagactgtgctcatggttgctgaaaagccgtccttggcacagtcaattgccaaaatcctctctagagggagcctgtcctcacacaaagggctgaacggggcctgctcagtccacgagtacactgggacctttgctggccagccagtgcgcttcaagatgacgtctgtctgtggtcacgtgatgaccctggatttcctgggaaaatacaacaaatgggacaaagtggaccccgcagaactgttcagccaagctcccacggagaagaaagaagctaaccccaagctgaacatggtgaagttcctgcaggtggagggcagaggctgcgactacatcgtgctgtggctggactgcgacaaggagggggagaacatctgctttgaggttcttgatgctgttctgcccgtcatgaacaaggcccatggtggcgagaagaccgtgttccgggccaggtttagctccatcacggacacagacatctgtaatgccatggcctgcctaggcgagcctgaccacaacgaggcgctctcagtggatgctcgccaggagctggacctgcgaatcggctgtgcattcaccaggtttcagactaaatatttccaggggaaatacggtgatttagacagctctctcatctcctttgggccgtgtcagactccaaccctgggattctgtgtggagagacatgataaaatccagtccttcaaaccagagacctactgggtgctgcaggccaaggttaacactgacaaagacagatctctccttttggactgggaccgagtaagagtgtttgaccgggagatcgcacagatgtttttaaacatgacaaagctggagaaggaagcccaggtggaggccacaagcaggaaagaaaaggccaagcagaggcccctggccctgaacactgtggagatgctgcgtgtggccagctcttctctgggcatggggccgcagcacgccatgcagacggctgagcggctctacacgcaaggctacatcagctacccacggacagagaccacccactaccctgagaactttgacctgaagggctctctgcggcagcaggccaaccacccctactgggccgacacggtgaagcggttgttagcagaaggtatcaaccgcccgcggaaaggccatgacgccggcgaccatccccccatcacccccatgaagtctgccacagaggccgaattagggggtgacgcgtggcggctctatgagtacatcaccagacacttcatcgccacggtcagccatgactgcaagtacctgcagagcaccatctccttcagaattgggcccgagctcttcacctgctccgggaagaccgtcctctcaccaggcttcacggaggtcatgccctggcagagcgtgcccctggaggagagcctgcccacttgccagcggggtgatgccttccctgtgggcgaggtgaagatgctggagaagcagacgaacccacccgactacctgacggaggccgagctcatcacgctcatggagaagcatggcatcggcacggatgccagcatccctgtgcatatcaacaacatctgccagcgcaactatgtcacggtggagagcgggcgccggctcaagcccaccaacctcggcatcgtcctggtgcacggctactataagattgatgcagagctggtgctccccaccatccgcagtgcagtggagaagcagctgaacctgatcgcccagggcaaggccgactaccgccaggtcctgggccacaccctggacgtgttcaagaggaagttccactactttgtcgactccattgctggcatggatgagttgatggaggtgtctttctcgcccctggcggccacaggcaagcccctctcacgctgtgggaagtgccaccgcttcatgaagtacatccaggccaagccaagccgcctgcactgctcccactgcgatgagacctacacgctcccccagaacggcaccatcaagctctacaaggagctccgctgccctctggatgacttcgagctggtcctgtggtcatcaggctctcggggcaagagctacccgctgtgcccctactgctacaaccacccacccttccgagacatgaagaaaggcatgggctgcaacgagtgtacgcacccctcctgccagcactcgctgagcatgctgggcatcggccagtgcgtggaatgtgagagcggggtgctggtgctggaccccacctcgggccccaagtggaaggtggcctgcaacaagtgcaacgtggtagcgcactgcttcgagaacgcccaccgcgtgcgggtgtccgccgacacctgcagtgtctgtgaggccgccttgcttgatgtggacttcaacaaggccaagtccccactcccgggcgatgagacgcagcacatgggctgcgtcttttgtgaccccgtcttccaggagctggtggagctgaagcatgcggcctcctgccaccccatgcaccgcggtggaccagggagaaggcagggtcgagggcggggccgggccaggaggccccctgggaagcccaaccccagacggcccaaggacaagatgtcagccctggccgcctactttgtatgatgaccctgtcctccctcacccaggctgcagtgccatgcagacacctcatggcacttcaaactattaaaatgcattttatctta

SEQ ID NO: 191684 - DNA, 571 bp, Homo sapiens
  Payload ID: 17869
  Gene Name: topoisomerase (DNA) III beta
  ENST ID: ENST00000437103
  CDS Start-End: 446-571
ataggggttgtcggtagccgccccgggaacaaggaccggagctggatccgcggtgcggctgtgggtgagtccacctgtaggtggaagagccagtccagagaggagggccaggcatccacctggcctgacccatcactccagatccccaggccccagcatcttcctagcatggatttaggaataaaattgacctgagatcactggggccacttcaccttcccccaaatggagccacattcccaggatcatctcagccacttcagctgacctggtagttttttcttgtttttaatctcagatgtcttcaagtttccctaattccctaatttttcttcttcttgcctcaggagtcagcattggtaatagtgctgtgctgcggaagagtggagtctaaactttttcattgccagtgccccgaaactggagtgtgaaggaccgagacaaaatgaagactgtgctcatggttgctgaaaagccgtccttggcacagtcaattgccaaaatcctctctagagggagcctgtcctcacacaaagggctgaacggggcctgctcagtccacgagtacact

SEQ ID NO: 191685 - DNA, 400 bp, Homo sapiens
  Payload ID: 17869
  Gene Name: topoisomerase (DNA) III beta
  ENST ID: ENST00000442653
  CDS Start-End: 261-400
ttgtttttaatctcagatgtcttcaagtttccctaattccctaatttttcttcttcttgcctcaggttggtcttgttttttctttgttaaagtgattttccttgtagtggtgtaggttctattgacagcattgctatcctgagtgtcttttcttctctttaggagtcagcattggtaatagtgctgtgctgcggaagagtggagtctaaactttttcattgccagtgccccgaaactggagtgtgaaggaccgagacaaaatgaagactgtgctcatggttgctgaaaagccgtccttggcacagtcaattgccaaaatcctctctagagggagcctgtcctcacacaaagggctgaacggggcctgctcagtccacgagtacactgggacctttgctgg

SEQ ID NO: 191686 - DNA, 736 bp, Homo sapiens
  Payload ID: 17869
  Gene Name: topoisomerase (DNA) III beta
  ENST ID: ENST00000434517
  CDS Start-End: 673-736
ccccgggaacaaggaccggagctggatccgcggtgcggctgtgggtgagcggcgggctgcgggaccctcgcccggcggctcagaaaggcgggaagcgcacgcatttttctggcttgtttcctgaacgttggccggcggaggacccgcgagctcgggagagcgcccgggccgggctctgcattcttgttgcctcttccctggcgggggtgatactctcccgcggggcttgctgtgggggttcagggaggtggagatgggcccgccatgtgcctgcagggagcaggcgctgtggttaatacttttcttcttcgaaccctcccacagctctttagggtgagatctgctgtaccagtctcacaggtagggaaactgaggctcagggaagctgtgcagccaccggggcccagatcggtgcggtacacacccaggcagcttccactcgccgccccctaggccctggctgggttttgagggcacccaggttctctgacctgttatctgtaaatgaagtagggtacttttgtgaacaaattagctggaatccaggggcaataatttctcgcagaagtgaaaggagtcagcattggtaatagtgctgtgctgcggaagagtggagtctaaactttttcattgccagtgccccgaaactggagtgtgaaggaccgagacaaaatgaagactgtgctcatggttgctgaaaagccgtccttggcacagtcaattgccaaaatcctct

SEQ ID NO: 191687 - DNA, 824 bp, Homo sapiens
  Payload ID: 17869
  Gene Name: topoisomerase (DNA) III beta
  ENST ID: ENST00000424393
  CDS Start-End: 87-824
gtagccgccccgggaacaaggaccggagctggatccgcggtgcggctgtggtgccccgaaactggagtgtgaaggaccgagacaaaatgaagactgtgctcatggttgctgaaaagccgtccttggcacagtcaattgccaaaatcctctctagagggagcctgtcctcacacaaagggctgaacggggcctgctcagtccacgagtacactgggacctttgctggccagccagtgcgcttcaagatgacgtctgtctgtggtcacgtgatgaccctggatttcctgggaaaatacaacaaatgggacaaagtggaccccgcagaactgttcagccaagctcccacggagaagaaagaagctaaccccaagctgaacatggtgaagttcctgcaggtggagggcagaggctgcgactacatcgtgctgtggctggactgcgacaaggagggggagaacatctgctttgaggttcttgatgctgttctgcccgtcatgaacaaggcccatggtggcgagaagaccgtgttccgggccaggtttagctccatcacggacacagacatctgtaatgccatggcctgcctaggcgagcctgaccacaacgaggcgctctcagtggatgctcgccaggagctggacctgcgaatcggctgtgcattcaccaggtttcagactaaatatttccaggggaaatacggtgatttagacagctctctcatctcctttgggccgtgtcagactccaaccctgggattctgtgtggagagacatgataaaatccagtccttcaaaccagagacctactgggtgctgcaggccaag

SEQ ID NO: 191688 - DNA, 561 bp, Homo sapiens
  Payload ID: 17869
  Gene Name: topoisomerase (DNA) III beta
  ENST ID: ENST00000456075
  CDS Start-End: 379-561
aacaaggaccggagctggatccgcggtgcggctgtggctctttagggtgagatctgctgtaccagtctcacaggtgagtccacctgtaggtggaagagccagtccagagaggagggccaggcatccacctggcctgacccatcactccagatccccaggccccagcatcttcctagcatggatttaggaataaaattgacctgagatcactggggccacttcaccttcccccaaatggagccacattcccaggatcatctcagccacttcagctgacctggagtcagcattggtaatagtgctgtgctgcggaagagtggagtctaaactttttcattgccagtgccccgaaactggagtgtgaaggaccgagacaaaatgaagactgtgctcatggttgctgaaaagccgtccttggcacagtcaattgccaaaatcctctctagagggagcctgtcctcacacaaagggctgaacggggcctgctcagtccacgagtacactgggacctttgctggccagccagtgcgcttcaagatgacgtctgtctgtggtcacgtg

SEQ ID NO: 191689 - DNA, 4163 bp, Homo sapiens
  Payload ID: 17869
  Gene Name: topoisomerase (DNA) III beta
  ENST ID: ENST00000444502
  CDS Start-End: 160-549
ggggttgtcggtagccgccccgggaacaaggaccggagctggatccgcggtgcggctgtgggagtcagcattggtaatagtgctgtgctgcggaagagtggagtctaaactttttcattgccagtgccccgaaactggagtgtgaaggaccgagacaaaatgaagactgtgctcatggttgctgaaaagccgtccttggcacagtcaattgccaaaatcctctctagagggagcctgtcctcacacaaagggctgaacggggcctgctcagtccacgagtacactgggacctttgctggccagccagtgcgcttcaagatgacgtctgtctgtggtcacgtgatgaccctggatttcctgggaaaatacaacaaatgggacaaagtggaccccgcagaactgttcagccaagctcccacggagaagaaagaagctaaccccaagctgaacatggtgaagttcctgcaggtggagggcagaggctgcgactacatcgtgctgtggctggactgcgacaaggagggggagaacatctgctttgagaaatgaagccacttattcccagtaaggaagctgcgtggccaggctccggcggcgaccctagtcccactgcacggccttcctagttcttgatgctgttctgcccgtcatgaacaaggcccatggtggcgagaagaccgtgttccgggccaggtttagctccatcacggacacagacatctgtaatgccatggcctgcctaggcgagcctgaccacaacgaggcgctctcagtggatgctcgccaggagctggacctgcgaatcggctgtgcattcaccaggtttcagactaaatatttccaggggaaatacggtgatttagacagctctctcatctcctttgggccgtgtcagactccaaccctgggattctgtgtggagagacatgataaaatccagtccttcaaaccagagacctactgggtgctgcaggccaaggttaacactgacaaagacagatctctccttttggactgggaccgagtaagagtgtttgaccgggagatcgcacagatgtttttaaacatgacaaagctggagaaggaagcccaggtggaggccacaagcaggaaagaaaaggccaagcagaggcccctggccctgaacactgtggagatgctgcgtgtggccagctcttctctgggcatggggccgcagcacgccatgcagacggctgagcggctctacacgcaaggctacatcagctacccacggacagagaccacccactaccctgagaactttgacctgaagggctctctgcggcagcaggccaaccacccctactgggccgacacggtgaagcggttgttagcagaaggtatcaaccgcccgcggaaaggccatgacgccggcgaccatccccccatcacccccatgaagtctgccacagaggccgaattagggggtgacgcgtggcggctctatgagtacatcaccagacacttcatcgccacggtcagccatgactgcaagtacctgcagagcaccatctccttcagaattgggcccgagctcttcacctgctccgggaagaccgtcctctcaccaggcttcacggaggtcatgccctggcagagcgtgcccctggaggagagcctgcccacttgccagcggggtgatgccttccctgtgggcgaggtgaagatgctggagaagcagacgaacccacccgactacctgacggaggccgagctcatcacgctcatggagaagcatggcatcggcacggatgccagcatccctgtgcatatcaacaacatctgccagcgcaactatgtcacggtggagagcgggcgccggctcaagcccaccaacctcggcatcgtcctggtgcacggctactataagattgatgcagagctggtgctccccaccatccgcagtgcagtggagaagcagctgaacctgatcgcccagggcaaggccgactaccgccaggtcctgggccacaccctggacgtgttcaagaggaagttccactactttgtcgactccattgctggtagagtctgcctctggcctgcccctcaccagaggggtgtctctctgtcagcaaggccagtacctggggacccaggtccccacgtgggaccagctcccagatctgggcttcaggcctccgtaggccaggtcagtgacacctcctggctgggttgaaagagcaggtgcattaacaccacacatggccaggaacacgtgcctctgacgcacagggctgctgccctgccgtgctgccaggacagtagaaaccaccgcctatagggaccctttcacactcagacccttgaccacgtgttgcggagccttttgctggggactgggagggagatgactcctgcactctgcttgcccgcaggcatggatgagttgatggaggtgtctttctcgcccctggcggccacaggcaagcccctctcacgctgtgggaagtgccaccgcttcatgaagtacatccaggccaagccaagccgcctgcactgctcccactgcgatgagacctacacgctcccccagaacggcaccatcaagctctacaaggagctccgctgccctctggatgacttcgagctggtcctgtggtcatcaggctctcggggcaagagctacccgctgtgcccctactgctacaaccacccacccttccgagacatgaagaaaggtgagtgcagccactccctcctgtccacaggtagctgcagtctcttttcagtgccaacccctgccttgcaccaggctggactctgaggggacccctcaccctggcctttcctgcactcattggcactgagacgagagaccctggatgtagctggggcactgcttaggcctcagccagtggtgccaccctctctctgtgtcagaatcgagcaggcaaccctagtccaccctcaggacctgggcacaggtgtgcagtgctccctctggagctgagtgagcaagaggatgcagcagtcgggggacccacccggtgagcgggcacccccagtcagcgtccaccaccgtcctccatcctcatcctcgtcctcattactggaggagggagcgcatgtccaggcaggcaggacagagcaccgagccagaccaggaatcagcgggagtgaggcatctgcccacattcaccgtgtgctctgcagaaagctccctcaggcctcagtctgcacccaggctgccccgggagtgagaccccatccctgccctcctgctgccgccagagtagctgacagggtggttccatgtggcccagtgacatgagggtcatgtggcattaccagtaacaagctggcagcaaagcaaaggggggatggagtcagctgaaacccactgggatggtgccagcgaggggccttgaaagttgaggaggtttcaggtaagcagaaaacaggggtaatggcagccaggagccgaaacatgagcaaggctgtccccaagagcaaggccaagaagagttccttctgctgggacgagggatccaggagcttgaggcattgggagcaggcagcagagggcaggtgggcacagtgggcgtgcctttacagggctcccttctcccgccaggcatgggctgcaacgagtgtacgcacccctcctgccagcactcgctgagcatgctgggcatcggccagtgcgtggaatgtgagagcggggtgctggtgctggaccccacctcgggccccaagtggaaggtggcctgcaacaagtgcaacgtggtagcgcactgcttcgagaacgcccaccgcgtgcgggtgtccgccgacacctgcagtgtctgtgaggccgccttgcttgatgtggacttcaacaaggccaagtccccactcccgggcgatgagacgcagcacatgggctgcgtcttttgtgaccccgtcttccaggagctggtggagctgaagcatgcggcctcctgccaccccatgcaccgcggtggaccagggagaaggcagggtcgagggcggggccgggccaggaggccccctgggaagcccaaccccagacggcccaaggacaagatgtcagccctggccgcctactttgtatgatgaccctgtcctccctcacccaggctgcagtgccatgcagacacctcatggcacttcaaactattaaaatgcattttatctta

SEQ ID NO: 191690 - DNA, 3061 bp, Homo sapiens
  Payload ID: 17869
  Gene Name: topoisomerase (DNA) III beta
  ENST ID: ENST00000457179
  CDS Start-End: 160-549
ggggttgtcggtagccgccccgggaacaaggaccggagctggatccgcggtgcggctgtgggagtcagcattggtaatagtgctgtgctgcggaagagtggagtctaaactttttcattgccagtgccccgaaactggagtgtgaaggaccgagacaaaatgaagactgtgctcatggttgctgaaaagccgtccttggcacagtcaattgccaaaatcctctctagagggagcctgtcctcacacaaagggctgaacggggcctgctcagtccacgagtacactgggacctttgctggccagccagtgcgcttcaagatgacgtctgtctgtggtcacgtgatgaccctggatttcctgggaaaatacaacaaatgggacaaagtggaccccgcagaactgttcagccaagctcccacggagaagaaagaagctaaccccaagctgaacatggtgaagttcctgcaggtggagggcagaggctgcgactacatcgtgctgtggctggactgcgacaaggagggggagaacatctgctttgagaaatgaagccacttattcccagtaaggaagctgcgtggccaggctccggcggcgaccctagtcccactgcacggccttcctagttcttgatgctgttctgcccgtcatgaacaaggcccatggtggcgagaagaccgtgttccgggccaggtttagctccatcacggacacagacatctgtaatgccatggcctgcctaggcgagcctgaccacaacgaggcgctctcagtggatgctcgccaggagctggacctgcgaatcggctgtgcattcaccaggtttcagactaaatatttccaggggaaatacggtgatttagacagctctctcatctcctttgggccgtgtcagactccaaccctgggattctgtgtggagagacatgataaaatccagtccttcaaaccagagacctactgggtgctgcaggccaaggttaacactgacaaagacagatctctccttttggactgggaccgagtaagagtgtttgaccgggagatcgcacagatgtttttaaacatgacaaagctggagaaggaagcccaggtggaggccacaagcaggaaagaaaaggccaagcagaggcccctggccctgaacactgtggagatgctgcgtgtggccagctcttctctgggcatggggccgcagcacgccatgcagacggctgagcggctctacacgcaaggctacatcagctacccacggacagagaccacccactaccctgagaactttgacctgaagggctctctgcggcagcaggccaaccacccctactgggccgacacggtgaagcggttgttagcagaaggtatcaaccgcccgcggaaaggccatgacgccggcgaccatccccccatcacccccatgaagtctgccacagaggccgaattagggggtgacgcgtggcggctctatgagtacatcaccagacacttcatcgccacggtcagccatgactgcaagtacctgcagagcaccatctccttcagaattgggcccgagctcttcacctgctccgggaagaccgtcctctcaccaggtcacaccacgggcccagccttcctcctctgtgccttcatgggcagacaaacattctacatcgtgtctggggatgggaggcccagggtctgaggccccggccacccaggctggggaccctgagtggcggcgcatatctctccaggcttcacggaggtcatgccctggcagagcgtgcccctggaggagagcctgcccacttgccagcggggtgatgccttccctgtgggcgaggtgaagatgctggagaagcagacgaacccacccgactacctgacggaggccgagctcatcacgctcatggagaagcatggcatcggcacggatgccagcatccctgtgcatatcaacaacatctgccagcgcaactatgtcacggtggagagcgggcgccggctcaagcccaccaacctcggcatcgtcctggtgcacggctactataagattgatgcagagctggtgctccccaccatccgcagtgcagtggagaagcagctgaacctgatcgcccagggcaaggccgactaccgccaggtcctgggccacaccctggacgtgttcaagaggaagttccactactttgtcgactccattgctggcatggatgagttgatggaggtgtctttctcgcccctggcggccacaggcaagcccctctcacgctgtgggaagtgccaccgcttcatgaagtacatccaggccaagccaagccgcctgcactgctcccactgcgatgagacctacacgctcccccagaacggcaccatcaagctctacaaggagctccgctgccctctggatgacttcgagctggtcctgtggtcatcaggctctcggggcaagagctacccgctgtgcccctactgctacaaccacccacccttccgagacatgaagaaaggcatgggctgcaacgagtgtacgcacccctcctgccagcactcgctgagcatgctgggcatcggccagtgcgtggaatgtgagagcggggtgctggtgctggaccccacctcgggccccaagtggaaggtggcctgcaacaagtgcaacgtggtagcgcactgcttcgagaacgcccaccgcgtgcgggtgtccgccgacacctgcagtgtctgtgaggccgccttgcttgatgtggacttcaacaaggccaagtccccactcccgggcgatgagacgcagcacatgggctgcgtcttttgtgaccccgtcttccaggagctggtggagctgaagcatgcggcctcctgccaccccatgcaccgcggtggaccagggagaaggcagggtcgagggcggggccgggccaggaggccccctgggaagcccaaccccagacggcccaaggacaagatgtcagccctggccgcctactttgtatgatgaccctgtcctccctcacccaggctgcagtgccatgcagacacctcatggcacttcaaactattaaaatgcattttatcttatcca

SEQ ID NO: 191691 - DNA, 550 bp, Homo sapiens
  Payload ID: 17869
  Gene Name: topoisomerase (DNA) III beta
  ENST ID: ENST00000437929
  CDS Start-End: 185-550
aacaaggaccggagctggatccgcggtgcggctgtggatgtcttcaagtttccctaattccctaatttttcttcttcttgcctcaggagtcagcattggtaatagtgctgtgctgcggaagagtggagtctaaactttttcattgccagtgccccgaaactggagtgtgaaggaccgagacaaaatgaagactgtgctcatggttgctgaaaagccgtccttggcacagtcaattgccaaaatcctctctagagggagcctgtcctcacacaaagggctgaacggggcctgctcagtccacgagtacactgggacctttgctggccagccagtgcgcttcaagatgacgtctgtctgtggtcacgtgatgaccctggatttcctgggaaaatacaacaaatgggacaaagtggaccccgcagaactgttcagccaagctcccacggagaagaaagaagctaaccccaagctgaacatggtgaagttcctgcaggtggagggcagaggctgcgactacatcgtgctgtggctggactgcgacaaggagggg

SEQ ID NO: 191692 - DNA, 543 bp, Homo sapiens
  Payload ID: 17869
  Gene Name: topoisomerase (DNA) III beta
  ENST ID: ENST00000449704
  CDS Start-End: 364-543
gttgtcggtagccgccccgggaacaaggaccggagctggatccgcggtgcggctgtgggtgagtccacctgtaggtggaagagccagtccagagaggagggccaggcatccacctggcctgacccatcactccagatccccaggccccagcatcttcctagcatggatttaggaataaaattgacctgagatcactggggccacttcaccttcccccaaatggagccacattcccaggatcatctcagccacttcagctgacctggagtcagcattggtaatagtgctgtgctgcggaagagtggagtctaaactttttcattgccagtgccccgaaactggagtgtgaaggaccgagacaaaatgaagactgtgctcatggttgctgaaaagccgtccttggcacagtcaattgccaaaatcctctctagagggagcctgtcctcacacaaagggctgaacggggcctgctcagtccacgagtacactgggacctttgctggccagccagtgcgcttcaagatgacgtctgtctgtggtcac

SEQ ID NO: 191693 - DNA, 2956 bp, Homo sapiens
  Payload ID: 17869
  Gene Name: topoisomerase (DNA) III beta
  ENST ID: ENST00000457270
  CDS Start-End: 1-1577
atttagacagctctctcatctcctttgggccgtgtcagactccaaccctgggattctgtgtggagagacatgataaaatccagtccttcaaaccagagacctactgggtgctgcaggccaaggttaacactgacaaagacagatctctccttttggactgggaccgagtaagagtgtttgaccgggagatcgcacagatgtttttaaacatgacaaagctggagaaggaagcccaggtggaggccacaagcaggaaagaaaaggccaagcagaggcccctggccctgaacactgtggagatgctgcgtgtggccagctcttctctgggcatggggccgcagcacgccatgcagacggctgagcggctctacacgcaaggctacatcagctacccacggacagagaccacccactaccctgagaactttgacctgaagggctctctgcggcagcaggccaaccacccctactgggccgacacggtgaagcggttgttagcagaaggtatcaaccgcccgcggaaaggccatgacgccggcgaccatccccccatcacccccatgaagtctgccacagaggccgaattagggggtgacgcgtggcggctctatgagtacatcaccagacacttcatcgccacggtcagccatgactgcaagtacctgcagagcaccatctccttcagaattgggcccgagctcttcacctgctccgggaagaccgtcctctcaccaggcttcacggaggtcatgccctggcagagcgtgcccctggaggagagcctgcccacttgccagcggggtgatgccttccctgtgggcgaggtgaagatgctggagaagcagacgaacccacccgactacctgacggaggccgagctcatcacgctcatggagaagcatggcatcggcacggatgccagcatccctgtgcatatcaacaacatctgccagcgcaactatgtcacggtggagagcgggcgccggctcaagcccaccaacctcggcatcgtcctggtgcacggctactataagattgatgcagagctggtgctccccaccatccgcagtgcagtggagaagcagctgaacctgatcgcccagggcaaggccgactaccgccaggtcctgggccacaccctggacgtgttcaagaggaagttccactactttgtcgactccattgctggcatggatgagttgatggaggtgtctttctcgcccctggcggccacaggcaagcccctctcacgctgtgggaagtgccaccgcttcatgaagtacatccaggccaagccaagccgcctgcactgctcccactgcgatgagacctacacgctcccccagaacggcaccatcaagctctacaaggagctccgctgccctctggatgacttcgagctggtcctgtggtcatcaggctctcggggcaagagctacccgctgtgcccctactgctacaaccacccacccttccgagacatgaagaaaggtgagtgcagccactccctcctgtccacaggtagctgcagtctcttttcagtgccaacccctgccttgcaccaggctggactctgaggggacccctcaccctggcctttcctgcactcattggcactgagacgagagaccctggatgtagctggggcactgcttaggcctcagccagtggtgccaccctctctctgtgtcagaatcgagcaggcaaccctagtccaccctcaggacctgggcacaggtgtgcagtgctccctctggagctgagtgagcaagaggatgcagcagtcgggggacccacccggtgagcgggcacccccagtcagcgtccaccaccgtcctccatcctcatcctcgtcctcattactggaggagggagcgcatgtccaggcaggcaggacagagcaccgagccagaccaggaatcagcgggagtgaggcatctgcccacattcaccgtgtgctctgcagaaagctccctcaggcctcagtctgcacccaggctgccccgggagtgagaccccatccctgccctcctgctgccgccagagtagctgacagggtggttccatgtggcccagtgacatgagggtcatgtggcattaccagtaacaagctggcagcaaagcaaaggggggatggagtcagctgaaacccactgggatggtgccagcgaggggccttgaaagttgaggaggtttcaggtaagcagaaaacaggggtaatggcagccaggagccgaaacatgagcaaggctgtccccaagagcaaggccaagaagagttccttctgctgggacgagggatccaggagcttgaggcattgggagcaggcagcagagggcaggtgggcacagtgggcgtgcctttacagggctcccttctcccgccaggcatgggctgcaacgagtgtacgcacccctcctgccagcactcgctgagcatgctgggcatcggccagtgcgtggaatgtgagagcggggtgctggtgctggaccccacctcgggccccaagtggaaggtggcctgcaacaagtgcaacgtggtagcgcactgcttcgagaacgcccaccgcgtgcgggtgtccgccgacacctgcagtgtctgtgaggccgccttgcttgatgtggacttcaacaaggccaagtccccactcccgggcgatgagacgcagcacatgggctgcgtcttttgtgaccccgtcttccaggagctggtggagctgaagcatgcggcctcctgccaccccatgcaccgcggtggaccagggagaaggcagggtcgagggcggggccgggccaggaggccccctgggaagcccaaccccagacggcccaaggacaagatgtcagccctggccgcctactttgtatgatgaccctgtcctccctcacccaggctgcagtgccatgcagacacctcatggcacttcaaactattaaaatgcattttatcttatcca

SEQ ID NO: 191694 - DNA, 582 bp, Homo sapiens
  Payload ID: 17869
  Gene Name: topoisomerase (DNA) III beta
  ENST ID: ENST00000430142
  CDS Start-End: 219-582
agaagcggctggacccggaaataggggttgtcggtagccgccccgggaacaaggaccggagctggatccgcggtgcggctgtggctctttagggtgagatctgctgtaccagtctcacaggagtcagcattggtaatagtgctgtgctgcggaagagtggagtctaaactttttcattgccagtgccccgaaactggagtgtgaaggaccgagacaaaatgaagactgtgctcatggttgctgaaaagccgtccttggcacagtcaattgccaaaatcctctctagagggagcctgtcctcacacaaagggctgaacggggcctgctcagtccacgagtacactgggacctttgctggccagccagtgcgcttcaagatgacgtctgtctgtggtcacgtgatgaccctggatttcctgggaaaatacaacaaatgggacaaagtggaccccgcagaactgttcagccaagctcccacggagaagaaagaagctaaccccaagctgaacatggtgaagttcctgcaggtggagggcagaggctgcgactacatcgtgctgtggctggactgcgacaaggagg

SEQ ID NO: 191695 - DNA, 2890 bp, Homo sapiens
  Payload ID: 17869
  Gene Name: topoisomerase (DNA) III beta
  ENST ID: ENST00000436282
  CDS Start-End: 1-507
atcgcacagatgtttttaaacatgacaaagctggagaaggaagcccaggtggaggccacaagcaggaaagaaaaggccaagcagaggcccctggccctgaacactgtggagatgctgcgtgtggccagctcttctctgggcatggggccgcagcacgccatgcagacggctgagcggctctacacgcaaggctacatcagctacccacggacagagaccacccactaccctgagaactttgacctgaagggctctctgcggcagcaggccaaccacccctactgggccgacacggtgaagcggttgttagcagaaggtatcaaccgcccgcggaaaggccatgacgccggcgaccatccccccatcacccccatgaagtctgccacagaggccgaattaggatttgcagtgtgtcctgcacagcggctctgtaagcaggagcttgctgctcgagcgagagtactgggggctcctcacggccagagcccccagctggctcccaactgactagccctggcctgttgcagggggtgacgcgtggcggctctatgagtacatcaccagacacttcatcgccacggtcagccatgactgcaagtacctgcagagcaccatctccttcagaattgggcccgagctcttcacctgctccgggaagaccgtcctctcaccaggcttcacggaggtcatgccctggcagagcgtgcccctggaggagagcctgcccacttgccagcggggtgatgccttccctgtgggcgaggtgaagatgctggagaagcagacgaacccacccgactacctgacggaggccgagctcatcacgctcatggagaagcatggcatcggcacggatgccagcatccctgtgcatatcaacaacatctgccagcgcaactatgtcacggtggagagcgggcgccggctcaagcccaccaacctcggcatcgtcctggtgcacggctactataagattgatgcagagctggtgctccccaccatccgcagtgcagtggagaagcagctgaacctgatcgcccagggcaaggccgactaccgccaggtcctgggccacaccctggacgtgttcaagaggaagttccactactttgtcgactccattgctggcatggatgagttgatggaggtgtctttctcgcccctggcggccacaggcaagcccctctcacgctgtgggaagtgccaccgcttcatgaagtacatccaggccaagccaagccgcctgcactgctcccactgcgatgagacctacacgctcccccagaacggcaccatcaagctctacaaggagctccgctgccctctggatgacttcgagctggtcctgtggtcatcaggctctcggggcaagagctacccgctgtgcccctactgctacaaccacccacccttccgagacatgaagaaaggtgagtgcagccactccctcctgtccacaggtagctgcagtctcttttcagtgccaacccctgccttgcaccaggctggactctgaggggacccctcaccctggcctttcctgcactcattggcactgagacgagagaccctggatgtagctggggcactgcttaggcctcagccagtggtgccaccctctctctgtgtcagaatcgagcaggcaaccctagtccaccctcaggacctgggcacaggtgtgcagtgctccctctggagctgagtgagcaagaggatgcagcagtcgggggacccacccggtgagcgggcacccccagtcagcgtccaccaccgtcctccatcctcatcctcgtcctcattactggaggagggagcgcatgtccaggcaggcaggacagagcaccgagccagaccaggaatcagcgggagtgaggcatctgcccacattcaccgtgtgctctgcagaaagctccctcaggcctcagtctgcacccaggctgccccgggagtgagaccccatccctgccctcctgctgccgccagagtagctgacagggtggttccatgtggcccagtgacatgagggtcatgtggcattaccagtaacaagctggcagcaaagcaaaggggggatggagtcagctgaaacccactgggatggtgccagcgaggggccttgaaagttgaggaggtttcaggtaagcagaaaacaggggtaatggcagccaggagccgaaacatgagcaaggctgtccccaagagcaaggccaagaagagttccttctgctgggacgagggatccaggagcttgaggcattgggagcaggcagcagagggcaggtgggcacagtgggcgtgcctttacagggctcccttctcccgccaggcatgggctgcaacgagtgtacgcacccctcctgccagcactcgctgagcatgctgggcatcggccagtgcgtggaatgtgagagcggggtgctggtgctggaccccacctcgggccccaagtggaaggtggcctgcaacaagtgcaacgtggtagcgcactgcttcgagaacgcccaccgcgtgcgggtgtccgccgacacctgcagtgtctgtgaggccgccttgcttgatgtggacttcaacaaggccaagtccccactcccgggcgatgagacgcagcacatgggctgcgtcttttgtgaccccgtcttccaggagctggtggagctgaagcatgcggcctcctgccaccccatgcaccgcggtggaccagggagaaggcagggtcgagggcggggccgggccaggaggccccctgggaagcccaaccccagacggcccaaggacaagatgtcagccctggccgcctactttgtatgatgaccctgtcctccctcacccaggctgcagtgccatgcagacacctcatggcacttcaaactattaaaatgcattttatctt

SEQ ID NO: 191696 - DNA, 4098 bp, Homo sapiens
  Payload ID: 17870
  Gene Name: topoisomerase I binding, arginine/serine-rich, E3 ubiquitin protein ligase
  Uniprot ID: Q9NS56
  ENST ID: ENST00000360538
  CDS Start-End: 118-3255
tgaagaaatagggcctttccgcctgcgggcccagtgagtcgacacggtgggggcccgcgatccccgggacttaccactgaataaatccagtccagcgtgcgacgacttactggcttcatggggtcgcagccgccgctggggtctccgctgtctcgcgaggagggtgaagcgcccccgcctgctcccgcttcggagggtaggcggagaagtcgccgggtacgccttcgcggatcctgccgacaccgacctagctttctgggctgccgggagctcgcggcgagcgccccagccaggcctgcgccggcatcctccgagataatggcatcagctgctaaggaatttaaaatggacaacttttcacctaaagctggcactagcaaattgcaacagacagtaccagctgatgcatctcctgattctaagtgtcctatatgcttggatagatttgataatgtgtcttacttagatcgctgcttacataagttctgttttcgctgtgtacaggagtggtcaaaaaacaaagctgaatgcccactatgtaaacagccctttgattctattttccattctgtgagggcagaagatgacttcaaggagtatgtcctaaggccttcgtataatggttcttttgtcacccctgatcgacgatttcgctaccgtacaactctgacaagggaacgaaatgcttctgtgtattcacctagtggtcctgtgaacagaagaacaacaactccaccggatagtggagtactgtttgaagggttaggcatttcaacaagacctagagatgttgaaattcctcagtttatgagacagattgcagtaaggaggccaactacggcagatgaaagatctttgcggaaaattcaagaacaagatattattaattttagacgaactctttatcgtgctggtgctcgagttagaaatattgaagatggtggccgctacagggatatttcagctgaatttttccgtagaaatccagcttgccttcacagattagtcccctggttaaaacgtgaacttacagttctttttggagctcatggatctttagtgaatattgtccagcatattatcatgagtaatgttactcgctatgacttggagagtcaggcatttgtgtctgatttaagaccatttttacttaatcgaactgagcattttatacatgaatttatcagttttgcccgatctccttttaacatggcagcctttgaccagcatgccaattatgattgccctgctccttcatacgaagaaggcagccattctgattcttcagtcataacaatatctccagatgaggctgagacccaagagctggatattaatgtagccactgttagtcaggcaccatgggatgatgaaactccaggaccatcttactcaagctcagagcaggtacacgttactatgtcttctcttttaaatacttctgacagttcagatgaagaacttgtcacaggaggagccacgtctcagatacaaggagtacaaaccaatgacgacctaaataatgacagtgatgattcttcagataattgtgtcattgttgggtttgttaaaccactagctgagaggaccccagaacttgttgaactgtcctctgattctgaggacttaggttcttatgagaaaatggagacagtgaagacacaagaacaggagcaatcttacagttctggtgatagcgatgttagtagatgctcatctccacactctgtccttggaaaggatgaacaaataaataaaggtcattgtgattctagtacaagaatcaaatcaaagaaggaagagaaacgatctacatcattgtcatctcccagaaacctgaactcatctgtaagaggagacagagtatattctccatataaccatagacacagaaagaggggaagatcaagaagttcagattcacgttctcagagtagaagtgggcatgatcagaagaatcatagaaagcatcatgggaagaaaagaatgaaaagtaaacgatccagaagcagggaaagtagcagacctagagggagaagagacaaaaagagatcaagaactagagatagcagttggtccagaagaagccaaactctgtctctaagtagtgaaagcacaagcagatcaaggtctcgtagcagtgatcatggtaaaagaagatcacggagcagaaatagagatcgttattatttaagaaataattatggaagcagatacaaatgggagtatacttattacagtagaaacaaggacagggatgggtacgaatcatcttacaggaggaggactctgtccagagctcattattctagacagtcttcaagtccagaatttagagttcagtccttttctgaaagaacaaatgctaggaaaaaaaataatcacagtgagaggaagtattactactatgaaaggcacagatcaaggagcctgtctagtaacagatcaaggactgcatctaccgggactgaccgggtgagaaatgaaaagcctggagggaaacgaaaatacaaaacacggcatttggagggtactaacgaagtggctcagccatctcgtgaatttgcttctaaagcaaaggacagtcattaccaaaaatcttcatcaaaattggatggaaactacaaaaatgagagtgataccttttcagacagccgatcatcagacagagagacaaaacacaaaaggagaaaaaggaagacccggagcctaagtgtagagatagtttatgaaggaaaagctactgatacaactaaacaccataaaaagaaaaagaagaaacataagaagaagcataagaaacaccatggagataatgcttcacgttccccagttgtaattaccattgacagtgacagtgataaggattctgaagtaaaggaggatacagaatgtgacaatagtggtcctcaagaccctctacaaaatgagtttttggctccttccttggaaccatttgaaactaaagatgtagttacaatagaagctgaatttggtgtgctggacaaggaatgtgatattgccacacttagtaacaacttgaataatgccaacaaaactgtagataatattccacctctggcagcttcagttgaacaaactctcgatgtaagagaagagagcacctttgtttctgatttggagaaccagcccagtaacattgtgtctcttcaaactgagccatcaaggcaattgccatcgccacggacatcattaatgtcagtatgtcttggtagagactgtgatatgtcttaaaactgccaaagcatttcattgagaattatgatgttataaaaaggaaaaaggaagaatgtcgtctactgcagtctatttaaagatgacatttggtgaaaactctcttcctccttacaatattttaaatgattttttttttggtgttaatttgtaaaaatcattatttgttcaaaatgtatgtcccaccctcaaagatatgcacttttaagtgaagaaaatgatactgctagcagcttatttaaaacttggggtcctttttaaataagaaaaattatataaattttagaagttatttcataaagccatacggtattgacatatttttaaggtagtcaatgagtatttttgaattttttttttttgagagttattctggaaatgtgttataagctaggagaatccctttggacagtctttatttttcttcttaaaaatttatatgattcaaaaccatttcttcaggttaaattgaggcattttaatctgcacagtttatcttctgccaaaataaaaatttactatttcctttatatacttgtttatctggactgccagtaaaacaaatgtgtattcaacaaaagaaaaaaaataaaacagtaacactttaaaacaagaatcagacattttcctatgcagtatttttttttaaagtttattttagtaaagttaaaatcttgaaagtagctaagggcataattatgtcataaatactgaacttcaggtgaacaaatactttatagttttaattattttctttgattttgaggagtatcttatttgctttctatcatcagtaaaaacagcatttaacttgctaaataaacatgaaaaacccttgtcata

SEQ ID NO: 191697 - DNA, 3621 bp, Homo sapiens
  Payload ID: 17870
  Gene Name: topoisomerase I binding, arginine/serine-rich, E3 ubiquitin protein ligase
  Uniprot ID: Q9NS56
  ENST ID: ENST00000379858
  CDS Start-End: 118-3060
tgaagaaatagggcctttccgcctgcgggcccagtgagtcgacacggtgggggcccgcgatccccgggacttaccactgaataaatccagtccagcgtgcgacgacttactggcttcatgataatggcatcagctgctaaggaatttaaaatggacaacttttcacctaaagctggcactagcaaattgcaacagacagtaccagctgatgcatctcctgattctaagtgtcctatatgcttggatagatttgataatgtgtcttacttagatcgctgcttacataagttctgttttcgctgtgtacaggagtggtcaaaaaacaaagctgaatgcccactatgtaaacagccctttgattctattttccattctgtgagggcagaagatgacttcaaggagtatgtcctaaggccttcgtataatggttcttttgtcacccctgatcgacgatttcgctaccgtacaactctgacaagggaacgaaatgcttctgtgtattcacctagtggtcctgtgaacagaagaacaacaactccaccggatagtggagtactgtttgaagggttaggcatttcaacaagacctagagatgttgaaattcctcagtttatgagacagattgcagtaaggaggccaactacggcagatgaaagatctttgcggaaaattcaagaacaagatattattaattttagacgaactctttatcgtgctggtgctcgagttagaaatattgaagatggtggccgctacagggatatttcagctgaatttttccgtagaaatccagcttgccttcacagattagtcccctggttaaaacgtgaacttacagttctttttggagctcatggatctttagtgaatattgtccagcatattatcatgagtaatgttactcgctatgacttggagagtcaggcatttgtgtctgatttaagaccatttttacttaatcgaactgagcattttatacatgaatttatcagttttgcccgatctccttttaacatggcagcctttgaccagcatgccaattatgattgccctgctccttcatacgaagaaggcagccattctgattcttcagtcataacaatatctccagatgaggctgagacccaagagctggatattaatgtagccactgttagtcaggcaccatgggatgatgaaactccaggaccatcttactcaagctcagagcaggtacacgttactatgtcttctcttttaaatacttctgacagttcagatgaagaacttgtcacaggaggagccacgtctcagatacaaggagtacaaaccaatgacgacctaaataatgacagtgatgattcttcagataattgtgtcattgttgggtttgttaaaccactagctgagaggaccccagaacttgttgaactgtcctctgattctgaggacttaggttcttatgagaaaatggagacagtgaagacacaagaacaggagcaatcttacagttctggtgatagcgatgttagtagatgctcatctccacactctgtccttggaaaggatgaacaaataaataaaggtcattgtgattctagtacaagaatcaaatcaaagaaggaagagaaacgatctacatcattgtcatctcccagaaacctgaactcatctgtaagaggagacagagtatattctccatataaccatagacacagaaagaggggaagatcaagaagttcagattcacgttctcagagtagaagtgggcatgatcagaagaatcatagaaagcatcatgggaagaaaagaatgaaaagtaaacgatccagaagcagggaaagtagcagacctagagggagaagagacaaaaagagatcaagaactagagatagcagttggtccagaagaagccaaactctgtctctaagtagtgaaagcacaagcagatcaaggtctcgtagcagtgatcatggtaaaagaagatcacggagcagaaatagagatcgttattatttaagaaataattatggaagcagatacaaatgggagtatacttattacagtagaaacaaggacagggatgggtacgaatcatcttacaggaggaggactctgtccagagctcattattctagacagtcttcaagtccagaatttagagttcagtccttttctgaaagaacaaatgctaggaaaaaaaataatcacagtgagaggaagtattactactatgaaaggcacagatcaaggagcctgtctagtaacagatcaaggactgcatctaccgggactgaccgggtgagaaatgaaaagcctggagggaaacgaaaatacaaaacacggcatttggagggtactaacgaagtggctcagccatctcgtgaatttgcttctaaagcaaaggacagtcattaccaaaaatcttcatcaaaattggatggaaactacaaaaatgagagtgataccttttcagacagccgatcatcagacagagagacaaaacacaaaaggagaaaaaggaagacccggagcctaagtgtagagatagtttatgaaggaaaagctactgatacaactaaacaccataaaaagaaaaagaagaaacataagaagaagcataagaaacaccatggagataatgcttcacgttccccagttgtaattaccattgacagtgacagtgataaggattctgaagtaaaggaggatacagaatgtgacaatagtggtcctcaagaccctctacaaaatgagtttttggctccttccttggaaccatttgaaactaaagatgtagttacaatagaagctgaatttggtgtgctggacaaggaatgtgatattgccacacttagtaacaacttgaataatgccaacaaaactgtagataatattccacctctggcagcttcagttgaacaaactctcgatgtaagagaagagagcacctttgtttctgatttggagaaccagcccagtaacattgtgtctcttcaaactgagccatcaaggcaattgccatcgccacggacatcattaatgtcagtatgtcttggtagagactgtgatatgtcttaaaactgccaaagcatttcattgagaattatgatgttataaaaaggaaaaaggaagaatgtcgtctactgcagtctatttaaagatgacatttggtgaaaactctcttcctccttacaatattttaaatgattttttttttggtgttaatttgtaaaaatcattatttgttcaaaatgtatgtcccaccctcaaagatatgcacttttaagtgaagaaaatgatactgctagcagcttatttaaaacttggggtcctttttaaataagaaaaattatataaattttagaagttatttcataaagccatacggtattgacatatttttaaggtagtcaatgagtatttttgaattttttttttttgagagttattctggaaatgtgttataagctaggagaatccctttggacagtctttatttttcttcttaaaaatttatatgattcaaaaccatttcttcaggttaaattgaggcattttaatctgcacagtttatcttctgccaaaataaaaatttactatttcctttatatacttgtttatctggactgccagtaaaac

SEQ ID NO: 191698 - DNA, 727 bp, Homo sapiens
  Payload ID: 17871
  Gene Name: TOR signaling pathway regulator
  Uniprot ID: O75663
  ENST ID: ENST00000367830
  CDS Start-End: 24-560
cctctgcgggtcctgcctcagccatgatgatccacggcttccagagcagccaccgggatttctgcttcgggccctggaagctgacggcgtccaagacccacatcatgaagtcggcggatgtggagaaattagccgatgaattacatatgccatctctccctgaaatgatgtttggagacaacgttttaagaatccagcatgggtctggctttggaattgagttcaatgctacagatgcgttaagatgtgtaaacaactaccaaggaatgcttaaagtggcctgtgctgaagagtggcaagaaagcaggacggagggtgaacactccaaagaggttattaaaccatatgattggacctatacaacagattataagggaaccttacttggagaatctcttaagttaaaggttgtacctacaacagatcatatagatacagaaaaattgaaagccagagaacagattaagttttttgaagaagttctcctttttgaggatgaacttcatgatcatggagtttcaagcctgagtgtgaagattcctggtggcgggcacctgtagtcccagctactcgggaggctgaggcaggagaagcgtgaacccgggaggcggagcttgcagtgagctgagatcgcaccactgcactccagccctccagcctgggcgacagagcaagactccgtctcaaaaaaaaaaaataaaataaaataaaagaagtagaaaacaca

SEQ ID NO: 191699 - DNA, 3032 bp, Homo sapiens
  Payload ID: 17871
  Gene Name: TOR signaling pathway regulator
  Uniprot ID: O75663
  ENST ID: ENST00000367833
  CDS Start-End: 146-964
gggtcggccggcagggggcggggccgggcatggtaacggctcggaagcctaggaggctgggccggagggaggcggaggaaccggtgttcgccgccgccgctgcttcagcttattccttgtggcctctgcgggtcctgcctcagccatgatgatccacggcttccagagcagccaccgggatttctgcttcgggccctggaagctgacggcgtccaagacccacatcatgaagtcggcggatgtggagaaattagccgatgaattacatatgccatctctccctgaaatgatgtttggagacaacgttttaagaatccagcatgggtctggctttggaattgagttcaatgctacagatgcgttaagatgtgtaaacaactaccaaggaatgcttaaagtggcctgtgctgaagagtggcaagaaagcaggacggagggtgaacactccaaagaggttattaaaccatatgattggacctatacaacagattataagggaaccttacttggagaatctcttaagttaaaggttgtacctacaacagatcatatagatacagaaaaattgaaagccagagaacagattaagttttttgaagaagttctcctttttgaggatgaacttcatgatcatggagtttcaagcctgagtgtgaagattagagtaatgccttctagctttttcctgctgttgcggtttttcttgagaattgatggggtgcttatcagaatgaatgacacgagactttaccatgaggctgacaagacctacatgttacgagaatatacgtcacgagaaagcaaaatttctagtttgatgcatgttccaccttccctcttcacggaacctaatgaaatatcccagtatttaccaataaaggaagcagtttgtgagaagctaatatttccagaaagaattgatcctaacccagcagactcacaaaaaagtacacaagtggaataaaatgtgatacaacatatactcactatggaatctgactggacaccttggctatttgtaaggggttatttttattatgagaattaattgccttgtttatgtacagattttctgtagccttaaaggaaaaaaaaataaagatcgttacaggcaggtttcactcaactgctgtttgtactgtctgtcttcacattcatattccagatttatattttctggagttaaatttggatgatttctaaattatcacaaagtgggacctcagcagtagtgatgtgtgtgtctcatgagcagtgagcacagtctgcattcatcatgaaacactatcttctaccaggaggaggttaatgtaaatcaccaaatcccaatgccttgtgactttcataggattcctgatcatgcatgttgatgtactggctcttcactttgggctttctgatgtttattcacacctttggagagttgcaacttgccacatacgaaattagtctcatagtgtagtgaacttcaaccccaaaattttaaaaatgtatttccccccagttttaaattgcctttgaaatttaaaaaaaaaaaatttagacttagtaccagaaccaaaaatacctagatttttggagaacttattacatacatagaaacatgaatatggtttaccactgtgtgtgtgtaggatgttagaattatctgtcctccatctttaggtgctttttcttaaatgtggttctacttatactgatatttttaatttccatcttccatgcaacctcagagtgaataaaccccttaaatttggtgctggttcgaaaaagtctaaagggtttattaggggttgtttttcgcaaatattacatcaatccttaaagcaacaagattaattttctgcttaaaatatttgggaagataggtaaggaggagggggttttaaaatataaaagcaagtttttctattttaaggtgcatatttgtaacattacaggggatgaagtaaaatgtaattaattagcacaagacttagggagtacagaaaatacacagaagtaaatttcaaatccatttgattgttttcatagtgaccccttagtcattttatattcttgtctgcctttctagaaaaatggttgtcataaagtggaaagtgattaaaaagcatcaaataagaaattatttcaagtggatttttaaaaatatttttttgaagggcagggggaaaattcaccccttttctgatttgaaatatgttgtacatatttccatttgatggataaatcattaagtaagaatatttgatttaaagtattagccaacctcttcaggtattagcctgaagataaattttaacaaaacatatacacttgggtatccgtcattgctcaaactctatagtgtattgctggagccaataggcagggtatattttattagctaaatttgatatttgtcttctgccttctgtatcacctccaagctataggaaatcaggattttgttggctttaagaaaacacatggtatgttcactgtatattaaatatacctgtatttaatgttttctcttaggacagaaaagtagacacacacacacacacacacacacatgttgtgttcagctttctgttttatattatttgccattgagattagaatagaacaggctctattcatgcaaactatatgaaatgaaaaacttttaagactcttcattaattggagcttctgggcaacatcgtgtgtgtgtgtgtgtgtgtgtgtgtgtgtgtgtgtatacagacattttttttttaacttgttgattcagatgtcttggtccctgaatagtcctagattacttattttgagaattcattgttaaaaattacagggaattaaaataattgccttttttttttttagagggtaagagatgggtagaagagtatgcctctgaaaattttattagtttattcttgtggagaataccaagaaaatgtgtatttgcccattgctaaatatgatatatgccattttgtatttatttgtcccaagtgtctttttgtaagaggagaataaacaataaggaattactgatcaaa

SEQ ID NO: 191700 - DNA, 3044 bp, Homo sapiens
  Payload ID: 17872
  Gene Name: torsin A interacting protein 1
  ENST ID: ENST00000271583
  CDS Start-End: 207-2006
acagccctcaagacacaccatgggcccagaggcaggtttgctacacagcagcgacgacgcaggcggcggccccagcgactcgcaactgcctccctgaccacagcggccaccgcccaacacccccgagaagccatcgccaccaccggcaggagaacctagggtccataaagccatcttcgcgatcgactaaagctacgtcaacaactatggcgggcgacgggcggcgggcagaggcggtgcgggaaggatggggtgtgtacgtcacccccagggcccccatccgagagggaaggggccggctcgcccctcaaaatggcggcagcagcgatgcgcctgcgtacagaactcctccgtcgcgccagggccggcgggaagtgaggttctcggacgagccgccagaagtgtacggcgacttcgagcccctggtggccaaagaaaggtccccggtgggaaaacgaacccggctagaagagttccggtccgattctgcgaaagaggaagtgagagaaagcgcgtactaccttcggtctaggcagcggaggcagccgcgaccccaggaaaccgaggaaatgaagacgcgaaggactacccgccttcagcagcagcactcagagcagcctccgctacagccgtctcctgttatgaccaggagagggctgcgggactctcattcctctgaagaggatgaagcatcttcccaaactgatttaagccaaacgatctcaaagaaaactgtcaggagcatacaagaggctccagcagtgagtgaagatcttgtaatcaggttacgtcgaccccctctaagatacccaagatatgaagccaccagtgtccaacagaaggtcaatttctctgaagaaggagaaactgaagaagatgatcaagacagctctcacagcagtgtcactactgttaaggccagatccagggattctgatgaatctggagataaaaccaccagatcatctagtcaatatatagaatcattttggcagtcatcacaaagtcaaaacttcacagctcatgataagcaaccttcagtgctaagctcaggatatcaaaaaactccccaggaatgggccccacaaactgcaagaataaggaccaggatgcaaacatcttcaccaggcaagagttcaatatatggcagtttttcagatgatgacagcattctgaaatcagagcttggaaaccagtcaccatcaacctccagccgacaagtgactggacaaccccaaaatgcatcttttgtcaagaggaaccggtggtggctacttcctctgatagctgctcttgcctctgggagtttttggttctttagtactcctgaggtagaaaccactgctgttcaagagttccagaaccagatgaatcaacttaagaataagtaccaaggtcaagatgagaagctgtggaaaaggagccaaacattcctggaaaaacatcttaatagctcccatcctcggtctcagcctgctatcttactgctcactgctgcccgagatgctgaagaagcacttaggtgtctgagtgaacaaattgctgatgcctattcttcttttcgtagtgtccgtgccatccggattgatgggacagataaagctactcaagacagtgatactgtcaaactagaggtagaccaagaactgagcaatggatttaagaatggccagaatgcagctgtggtacaccgctttgagtcatttcccgcaggctctactttgatcttctacaaatattgtgaccatgaaaacgcggccttcaaagatgtagccttagtcctgactgtcttattggaggaagagacacttggaacaagtctaggcctaaaggaagttgaagaaaaagtaagagattttcttaaagtcaagttcaccaattctaacacacccaactcctacaatcatatggacccagacaaactgaatggcctctggagccgtatttctcacttagttctgcctgtgcaacctgaaaatgccctgaaaaggggcatctgcttataagaagtgagagagaagaaaaatcatgtcccaagttctgagaattgttcacactttctaaccagagacagaattcagagctctttttgaaagaactagtttctttttaaagaagttaagtgcttacataaacatggaacatataaatcattcattcaacctaattatctgtgatatgagagaatcatttcagtttccattgagagctctgttaaaggtatcttaggagtgcagattatatgcagttccttagagaatctgttttgattctgggctgagttattacagttatggtatgaccagtgagagggatttgtgtcctttcttatgaaccttcctgattttttaacttagatttctcactaagtttcctgagttattagtaagattgctccctaaatgtaaccagggattttcccattatgttcccttttataccatttaggtgtgagttccttagcttctgcctataggaacataagtaatgaaaggtcatctaggtgtgtgtttggaatttttttcttttgttttttggaaaatggaaagaacaaggcaaggaaggaaaattaatggggaagctgaagggaggaaatgttacagtaatccactgagatgtagtttagtcaaacataggtatatgaactgttaatcttggtggattccgttgggatttgttttttacatctcctttttccttccttgaagaaaaattcttggctgtcccaaggattcttcatgtatattgcaaaatttaatatatttgttcacttgagtcttaagagtaggtcaggccaaggcaggtggatcacctgaggtcagaagttcaagaccagcctggccaacatggtgaaaccccgtctctactaaaaatacaaaaattagctgggcgtggtggtgcatgcctgaaatcccagctacttgggaggctgaggcaggagaattgcttgaacccgggaggcggaggttgcagtaagccgagaccatgcttattgccctccagtctgggcaacaaaaatgaaactccgtctcaaaaaaaaaaaa

SEQ ID NO: 191701 - DNA, 3397 bp, Homo sapiens
  Payload ID: 17872
  Gene Name: torsin A interacting protein 1
  ENST ID: ENST00000435319
  CDS Start-End: 171-1559
aagtgtacggcgacttcgagcccctggtggccaaagaaaggtccccggtgggaaaacgaacccggctagaagagttccggtccgattctgcgaaagaggaagtgagagaaagcgcgtactaccttcggtctaggcagcggaggcagccgcgaccccaggaaaccgaggaaatgaagacgcgaaggactacccgccttcagcagcagcactcagagcagcctccgctacagccgtctcctgttatgaccaggagagggctgcgggactctcattcctctgaagaggatgaagcatcttcccaaactgatttaagccaaacgatctcaaagaaaactgtcaggagcatacaagaggctccagtgagtgaagatcttgtaatcaggttacgtcgaccccctctaagatacccaagatatgaagccaccagtgtccaacagaaggtcaatttctctgaagaaggagaaactgaagaagatgatcaagacagctctcacagcagtgtcactactgttaaggccagatccagggattctgatgaatctggagataaaaccaccagatcatctagtcaatatatagaatcattttggcagtcatcacaaagtcaaaacttcacagctcatgataagcaaccttcagtgctaagctcaggatatcaaaaaactccccaggaatgggccccacaaactgcaagaataaggaccaggatgcaaaatgacagcattctgaaatcagagcttggaaaccagtcaccatcaacctccagccgacaagtgactggacaaccccaaaatgcatcttttgtcaagaggaaccggtggtggctacttcctctgatagctgctcttgcctctgggagtttttggttctttagtactcctgaggtagaaaccactgctgttcaagagttccagaaccagatgaatcaacttaagaataagtaccaaggtcaagatgagaagctgtggaaaaggagccaaacattcctggaaaaacatcttaatagctcccatcctcggtctcagcctgctatcttactgctcactgctgcccgagatgctgaagaagcacttaggtgtctgagtgaacaaattgctgatgcctattcttcttttcgtagtgtccgtgccatccggattgatgggacagataaagctactcaagacagtgatactgtcaaactagaggtagaccaagaactgagcaatggatttaagaatggccagaatgcagctgtggtacaccgctttgagtcatttcccgcaggctctactttgatcttctacaaatattgtgaccatgaaaacgcggccttcaaagatgtagccttagtcctgactgtcttattggaggaagagacacttggaacaagtctaggcctaaaggaagttgaagaaaaagtaagagattttcttaaagtcaagttcaccaattctaacacacccaactcctacaatcatatggacccagacaaactgaatggcctctggagccgtatttctcacttagttctgcctgtgcaacctgaaaatgccctgaaaaggggcatctgcttataagaagtgagagagaagaaaaatcatgtcccaagttctgagaattgttcacactttctaaccagagacagaattcagagctctttttgaaagaactagtttctttttaaagaagttaagtgcttacataaacatggaacatataaatcattcattcaacctaattatctgtgatatgagagaatcatttcagtttccattgagagctctgttaaaggtatcttaggagtgcagattatatgcagttccttagagaatctgttttgattctgggctgagttattacagttatggtatgaccagtgagagggatttgtgtcctttcttatgaaccttcctgattttttaacttagatttctcactaagtttcctgagttattagtaagattgctccctaaatgtaaccagggattttcccattatgttcccttttataccatttaggtgtgagttccttagcttctgcctataggaacataagtaatgaaaggtcatctaggtgtgtgtttggaatttttttcttttgttttttggaaaatggaaagaacaaggcaaggaaggaaaattaatggggaagctgaagggaggaaatgttacagtaatccactgagatgtagtttagtcaaacataggtatatgaactgttaatcttggtggattccgttgggatttgttttttacatctcctttttccttccttgaagaaaaattcttggctgtcccaaggattcttcatgtatattgcaaaatttaatatatttgttcacttgagtcttaagagtaggtcaggccaaggcaggtggatcacctgaggtcagaagttcaagaccagcctggccaacatggtgaaaccccgtctctactaaaaatacaaaaattagctgggcgtggtggtgcatgcctgaaatcccagctacttgggaggctgaggcaggagaattgcttgaacccgggaggcggaggttgcagtaagccgagaccatgcttattgccctccagtctgggcaacaaaaatgaaactccgtctcaaaaaaaaaaaagtaggtcaattcgtaacagtttattttggacacaccctgaagcttttgttttgaattaagaaatgagtttcaggaattgacaaaccatttgttaaccagctgtcctgggctattgaagaagatttcattttccgcgcatccacttgttgcagtccaagtcctctagtgcaacgccatagcaaatataaagatttactatgcacgtgatacattttatggagtgcctcaagccaagatagtgaatttatatgaagggtgtgaaatgtatttctttactactatagtagtttagttataactttgcatctataattgagctttctcatctgtcaaatgctatggttttcttaaaatgttacaattctagatctatccaccttgtttttttattgtctacaaaccattaaatgtaaatattgtttttagagtcagtcattggctttgtcatttaccctttgagagttccacaagtggtagtagagtggtttaacgtctttcctctagtactaccagtattcataaatgtataccccttactgtaatttgttcctcttagaagtcagatcatctgatttatagaggattatgaaaaccagagtttttgaaaaggcttattttatacatacgtattatatagagaaacaaatgtttttattaaatgtttcattgacccaagtaatttaaaagtaatatgttacctatgtctttcaggaaaaataattatagcagctgatctgtaaatgactttaaaagctattttagtaatttaaataaatttactttcttggtttatactctct

SEQ ID NO: 191702 - DNA, 888 bp, Homo sapiens
  Payload ID: 17872
  Gene Name: torsin A interacting protein 1
  ENST ID: ENST00000447964
  CDS Start-End: 1-888
ataaaaccaccagatcatctagtcaatatatagaatcattttggcagtcatcacaaagtcaaaacttcacagctcatgataagcaaccttcagtgctaagctcaggatatcaaaaaactccccaggaatgggccccacaaactgcaagaataaggaccaggatgcaaaaagtgactggacaaccccaaaatgcatcttttgtcaagaggaaccggtggtggctacttcctctgatagctgctcttgcctctgggagtttttggttctttagtactcctgaggtagaaaccactgctgttcaagagttccagaaccagatgaatcaacttaagaataagtaccaaggtcaagatgagaagctgtggaaaaggagccaaacattcctggaaaaacatcttaatagctcccatcctcggtctcagcctgctatcttactgctcactgctgcccgagatgctgaagaagcacttaggtgtctgagtgaacaaattgctgatgcctattcttcttttcgtagtgtccgtgccatccggattgatgggacagataaagctactcaagacagtgatactgtcaaactagaggtagaccaagaactgagcaatggatttaagaatggccagaatgcagctgtggtacaccgctttgagtcatttcccgcaggctctactttgatcttctacaaatattgtgaccatgaaaacgcggccttcaaagatgtagccttagtcctgactgtcttattggaggaagagacacttggaacaagtctaggcctaaaggaagttgaagaaaaagtaagagattttcttaaagtcaagttcaccaattctaacacacccaactcctacaatcatatggacccagacaaactgaatggcctctgga

SEQ ID NO: 191703 - DNA, 593 bp, Homo sapiens
  Payload ID: 17872
  Gene Name: torsin A interacting protein 1
  ENST ID: ENST00000527391
  CDS Start-End: 1-593
ccttcagcagcagcactcagagcagcctccgctacagccgtctcctgttatgaccaggagagggctgcgggactctcattcctctgaaggtgaggaccgcggagaggatgaagcatcttcccaaactgatttaagccaaacgatctcaaagaaaactgtcaggagcatacaagaggctccagtgagtgaagatcttgtaatcaggttacgtcgaccccctctaagatacccaagatatgaagccaccagtgtccaacagaaggtcaatttctctgaagaaggagaaactgaagaagatgatcaagacagctctcacagcagtgtcactactgttaaggccagatccagggattctgatgaatctggagataaaaccaccagatcatctagtcaatatatagaatcattttggcagtcatcacaaagtcaaaacttcacagctcatgataagcaaccttcagtgctaagctcaggatatcaaaaaactccccaggaatgggccccacaaactgcaagaataaggaccaggatgcaaaatgacagcattctgaaatcagagcttggaaaccagtcaccatcaacctccagccgac

SEQ ID NO: 191704 - DNA, 587 bp, Homo sapiens
  Payload ID: 17872
  Gene Name: torsin A interacting protein 1
  ENST ID: ENST00000529091
  CDS Start-End: 1-191
attcctctgaaggtgaggaccgcggaggtaacagtcccagccgcgagccagggaacgcgcgggggcgggcgcgcgcctcggtggagctcatgcccgcctggtgtggtggtccctgccaaaaatctgccactttggtggccgtcactgtaacctcaagtagtctggcaaatcagactgacaaagtaacctgaaaaacaagactattaattagagttttcgtctaaatggacaaaagggatgctgacaaagtgagtgtatagtgttagaggatgaagcatcttcccaaactgatttaagccaaacgatctcaaagaaaactgtcaggagcatacaagaggctccagtgagtgaagatcttgtaatcaggttacgtcgaccccctctaagatacccaagatatgaagccaccagtgtccaacagaaggtcaatttctctgaagaaggagaaactgaagaagatgatcaagacagctctcacagcagtgtcactactgttaaggccagatccagggattctgatgaatctggagataaaaccaccagatcatctagtcaatatatagaatcattttggcagtcatcacaaa

SEQ ID NO: 191705 - DNA, 579 bp, Homo sapiens
  Payload ID: 17872
  Gene Name: torsin A interacting protein 1
  ENST ID: ENST00000531630
  CDS Start-End: 1-579
gaagtgagagaaagcgcgtactaccttcggtctaggcagcggaggcagccgcgaccccaggaaaccgaggaaatgaagacgcgaaggactacccgccttcagcagcagcactcagagcagcctccgctacagccgtctcctgttatgaccaggagagggctgcgggactctcattcctctgaagaggatgaagcatcttcccaaactgatttaagccaaacgatctcaaagaaaactgtcaggagcatacaagaggctccagtgagtgaagatcttgtaatcaggttacgtcgaccccctctaagatacccaagatatggagaaactgaagaagatgatcaagacagctctcacagcagtgtcactactgttaaggccagatccagggattctgatgaatctggagataaaaccaccagatcatctagtcaatatatagaatcattttggcagtcatcacaaagtcaaaacttcacagctcatgataagcaaccttcagtgctaagctcaggatatcaaaaaactccccaggaatgggccccacaaactgcaagaataaggaccaggatgcaaaatgac

SEQ ID NO: 191706 - DNA, 3685 bp, Homo sapiens
  Payload ID: 17872
  Gene Name: torsin A interacting protein 1
  Uniprot ID: Q5JTV8
  ENST ID: ENST00000528443
  CDS Start-End: 462-2216
gtcgcactccttttccccgagacttggtactgggagataggacgggagtctcctacacgcagtcaacacttgccacgagcggctagacttaggacaggcaagttgccctgccatccttctatcgcccccacccctcctttacttaagggcgatggcagagacgtcctcctcccccttctcctcctctttggtgcctccagccaggaggcgggagcgatccacagcagctgacccagctcaggcactgcctctctcacagccctcaagacacaccatgggcccagaggcaggtttgctacacagcagcgacgacgcaggcggcggccccagcgactcgcaactgcctccctgaccacagcggccaccgcccaacacccccgagaagccatcgccaccaccggcaggagaacctagggtccataaagccatcttcgcgatcgactaaagctacgtcaacaactatggcgggcgacgggcggcgggcagaggcggtgcgggaaggatggggtgtgtacgtcacccccagggcccccatccgagagggaaggggccggctcgcccctcaaaatggcggcagcagcgatgcgcctgcgtacagaactcctccgtcgcgccagggccggcgggaagtgaggttctcggacgagccgccagaagtgtacggcgacttcgagcccctggtggccaaagaaaggtccccggtgggaaaacgaacccggctagaagagttccggtccgattctgcgaaagaggaagtgagagaaagcgcgtactaccttcggtctaggcagcggaggcagccgcgaccccaggaaaccgaggaaatgaagacgcgaaggactacccgccttcagcagcagcactcagagcagcctccgctacagccgtctcctgttatgaccaggagagggctgcgggactctcattcctctgaagaggatgaagcatcttcccaaactgatttaagccaaacgatctcaaagaaaactgtcaggagcatacaagaggctccagcagtgagtgaagatcttgtaatcaggttacgtcgaccccctctaagatacccaagatatgaagccaccagtgtccaacagaaggtcaatttctctgaagaaggagaaactgaagaagatgatcaagacagctctcacagcagtgtcactactgttaaggccagatccagggattctgatgaatctggagataaaaccaccagatcatctagtcaatatatagaatcattttggcagtcatcacaaagtcaaaacttcacagctcatgataagcaaccttcagtgctaagctcaggatatcaaaaaactccccaggaatgggccccacaaactgcaagaataaggaccaggatgcaaaatgacagcattctgaaatcagagcttggaaaccagtcaccatcaacctccagccgacaagtgactggacaaccccaaaatgcatcttttgtcaagaggaaccggtggtggctacttcctctgatagctgctcttgcctctgggagtttttggttctttagtactcctgaggtagaaaccactgctgttcaagagttccagaaccagatgaatcaacttaagaataagtaccaaggtcaagatgagaagctgtggaaaaggagccaaacattcctggaaaaacatcttaatagctcccatcctcggtctcagcctgctatcttactgctcactgctgcccgagatgctgaagaagcacttaggtgtctgagtgaacaaattgctgatgcctattcttcttttcgtagtgtccgtgccatccggattgatgggacagataaagctactcaagacagtgatactgtcaaactagaggtagaccaagaactgagcaatggatttaagaatggccagaatgcagctgtggtacaccgctttgagtcatttcccgcaggctctactttgatcttctacaaatattgtgaccatgaaaacgcggccttcaaagatgtagccttagtcctgactgtcttattggaggaagagacacttggaacaagtctaggcctaaaggaagttgaagaaaaagtaagagattttcttaaagtcaagttcaccaattctaacacacccaactcctacaatcatatggacccagacaaactgaatggcctctggagccgtatttctcacttagttctgcctgtgcaacctgaaaatgccctgaaaaggggcatctgcttataagaagtgagagagaagaaaaatcatgtcccaagttctgagaattgttcacactttctaaccagagacagaattcagagctctttttgaaagaactagtttctttttaaagaagttaagtgcttacataaacatggaacatataaatcattcattcaacctaattatctgtgatatgagagaatcatttcagtttccattgagagctctgttaaaggtatcttaggagtgcagattatatgcagttccttagagaatctgttttgattctgggctgagttattacagttatggtatgaccagtgagagggatttgtgtcctttcttatgaaccttcctgattttttaacttagatttctcactaagtttcctgagttattagtaagattgctccctaaatgtaaccagggattttcccattatgttcccttttataccatttaggtgtgagttccttagcttctgcctataggaacataagtaatgaaaggtcatctaggtgtgtgtttggaatttttttcttttgttttttggaaaatggaaagaacaaggcaaggaaggaaaattaatggggaagctgaagggaggaaatgttacagtaatccactgagatgtagtttagtcaaacataggtatatgaactgttaatcttggtggattccgttgggatttgttttttacatctcctttttccttccttgaagaaaaattcttggctgtcccaaggattcttcatgtatattgcaaaatttaatatatttgttcacttgagtcttaagagtaggtcaggccaaggcaggtggatcacctgaggtcagaagttcaagaccagcctggccaacatggtgaaaccccgtctctactaaaaatacaaaaattagctgggcgtggtggtgcatgcctgaaatcccagctacttgggaggctgaggcaggagaattgcttgaacccgggaggcggaggttgcagtaagccgagaccatgcttattgccctccagtctgggcaacaaaaatgaaactccgtctcaaaaaaaaaaaagtaggtcaattcgtaacagtttattttggacacaccctgaagcttttgttttgaattaagaaatgagtttcaggaattgacaaaccatttgttaaccagctgtcctgggctattgaagaagatttcattttccgcgcatccacttgttgcagtccaagtcctctagtgcaacgccatagcaaatataaagatttactatgcacgtgatacattttatggagtgcctcaagccaagatagtgaatttatatgaagggtgtgaaatgtatttctttactactatagtagtttagttataactttgcatctataattgagctttctcatctgtcaaatgctatggttttcttaaaatgttacaattctagatctatccaccttgtttttttattgtctacaaaccattaaatgtaaatattgtttttagagtca

SEQ ID NO: 191707 - DNA, 8704 bp, Homo sapiens
  Payload ID: 17872
  Gene Name: torsin A interacting protein 1
  Uniprot ID: Q5JTV8
  ENST ID: ENST00000606911
  CDS Start-End: 192-1943
caccatgggcccagaggcaggtttgctacacagcagcgacgacgcaggcggcggccccagcgactcgcaactgcctccctgaccacagcggccaccgcccaacacccccgagaagccatcgccaccaccggcaggagaacctagggtccataaagccatcttcgcgatcgactaaagctacgtcaacaactatggcgggcgacgggcggcgggcagaggcggtgcgggaaggatggggtgtgtacgtcacccccagggcccccatccgagagggaaggggccggctcgcccctcaaaatggcggcagcagcgatgcgcctgcgtacagaactcctccgtcgcgccagggccggcgggaagtgaggttctcggacgagccgccagaagtgtacggcgacttcgagcccctggtggccaaagaaaggtccccggtgggaaaacgaacccggctagaagagttccggtccgattctgcgaaagaggaagtgagagaaagcgcgtactaccttcggtctaggcagcggaggcagccgcgaccccaggaaaccgaggaaatgaagacgcgaaggactacccgccttcagcagcagcactcagagcagcctccgctacagccgtctcctgttatgaccaggagagggctgcgggactctcattcctctgaagaggatgaagcatcttcccaaactgatttaagccaaacgatctcaaagaaaactgtcaggagcatacaagaggctccagtgagtgaagatcttgtaatcaggttacgtcgaccccctctaagatacccaagatatgaagccaccagtgtccaacagaaggtcaatttctctgaagaaggagaaactgaagaagatgatcaagacagctctcacagcagtgtcactactgttaaggccagatccagggattctgatgaatctggagataaaaccaccagatcatctagtcaatatatagaatcattttggcagtcatcacaaagtcaaaacttcacagctcatgataagcaaccttcagtgctaagctcaggatatcaaaaaactccccaggaatgggccccacaaactgcaagaataaggaccaggatgcaaaatgacagcattctgaaatcagagcttggaaaccagtcaccatcaacctccagccgacaagtgactggacaaccccaaaatgcatcttttgtcaagaggaaccggtggtggctacttcctctgatagctgctcttgcctctgggagtttttggttctttagtactcctgaggtagaaaccactgctgttcaagagttccagaaccagatgaatcaacttaagaataagtaccaaggtcaagatgagaagctgtggaaaaggagccaaacattcctggaaaaacatcttaatagctcccatcctcggtctcagcctgctatcttactgctcactgctgcccgagatgctgaagaagcacttaggtgtctgagtgaacaaattgctgatgcctattcttcttttcgtagtgtccgtgccatccggattgatgggacagataaagctactcaagacagtgatactgtcaaactagaggtagaccaagaactgagcaatggatttaagaatggccagaatgcagctgtggtacaccgctttgagtcatttcccgcaggctctactttgatcttctacaaatattgtgaccatgaaaacgcggccttcaaagatgtagccttagtcctgactgtcttattggaggaagagacacttggaacaagtctaggcctaaaggaagttgaagaaaaagtaagagattttcttaaagtcaagttcaccaattctaacacacccaactcctacaatcatatggacccagacaaactgaatggcctctggagccgtatttctcacttagttctgcctgtgcaacctgaaaatgccctgaaaaggggcatctgcttataagaagtgagagagaagaaaaatcatgtcccaagttctgagaattgttcacactttctaaccagagacagaattcagagctctttttgaaagaactagtttctttttaaagaagttaagtgcttacataaacatggaacatataaatcattcattcaacctaattatctgtgatatgagagaatcatttcagtttccattgagagctctgttaaaggtatcttaggagtgcagattatatgcagttccttagagaatctgttttgattctgggctgagttattacagttatggtatgaccagtgagagggatttgtgtcctttcttatgaaccttcctgattttttaacttagatttctcactaagtttcctgagttattagtaagattgctccctaaatgtaaccagggattttcccattatgttcccttttataccatttaggtgtgagttccttagcttctgcctataggaacataagtaatgaaaggtcatctaggtgtgtgtttggaatttttttcttttgttttttggaaaatggaaagaacaaggcaaggaaggaaaattaatggggaagctgaagggaggaaatgttacagtaatccactgagatgtagtttagtcaaacataggtatatgaactgttaatcttggtggattccgttgggatttgttttttacatctcctttttccttccttgaagaaaaattcttggctgtcccaaggattcttcatgtatattgcaaaatttaatatatttgttcacttgagtcttaagagtaggtcaggccaaggcaggtggatcacctgaggtcagaagttcaagaccagcctggccaacatggtgaaaccccgtctctactaaaaatacaaaaattagctgggcgtggtggtgcatgcctgaaatcccagctacttgggaggctgaggcaggagaattgcttgaacccgggaggcggaggttgcagtaagccgagaccatgcttattgccctccagtctgggcaacaaaaatgaaactccgtctcaaaaaaaaaaaagtaggtcaattcgtaacagtttattttggacacaccctgaagcttttgttttgaattaagaaatgagtttcaggaattgacaaaccatttgttaaccagctgtcctgggctattgaagaagatttcattttccgcgcatccacttgttgcagtccaagtcctctagtgcaacgccatagcaaatataaagatttactatgcacgtgatacattttatggagtgcctcaagccaagatagtgaatttatatgaagggtgtgaaatgtatttctttactactatagtagtttagttataactttgcatctataattgagctttctcatctgtcaaatgctatggttttcttaaaatgttacaattctagatctatccaccttgtttttttattgtctacaaaccattaaatgtaaatattgtttttagagtcagtcattggctttgtcatttaccctttgagagttccacaagtggtagtagagtggtttaacgtctttcctctagtactaccagtattcataaatgtataccccttactgtaatttgttcctcttagaagtcagatcatctgatttatagaggattatgaaaaccagagtttttgaaaaggcttattttatacatacgtattatatagagaaacaaatgtttttattaaatgtttcattgacccaagtaatttaaaagtaatatgttacctatgtctttcaggaaaaataattatagcagctgatctgtaaatgactttaaaagctattttagtaatttaaataaatttactttcttggtttatactctctatgtgttataaacttaatgatttatcatctttaaaaaaagaaatccaagtattttccttgaacaattgtagcaactctggctaggagaaacaaaaatcaaagaactggagccatttgcaagtacattggttagaagtggaatagccgtaactttccattttatctcggcacttagggtttttaaaaatacagttaagttagatattcctgacttagcaaaagaatctccacagcagcttttcttttttttttttttaagtagacatgggatctcgctatattgcccaggctgtttttgaactcttggcctcaagcagtcctcctgcctaagcctcctaagtagctgggattacaggcataagtcactacacctggcttcttaaccttttctttatcacctccctgaagaacttttttagatttttttcttagtcaccccttccccatgatatttcaacaccagatatatactatgtatctgtttatggactgtaaatgttttttgctttatacaaaatagaatttttttttgtccccaatgaaccaattttcacccccattgagaatgcatgctcaagagcatccacgttttagataattgctgcctaaaatgttctatttgctattcatgttactgtgatccttttagaagggaaaatttattttttattttttttattttttattttttttatttttgagacaatctcactcttgcccaggctggagtgcagtggcgcaatctcggctcactgcaacctccgcctcccatgttcaagtgattcttctgcctcagcctcccgagtagctgggattacaggttcacaccaccatgcccggctaattttttgtatttttagtagagacggagtttcaccatgttggccaggctggtcttgaactcctgacctcaggtgatccacctgccttggcctcccaaagtgctgggattacaggcatgagccgcggagcctggcctagaaaggaaaatttaagtaagataccagcttcagaataggagctagggtctagagaaatggagcacattgtaactggctgacaacagtggcccaggaaaaccacagtaacttaatttgaaacttaatttgcttcccttgttttaatgactttttaatatttaaagatgttttctaaacctctaatcctcaaaacaaaaattggaagtaaactgattttcattcagtgaactgccatttagaagtgataggggtttacatactttgtaccattagttaacgcctaagctaaaagtataatatccagtttccctatgatctcaagtttatggaaagtagcctttcttttggcagtgtaaacaagcagttacattaaatacgtaaagataatgcattattctgctattttgtccttatcaagatcatgtagtaaaattttgtggtataagaggatagtgtttttccctaaggaagaggattttattggcattaaccaccaaagatggggttcctgagcctggaaaaccaagctgagaaggctgccattgactggaaaaggaggaaattcctcccttgaatgccctctttctggcctggattctgagaattccttgtgtgtttaaggacccttgtgggtggtagagaaactagttcctgtcacctgagcataaacagaagaacccctttgtactctacaccccagacataatgaactacttgcaatttcctaaacacatcattcacttgtcttttgcacattcttagactcttggaatacttcatttcctgccctctcgctttctccaatctcatgttctgctaatttttatttgtccttaaagtcttcgttttcttagggcagcacttcagtgaaatctttcataattcccttcccccagatactattttaggtgcctcctgttttttttctttctttctttctttctttcttttttctttttctttttttggtagcttaaacaataagacctttattgttacaaaacccagcagcgtgaggagttcctgggttgggtgaattagaggctggaaaaattcatcgcaagcattacaagataaccaatgatacccctgatgaaagaaaacctctgcaaactgctagctgaagccagctcctgtccttttatccaaaactgggtagtgtccagccaaaccattttgggggttgaatgagtcacttcaaagggctcaaatgactggtgaatcttccagataaaaggagagaacacagactttcctgcgcattttaaagtgactgaggtgctccacactctgatttatcctttattaccctgtggcagcattagcatacccctgctaccacatgcatcttgcaagcagtgatgtgtcatcaatatatgcaccgtggcaatcacagaatgctcaaatatttattgaataaaaagagcaagccatacctaattatagctaggtaagttgcatcttagtgttttatttgctttccccacccccatcccccattacgcctaagccctatctaaaagttgtatataactcatctgggtttagcaatgctatgaataaggaaaaacaaagaggaccaatctacgccgtggaagggaaatgcacttctctgatagagacagtgatcattacaggtcctcaagggaaaggtggaatatcaagggaaaagactgggaagctgtgaggtctttccacagtgatatttggcatttgcattttctaaaaatagctagcaagtattcttccatctttttctgttgcctaagagggtattataattcagataaaagatggctatggatgtacgaacaagatggataagaaaaatattcgagaattagaactgaccagatttgattgactgtagaagtgctgaaaatttctctttcttctgtttagctcatatatcttctccccagatactaagcataaagtgatagactaaattcctatctctgcatgtcaatatgttgacttttagtttgaagtagagccacacatatttggtcagaaattgattgtagagaataaaaaccctgtccaaccaggaaatgagcaaaagagggctggggtgaagattgcaagaatatacatctcagactccaggaaaaggaaaatacaggaactgtgaagactgttttcatttggagaccagcagccattccctctgtctctctattgctgctacccaattagcaacttcccctttgtgacttaaatgccaaaaagatgacattaatggctcaattcagtgtatgaaggattcctgagaagaatatatgataaagcatagcttcctaggtcacccttttaacagggaccaggagtttgggttgtggtagggctgtgtcctgaggtcaggccaagaagtgggctgatatgttaaaggacaactgaatacttcttcaactatataaagaccttctatatgtaatgccatgctatgtcattaatggcatttcattttagctttttaaaaaacccaacgaagggaaattcaaggtaatggaaacattttaagttttaaaatctgagtcctggtcatgggtctactacaaatgtgatttcttcccattgcttctgtttctctaggctaaaccaggaagatagttgtcaaaacttcgggtactattttaacatacatcagcacttgttaatttgctgtaattccctcaatagaacaccaagctttagttttcagtatgtttcttgggcaagtgaggtggtaggtggccatgtactagatcaaacttgattttctagggattgttttcccacttttagagaataccattcttaggctaaactcaattacagaatctactgcatgctatacagccctctatagaaatattcaccctgagtagttaattatgtttcttaatgggtaaatgttttatctagtccctctttttttttaatttgataaaatccagatctctcagagcttaaatacacttcctcttattttccctacaacaaatatggaaaagatctataatatatatttgaatatgtattaagttgttcctcacccttttctattttttattagctattgagtgtttattaatgcttcaaacacttccaagtgctttatgtatattaactgatttaattcttaagttactctatgagatggtattattatcccaacttaataggaaactgaagcacagtgagctaaagtaactctcgaagtggtggagcagagagatgaacccaggcagtctgactttagaacatctatgcttaccactatgatgttctcaaggaccccattctgaatataggaataaacaaattcagtttctcccactttaatctcacaacacccttctgactccagatgtgtgtggaggggggttccccacgcattaagcaaataagcaattttgcagcagacaccagctgggtgtcctctaattcaattcacttcttacactacctggagatagcatcagataccataggttgaaggctcagtgccacaagatggctcccacttcagatgacaatcagaagccccagatggtgaccaagggtcctaaccaactagctataagttagggttcccataaccccttcttgagctccattagtttgctagagaggctcacagaactcggaaacactatacagtcatgctgtacataatgacatttcaatgtcagcctgcatagacaatggtgatcccataagattataatactgtatttttactgtaccttttctatgtttaggtatgtttagatagacaaatagtcaatccttgaacaacttgggtttgaactgtgtgggtccatttatacatggattttttttcaataaatgtattggaaaattttttggagatttgcaacaatttgaaaaaccagatgaacctcatagactagaaatatcaaaaaaaataaaggtatgtgaagagtacataaaatac

SEQ ID NO: 191708 - DNA, 7905 bp, Homo sapiens
  Payload ID: 17873
  Gene Name: torsin A interacting protein 2
  Uniprot ID: Q8NFQ8
  ENST ID: ENST00000367612
  CDS Start-End: 389-1801
gggccgcggcggccgctgggtgcagccgagcggtgtggagcggagagaatactcgaagggctctcctgatactaacagttttacgatttaaaacttcgccagaatttcgacagggtctcactgtattgcccaggttggtctcgaactcctggcttcaagcgattctcccacctcagcctcccaaagtgctgggattacaggcgtgagccaccacgcctggcctcactcaaacagtaaacgagtcactgtatatatgccttatttcctgggtccatgggaagcatgagtctgttgggacttgggacaagaagaaaacaagacatcttcacaaggaaaaccaagtactaaaaaaagtatcctcccaactctgaagagatagaacacaaacatggccgacagtggacttagggaacctcaagaggactctcaaaaggatttggaaaatgatccatcagtaaattctcaggcgcaggagaccacaatcatagcaagtaatgctgaagaagctgagatcctacactctgcctgtggtcttagcaaagaccaccaagaggtagagacagaaggtccagaaagtgcagatacaggtgataaatcagaaagtccagatgaagcaaatgtggggaaacatccaaaggataaaacagaagatgagaacaagcagagttttctggatggcggaaaagggcatcacctcccttcagaaaatctgggtaaagaacccttggatccagatcccagccattctccaagtgacaaggtaggaagagcagatgcacacttagggagcagctctgtggccctccctaaggaagcgagtgacggaactggagcatctcaggaaccacctactacagactcccaggaggcccagagtcctggtcattccagtgcagggcaagagggtgaggatacactgaggaggcgactgctggccccagaggctggaagtcatccacaacaaacacaaaaattggaagaaattaaagagaatgcacaggacaccatgagacagattaataaaaagggtttttggagctatggccctgtgattcttgtcgtcctggttgtggctgttgtggcaagttctgtgaatagctactattcctctccagcccagcaagtgcccaaaaatccagctttggaggcctttttggcccagtttagccaattggaagataaatttccaggccagagttccttcctgtggcagagaggacggaagtttctccagaagcacctcaatgcttccaaccccactgagccagccaccatcatatttacagcagctcgggagggaagagagaccctgaagtgcctgagccaccatgttgcagatgcctacacctcttcccagaaagtctctcccattcagattgatggggctggaaggacctggcaggacagtgacacggtcaagctgttggttgacctggagctgagctatgggtttgagaatggccagaaggctgctgtggtacaccacttcgaatccttccctgccggctccactttgatcttctataagtattgtgatcatgagaatgctgcctttaaagatgtggccctggtcctgactgttctgctagaggaggaaacattagaagcaagtgtaggcccaagggaaacggaagaaaaagtgagagacttactctgggccaagtttaccaactctgacactcccacctccttcaaccacatggactcagacaaattgagtgggctgtggagccgaatttcacacctggtactgccagtccagccagtgagtagcatagaagaacaggggtgccttttctaaagctaagcacagagttggttacagaaggtatatgtttatgaaaaagtttgtttaaagaccttccatttatatggaaggaggttgataaaatagcttgaggaaatagcctgaaaaacaaagatgagcttattttagaaacaagtttttattttttattccttgtaaaatctttctaatctaagccttgacaaagctaaaaattaacctgactttttttctttggaccaaatcaggtttgaaatatcgatgatatatatgagaattttttttaaattctaaaatatagcaacattgcacaggaagatactcttacttcttagagtaactacagagtgattttttttttttcttgagtgagactctgaagaaccttttcgataatgtttggacttggactaaagcaattagaattatgaagcaatgataacctttagaaaatttttctatcacatgttgaatattttcaaaccttactttaataatctaaagttacgggattatatcttatattaattttgcagttttgagtagtatgataaaagaaataagaattcaaaccattaagtacctacctaaatactacatgtaaggcactgtgcttttatttcattcagctgaggtataagcagctgtactcaaatgttcttaaaaatgagaaccagtggggaaattgtttataatcattggaaatgaagaaattccaattggctatatctttacttcagcttttcttgaacaatttacagcattgattttcaaactgtgtctactggcacccttcccctttgtatcagagcagttctgcttttaactgttttatatgttggggttctctatgagatttcattggaacaaagagtttcactgatattcgagtttgaaaaccattgattaagtgaaaaaacatcttagaagataggaaatatgtttaaaaaatgaatgtattaaatcttatgagtaggaagatgaaatacaggtttattgtatagatacattatttatgaaggataaagatctatacatgaacagcagaatgtataagctagcatttactagcatgtctctgatgcttttgttcatttctgttaatcgtcatttctgtcccctctgcatggaattttatacttgtctagggtaagagtttgtagactctttcagcagaacagattttaataaccaatttatttgttttattttaaaaatttatttttgaataaccaatttaatagtaaattttatatgaacatttggcataactttaccagtttatttctatgcagtgatggaacattatgtaatgcagctcatttcttgaccaactagttatagaagtaccattaggttaaaaattagagaaatctaagagatgttatacttagtgagaggaagcagaaatggtgggtagattctcagaggttttgatgttcagtactgacggaccatgttctgtgattgtaagaaagattgaaaacagtttgtatggagatagagttgattagcatttgagctctgaaagcagaactctagtaaaatgatctcgacctaacaaagggtctgttccattatatagactattaccataatcctggattatttcaactgggttttggcctctccattatatgagatcatatgtatatagctaagaagtctgattaaagtatggaaagattttaggaaacactaagaagatacagggatctttactgatacctaaaaagattacaattgagtaattgctcaattgagtgtaggggcatacctgaaggaagaatttgcatttgggacttcgaaggaagcttccaagagatttgggaagagacctgaacaaaaagttaaagcatggtgaatgtgatatcactgtcaatccagtataaaagcagaggaagttgaaggaaaatctgtatcccatatgcacattttttctgtctttttagatcttagatgctagcgttacatccacaaaaccagtgttgccttgtataactattatattggcctgctgacctgtgctacctcagatctgtcaaggaaccagtatgtcgcatattcttgtttcttcattcagttgaatatggtttttcatcatttctcttcaaaataatttagaaaaataaatttctaaagtcataatttttaatttagcctttttaaaaacattttcccttccatgtatagtgcaatcaattgagggtgttgtcagttttctgtctgctatttcaaaagtcttttttttttttttttttttttgagatggagtctcactctgactcccaggctgcagtgctgtggcttgatcatagctcactgtagctttaaactcctgggctcaagcaatcctcccaccttagcctcctgagtagccgggactacaagtgcagactaccacaccactctaccacactattttgtatagagacagggtcttactgtgttgcctaggctggtcttgaactcctggcctcaagtgatcctcccacctcagcgtcccaaagtgtttggattacagatgtgacccaatgcacccaaccaaacttcttttttttttttttttttttttgagagaaggtcttgctctgtcacccaggctggaatgcagtgcagtggcacaatctcatctcactgtaacctacacctcctgggttcaagtgattcttgtgcctcagcctcccaagtagctgggattacaggcatgcaccacaatgcccagctaattattgtatttttaatagagacgaggttttgctatgttgtccaggttggtctcgaactcctggcctcaattgatccgcctgccttggtctttcaaagtgctaggattataggcacgagccactgcacctggcctcaaaaatcatttttaaaagaagcagtatattagctctgggtcttctcatgactaaaatgactatttttaaacataagaccatattttataaatgtacagataattcaaatctattatctaatgtattaggttaatttctatttgttctatacttttttttttttttttttttttgagatggagtcttgctctgttgcccaggctggagtgcagtggtgcaatcttggctcactgcaagctccgcctcctgggttcatgccattctcctgcctcggccttccaagtagctgggactacaggtgcccgccccgacacctggctaatttttaaaaaaatatttttagtagagacagggtttcaccgtgttagccaggatggtctcgatctcctgacctcgtgatccgcccgctttggcctcccaaagtgctgggattacaggcgtgagccaccgcacccggcctattgacattttttaaggtttcagattttcttttgtgtgtctagtaattcgtcttttattgtcaaagataatttgcttatttgacttagaaaaatgatttgtgggcatacaatattgtatgtggtacctaaacgttgccatttagttactcttacagaacaactttcattacactgtatattaatataaattacttcttgagtaatcccagaattgtagaaccaattggtagaatcagaaactgtctttggacttgaggtttttcttcccttagggtaaattttaggttttctggttagtttccaggagttggcggacaagttcatatcactaaaggtgttcatatcactaaaatagtaatgctaatttgtttcatatttctattttaaaaagcaatcaataaagacatttcaatacatttcatttggaagcccccaagtgtatggtggttaataaggctcagcatgctggtaacccaccattctcttagctagtgactccactaaatagtgctagccgctgagatggttttgaccctttaacagcctttttttttttttgagacagagtttcactcttgttatccaggctggggtgcaatggtgcgatatctcggctcactgcaaccactgcctcccaggttcaagcgattctcctgcctcagcctgccaagtagctggattacaggcacgtgccatcacgcccagctaatttttgtatttttggtagagacggggtttccccacgttgaccaggctggtctcgaactcctcacctcaagtgatccacccgcctcggcctcccaaagtgctgggattacaggcgtgagccaccgcgactggcctacacagcttttaattgcttgatttatactttattaaagagaggaagcacaatgagcagtgatactaaaatataactaatatggcatgtgaaagtgatcattattcagatgatcttcaccaacactgcatttgcatatatctgaccaaactttatgcgacataggcaggtctctggcacttcaaaaatgaatgttaaatagaaaataataaataatagctgattagggtaatcatttatttaatcagaataaagattatatccataaaatttacttgcagagaagtactttctttttgttttaaagacagggtctcactctgtcacccaagctatggtgcagtggcacaatcacagctcactgcagcctggacctcctggcctcaaggggatgatcctcctacttcaggaattatgccaccatgcccggctagttgagaagtactttcaaatagcaacatgaagcctttcctttaccatttgaaaataaaacatagttgtaaacataaaccagtatgtctttgtaaagccaataatatatcattttataggagcattgtcttcttgtgtttttcaagttgactatgtagttcaatgtcagtctccattttaatatcttgtttgtttatcagcctgagcatatttcattttaaaatgtatttgttgagaagtcatggtggttttttgtttttcacaagtcaagtagcttgaacactatcacttgtccaatgggaaagttgatgcttatctttatggcaaatgcttggttgaataatatatttgcaaagatgttaattctacagagagctaaataaagttaagatacctgtaaaacagtttctccagatgactttaaaataagccttatttttgtaaatttatgttaaattttaggtgttaagttgtgaaatacctaatgatgtgggcctaaatttgcctcattcagactgagacagggctgttaaaattcatttctagctaataaactgtgctataacttctttattattattattattattattattatagtttaagttctgggatacatgtggagaacatgcaggtttgttaacataggtatacacgtgccatggtggtttgctgcacccatcaacccgtcatctacattaggtatttctcctaatgctatccctcccccagccccccaccccctgacaggccccagtgtgtgatgttccctgccctgtgtccaagtgttttctttgttcaattcccacctatgagtgagaacatgcgatgtttggtaaactgtgctataacttctgtatctctataggccaatccaaatggcctgagaacataatcagtatcccctaatctgcaaaaaggtaaataccttagtcttcagtacctttccttccagtattatctgcattatctgtgcccgcttgctgtgatgtcttgaaaagcccataaattggttcttattttggcaaatggtctcctgcttttcctcactgaggcttataaactaaatttgcctttggctaagcgcagttacatgaaccaaaaagaacattttagacttgggaagcaacaggctgagtcacattgtatggggcagagttggccaagcccccggcagtcacagccctactctctgtgttccttctaggcctgaggacgcatcaacacaaagctccaggcagttgctcctggttcatcagagagcacaggaaatttaaatctatttgcctttcctgtcataaaagaaacagcacactgactttcaaactcaattgcattttgcttatttgtgcttaacaaaaaatatgtgtgctttgccaatactaacgtcccacttctctgcactccctttctgtataacagggattgcttttgtatttgtttcttatagatgctgatgatgtgccttattcagattagttggccattaccagaataaagaataaatctgaatttttttca

SEQ ID NO: 191709 - DNA, 4364 bp, Homo sapiens
  Payload ID: 17873
  Gene Name: torsin A interacting protein 2
  Uniprot ID: Q8NFQ8
  ENST ID: ENST00000609928
  CDS Start-End: 812-2224
attcgggccgcggcggccgctgggtgcagccgagcggtgtggagcggagagaatactcgaagggctctcctgatactaacagttttacgatttaaaacttcgccagaatttcgacagggtctcactgtattgcccaggttggtctcgaactcctggcttcaagcgattctcccacctcagcctcccaaagtgctgggattacaggcgtgagccaccacgcctggcctcactcaaacagtaaacgaggtatgtgacgcattcccagactcttcagccaactgagcatcagcttcttcacagcaattgggtcctgattaatgtcctcccaagacagacttcattggatccacgatcaagaggactctgccaggtttttctgacccctctacattgctataaagtgccaaggccttaagacttgggtacgtgtgttacaacggcaagagtgccagcgccaacaaaagacccattggacctgtcagctcctctgtttcaccaagcagacacaataaccttaccaacaaagcagagtaagccaagtgcctctgtgtgacaccaccagcagctgatgacgcataagaaaaatataactaatttagactagagccctatctcttcttgagaagctgggatttgaaggagctatcctgagatctgtactgctatcactgtatatatgccttatttcctgggtccatgggaagcatgagtctgttgggacttgggacaagaagaaaacaagacatcttcacaaggaaaaccaagtactaaaaaaagtatcctcccaactctgaagagatagaacacaaacatggccgacagtggacttagggaacctcaagaggactctcaaaaggatttggaaaatgatccatcagtaaattctcaggcgcaggagaccacaatcatagcaagtaatgctgaagaagctgagatcctacactctgcctgtggtcttagcaaagaccaccaagaggtagagacagaaggtccagaaagtgcagatacaggtgataaatcagaaagtccagatgaagcaaatgtggggaaacatccaaaggataaaacagaagatgagaacaagcagagttttctggatggcggaaaagggcatcacctcccttcagaaaatctgggtaaagaacccttggatccagatcccagccattctccaagtgacaaggtaggaagagcagatgcacacttagggagcagctctgtggccctccctaaggaagcgagtgacggaactggagcatctcaggaaccacctactacagactcccaggaggcccagagtcctggtcattccagtgcagggcaagagggtgaggatacactgaggaggcgactgctggccccagaggctggaagtcatccacaacaaacacaaaaattggaagaaattaaagagaatgcacaggacaccatgagacagattaataaaaagggtttttggagctatggccctgtgattcttgtcgtcctggttgtggctgttgtggcaagttctgtgaatagctactattcctctccagcccagcaagtgcccaaaaatccagctttggaggcctttttggcccagtttagccaattggaagataaatttccaggccagagttccttcctgtggcagagaggacggaagtttctccagaagcacctcaatgcttccaaccccactgagccagccaccatcatatttacagcagctcgggagggaagagagaccctgaagtgcctgagccaccatgttgcagatgcctacacctcttcccagaaagtctctcccattcagattgatggggctggaaggacctggcaggacagtgacacggtcaagctgttggttgacctggagctgagctatgggtttgagaatggccagaaggctgctgtggtacaccacttcgaatccttccctgccggctccactttgatcttctataagtattgtgatcatgagaatgctgcctttaaagatgtggccctggtcctgactgttctgctagaggaggaaacattagaagcaagtgtaggcccaagggaaacggaagaaaaagtgagagacttactctgggccaagtttaccaactctgacactcccacctccttcaaccacatggactcagacaaattgagtgggctgtggagccgaatttcacacctggtactgccagtccagccagtgagtagcatagaagaacaggggtgccttttctaaagctaagcacagagttggttacagaaggtatatgtttatgaaaaagtttgtttaaagaccttccatttatatggaaggaggttgataaaatagcttgaggaaatagcctgaaaaacaaagatgagcttattttagaaacaagtttttattttttattccttgtaaaatctttctaatctaagccttgacaaagctaaaaattaacctgactttttttctttggaccaaatcaggtttgaaatatcgatgatatatatgagaattttttttaaattctaaaatatagcaacattgcacaggaagatactcttacttcttagagtaactacagagtgattttttttttttcttgagtgagactctgaagaaccttttcgataatgtttggacttggactaaagcaattagaattatgaagcaatgataacctttagaaaatttttctatcacatgttgaatattttcaaaccttactttaataatctaaagttacgggattatatcttatattaattttgcagttttgagtagtatgataaaagaaataagaattcaaaccattaagtacctacctaaatactacatgtaaggcactgtgcttttatttcattcagctgaggtataagcagctgtactcaaatgttcttaaaaatgagaaccagtggggaaattgtttataatcattggaaatgaagaaattccaattggctatatctttacttcagcttttcttgaacaatttacagcattgattttcaaactgtgtctactggcacccttcccctttgtatcagagcagttctgcttttaactgttttatatgttggggttctctatgagatttcattggaacaaagagtttcactgatattcgagtttgaaaaccattgattaagtgaaaaaacatcttagaagataggaaatatgtttaaaaaatgaatgtattaaatcttatgagtaggaagatgaaatacaggtttattgtatagatacattatttatgaaggataaagatctatacatgaacagcagaatgtataagctagcatttactagcatgtctctgatgcttttgttcatttctgttaatcgtcatttctgtcccctctgcatggaattttatacttgtctagggtaagagtttgtagactctttcagcagaacagattttaataaccaatttatttgttttattttaaaaatttatttttgaataaccaatttaatagtaaattttatatgaacatttggcataactttaccagtttatttctatgcagtgatggaacattatgtaatgcagctcatttcttgaccaactagttatagaagtaccattaggttaaaaattagagaaatctaagagatgttatacttagtgagaggaagcagaaatggtgggtagattctcagaggttttgatgttcagtactgacggaccatgttctgtgattgtaagaaagattgaaaacagtttgtatggagatagagttgattagcatttgagctctgaaagcagaactctagtaaaatgatctcgacctaacaaagggtctgttccattatatagactattaccataatcctggattatttcaactgggttttggcctctccattatatgagatcatatgtatatagctaagaagtctgattaaagtatggaaagattttaggaaacactaagaagatacagggatctttactgatacctaaaaagattacaattgagtaattgctcaattgagtgtaggggcatacctgaaggaagaatttgcatttgggacttcgaaggaagcttccaagagatttgggaagagacctgaacaaaaagttaaagcatggtgaatgtgatatcactgtcaatccagtataaaagcagaggaagttgaaggaaaatctgtatcccatatgcacattttttctgtctttttagatcttagatgctagcgttacatccacaaaaccagtgttgccttgtataactattatattggcctgctgacctgtgctacctcagatctgtcaaggaaccagtatgtcgcatattcttgtttcttcattcagttgaatatggtttttcatcatttctcttcaaaataatttagaaaaataaatttctaaagtcataatttttaa

SEQ ID NO: 191710 - DNA, 888 bp, Homo sapiens
  Payload ID: 17873
  Gene Name: torsin A interacting protein 2
  ENST ID: ENST00000495650
  CDS Start-End: 777-888
cggccgctgggtgcagccgagcggtgtggagcggagagaatactcgaagggctctcctgatactaacagttttacgatttaaaacttcgccagaatttgtatgtgacgcattcccagactcttcagccaactgagcatcagcttcttcacagcaattgggtcctgattaatgtcctcccaagacagacttcattggatccacgatcaagaggactctgccaggtttttctgacccctctacattgctataaagtgccaaggccttaagacttgggtacgtgtgttacaacggcaagagtgccagcgccaacaaaagacccattggacctgtcagctcctctgtttcaccaagcagacacaataaccttaccaacaaagcagagtaagccaagtgcctctgtgtgacaccaccagcagctgatgacgcataagaaaaatataactaatttagactagagccctatctcttcttgagaagctgggatttgaaggagctatcctgagatctgtactgctagtaagtgactgataacattataaactggatcggtccctgagttcagagactgagttgcaattgagtgaaaaatagacaacgaaatcttgaagaattgcacggaggtgcaagccaagtttatttggctctccaaataatattggttgaactaagaaattggtaaacgaaacctgtaataggactggtgtttgggcgtctctctctgtcactgttgtctcttgctgtcacattgctgtctgtgttgtctttctaggtccagatgttttcagataattcacattgccctgattgtggacaacagtggttccctagtttagaactaggccactggttgtaccaaactgaacttgttgaaaatgaatgttaccagg

SEQ ID NO: 191711 - DNA, 7067 bp, Homo sapiens
  Payload ID: 17873
  Gene Name: torsin A interacting protein 2
  Uniprot ID: Q9H496
  ENST ID: ENST00000482587
  CDS Start-End: 921-1316
gggccgcggcggccgctgggtgcagccgagcggtgtggagcggagagaatactcgaagggctctcctgatactaacagttttacgatttaaaacttcgccagaatttcgacagggtctcactgtattgcccaggttggtctcgaactcctggcttcaagcgattctcccacctcagcctcccaaagtgctgggattacaggcgtgagccaccacgcctggcctcactcaaacagtaaacgaggtatgtgacgcattcccagactcttcagccaactgagcatcagcttcttcacagcaattgggtcctgattaatgtcctcccaagacagacttcattggatccacgatcaagaggactctgccaggtttttctgacccctctacattgctataaagtgccaaggccttaagacttgggtacgtgtgttacaacggcaagagtgccagcgccaacaaaagacccattggacctgtcagctcctctgtttcaccaagcagacacaataaccttaccaacaaagcagagtaagccaagtgcctctgtgtgacaccaccagcagctgatgacgcataagaaaaatataactaatttagactagagccctatctcttcttgagaagctgggatttgaaggagctatcctgagatctgtactgctagtaagtgactgataacattataaactggatcggtccctgagttcagagactgagttgcaattgagtgaaaaatagacaacgaaatcttgaagaattgcacggaggtgcaagccaagtttatttggctctccaaataatattggttgaactaagaaattggtaaacgaaacctgtaataggactggtgtttgggcgtctctctctgtcactgttgtctcttgctgtcacattgctgtctgtgttgtctttctaggtccagatgttttcagataattcacattgccctgattgtggacaacagtggttccctagtttagaactaggccactggttgtaccaaactgaacttgttgaaaatgaatgttaccaggtattcttagaccgtattaacagagctgattattgtcctgagtgttatcctgataatcctgctaatagaagccttgttcttccttggtctttcccacttgagtgggctccccagaatctcaccagatggacctttgagaaagcttgccatccatttcttctgggtcctccactggttagaaaaagaatacatgactctcgagtagctggttttaaccctgcattacagttaatcttgaccagaacagataaaaccttaaacaaaaaactgggccaaaacaaatagcttctataatagtcaaaattgtcaagtctagaggcttttgtgtaggtagcccaaggaagatggaaaaataattcatttctaagtctgacccagattgtcactactttgggaactgcttaaattgttggatctgcttccgtggcctatacatattttattcacatgaatttagttagtattccagccagcctgttcatctagactgaggctaatctgttcatctagactgaggctaatccgtatttcctataaactgttttggaactaacttaccactcctaaaaaaatttctgcaacctaatgagtgtcatatgacaaagtagtcctagaggggaagtcctatactgtgtgcttcatagtggtatttctaatgataacttttgtgggaaagcagcctcgttatagctggatcctagattagtccagtgaattttaataagaaattacactgttgtaaactcacctcttatgcattggtcagtgatgagatatatatataaatagatagatagataaaatttgctcttatatagccatttattcatcattggccctgtttggcccatcctcagtgtggctgtgagattattgataactggtcactgtcagataaatcacattctattaggaaacacctatataggttatgcagaaacatgcagaaatgccacctgtccatacttacgtggctttacataaacaaaagactgtcttgtctttgtggtgactgaatttacaacgtcctcccctggaaatggaaaagtacctatcaggagatgtatgacaaaagaaattatcaagcctgacttcatatatattatgaacagtctagaggaagcatctttcttagaactaaggaggtctgctgaacattggccacattctggactttcatgaaaatcatggacccagagttggggttaagccacttagaaaaagctgttgaaaacatctcaaaggccactgaacaatttttaaattacacttaacatgccaggtatctaggtatctagtgcttttagcaatattatcaatattatcaaggtcccagcttctttgtgtccttcccccttgcgatcctctttttttttttttttttttttgctttttaaaaaatagtgacagagtcttgctgtatgacccaggctggtctccaactcctaggctcaagccatcctcccacctcggtctcccaaggtgctgggattacaggcgtgagccaccctacccggcctaggatccatgtttgctttttatcgttaggtttttttttctcaatgagtacaatatgacttcttgttgtaacagacattttaatccctaggaaaggctggaagtagagagcaaaaggctttctttcaagtcagtgttttatttgggaatcaagtctttcccaaaaatccctagcaaatttcttcttacatctcattagaaagtaccagtttacaagggagcctgggaaaccttggcaaaggggaatagggttagcattgcctgggtaggccacattgcctccattgaagaaatcagggcttttttttttttttttttttttttgagacagagtctcactctgtcgcccaggctggagtgcagtggcagtcttggttcactgcaacctctgccttccgggttcaagcaattctcctgcctcagcctcccgagtagctgggactacaggtgtgcgccaccacacttggctaatttttgtatttttagtagagatggggtttcaccattgttggccaggatggtcttgatctcttgatctcatgatccacccgccttggcctcccaaagtgctgggattacaggcatgagccactgtgcccagcccttttttttttttttttttgacggagtctcgctctcttgcccaggatggagtgtagtggcacgatctcggcttactgtaacctccacctcctaggttcaagcaattctcctgcctcagcctcctgagtagtggggattacaggtgcccgccaccatgtctggctaatttttgtgtttttagtagagacggggtttcaccatgttggccaggctggtcttgaactcctgacctcagatgatccacctgccctgacctccgacagtgctgggattacaggcatagccaccgtgcctgaccagggctcttttagcaaggaaaacgtgaggaatgaatggctgttggtgtgcaacaaatcatacttgctacatgttgtgaaacctgaagttatttgttagtctgtatgaagaatgtaccccagagatgcaccctgtatctgccttatgtctcttacaatggaggttctctcctgttatattgctgaataaactatgtgaactgctaaattgactgaagactagttagtttatcactaactctttaatgaagaatttcactatcctacaactcctcctaaaaagtgaaaatttactttgagagagtgctttcgagaatagtattatgatcagtattattgcccctaaattttttaattattagagaatgcttatgttacaaggacatatactaagaaacattctacaaatgtgaaaatttaaatatcagcaaaatagagaaaaggtttttgtttttgttttagtcaatatctccattaaatagtaagatcagattaaaaggatttatatcattgatttctcaaatcaatacctaagcagtacctgtgagagcttgtttaaaaatggagatttcttggtctgctttagaaattttgattcctcaggttgcttgtagggcccaggaatctgcatattataaataacacctcatgccgggtgccatggcatgtacctgttaccacagctacttcagaggttgaggcagcaggatcacttgagcccaggagttcaagaccagcctgggcaagatagtcagaccactgtctctttcaagaaaaaaaaacaacataaaagatataaatagtacctttggagattctgatgcaggtgctctctagaccatactttgagaaatgctgtagtaatatgtccatagtgtttacttatctggcttaaaaggatgggagcagaatactcatagtactgcaagatagtaccatttatttggtaatactggctatgtaaaaagagatttcatgtcagactgaagatcactgttaataatttaggtcataactcagccacatttttctcattaattaaactaatcaggaatgtttcagtcttcttcacaaacagttttgttcagtgtcattataaactatgtgaatatatgggcaagaaaaatgaatcaaaaatattaattttaatattaagagggttactttgccttcaaacatcacatacctgttatatgataagctgtcagaaatcaacatcatgtagtagagctcataaaattgagcaaaggagaaaattgaggaagcctttgaacaaagcttttcaccttaggtctttctagtatgtcttcatatggcttaaaatattgcaggttattctagaatactccatagttgatatgaataatgaattttattaaaatataaatgctgtgttggtaaaattaattgtaatgacaaatgatctggagggttatccagtgttttaaatagtgtgagctacactcgtctctatttttatagtgtggaagagttggtaatattgcttatatgttatggtagcatttctaaaatgaccattataactactccctgttattttatggcagtccagggagtgaaaaggttaatggaaacatgcaagggcagaccggaaagaaaatacatccaccaaagaggtggctgttgggggatatgagtgagtgaggtaagattcatctctgagttacaggtgaaggaagcccaggcaaacaggaaggcagaaatgagtccatggcatccaaagaatatgtggcagtccacatgtcatagctgtctgtaaaagtgagatgagccgcagcccgttcatctctccagtctccctggcaaccctgagtctccatggaattttggggacacagcttgaaaattgctttttatagaggcaaaataatggccttgcagccagctgggtttctattctaattctgatactattaaatgaccttaggcattttaacctctctgtatctagtttcttcatctgtgaaaaaggttgtgtaataatacctacctcatactgttgtgaggtttaagtgcaataacatataccaaacatatggcacatactaaatctttaggatgaggaaagatgtagggcaagaaagcaaaagcagaagttagaactggggaataaggtagagtcttacttgttttgttttgtttttttgagacagagtctcgttctgtcacctaggctggagtgcagtggcgccatcatggctcactgcagccttgaccttctgggctcaagtgatcctcccacttcagccccctaagtagctgtgactacaggcttgcaccaccatgcccagctaatttttttatttttgtagagatggagtatcgccatgttgcccaagctggtcttgagctcctggcctcaagcgatcctctcacctgggcctcccaaagtgctgggattataggcatgagccgccgtgtccaccgagtcttagttttagaactaagccaattgtttgaactgatggctgaattattataaacttattggctggtggctcactgtaattccagcactttgggaggctgaggcaggaggatggcttgagcccaggagttcaaaacaagcctgagcaacatagtgagacccccaactctacaaaaaagttttaaaaagaaaaaaattagctggatgtggtggtatgtgcctgtagtcccagctactcaggaggctgaggtgggaggatcacttgagcctcagtgagctatgagcttgaggctgcagtgagctatgatggtactactgccctccagcctgggcaacagagtaaggccctttatctaaaaacaaaaacaaaaaacttcttaaatctctcctgatgaaggacaggattggtttggggatgaggttgagcctgtagtataagtcagatggtcttgggtgtaaagattaaaaggcctggagggatggatgaccgaaggcagatttttgtcacaatgtttaggcccattttataatcttaattatggtagatataattgctgtatgacttttatcacctgagactttccacaacactgaaataaacaaattcctgaagtggtagttccctgaaaaggaaaaagaagaaatagagaaaagttgaaggatatgtacaaattcactcaggtcatatgtactggagtcacaattcaaacctagatgtaagttttccagagtcagggtgcttgtggtatgcttaatacaagcttttaaaagtgtcatggttaggtcccacagctagactacctgagttcaaatcctaactgccctcagtagtcacgtgttcttgggtaacgttcttaacttttctgtatctcagtttcctcatctctaaaatagtaggaatattaatagtctacacctcataagattgttgtgaagattaaacgagttaataaagtgctgtgaatgatgcctggcacaaagaaggcactcaataaatagtagttcttatagttgttgtatatgctttatttgttactcgttttcatagcaggattgtaactacttgtttcagggccaagataccagtttctttttatccctagagcctaaaatggcatcattcactaaaataaaattgtgtttaaaaataaagatatatacttaattcta

SEQ ID NO: 191712 - DNA, 2076 bp, Homo sapiens
  Payload ID: 17874
  Gene Name: torsin family 1, member A (torsin A)
  Uniprot ID: O14656
  ENST ID: ENST00000351698
  CDS Start-End: 50-1048
accggttcgcggtcggcgcgagaacaagcagggtggcgcgggtccgggcatgaagctgggccgggccgtgctgggcctgctgctgctggcgccgtccgtggtgcaggcggtggagcccatcagcctgggactggccctggccggcgtcctcaccggctacatctacccgcgtctctactgcctcttcgccgagtgctgcgggcagaagcggagccttagccgggaggcactgcagaaggatctggacgacaacctctttggacagcatcttgcaaagaaaatcatcttaaatgccgtgtttggtttcataaacaacccaaagcccaagaaacctctcacgctctccctgcacgggtggacaggcaccggcaaaaatttcgtcagcaagatcatcgcagagaatatttacgagggtggtctgaacagtgactatgtccacctgtttgtggccacattgcactttccacatgcttcaaacatcaccttgtacaaggatcagttacagttgtggattcgaggcaacgtgagtgcctgtgcgaggtccatcttcatatttgatgaaatggataagatgcatgcaggcctcatagatgccatcaagcctttcctcgactattatgacctggtggatggggtctcctaccagaaagccatgttcatatttctcagcaatgctggagcagaaaggatcacagatgtggctttggatttctggaggagtggaaagcagagggaagacatcaagctcaaagacattgaacacgcgttgtctgtgtcggttttcaataacaagaacagtggcttctggcacagcagcttaattgaccggaacctcattgattattttgttcccttcctccccctggaatacaaacacctaaaaatgtgtatccgagtggaaatgcagtcccgaggctatgaaattgatgaagacattgtaagcagagtggctgaggagatgacatttttccccaaagaggagagagttttctcagataaaggctgcaaaacggtgttcaccaagttagattattactacgatgattgacagtcatgattggcagccggagtcactgcctggagttggaaaagaaacaacactcagtccttccacacttccacccccagctcctttccctggaagaggaatccagtgaatgttcctgtttgatgtgacaggaattctccctggcattgtttccaccccctggtgcctgcaggccacccagggaccacgggcgaggacgtgaagcctcccgaacacgcacagaaggaaggagccagctcccagcccactcatcgcagggctcatgattttttacaaattatgttttaattccaagtgtttctgtttcaaggaaggatgaataagttttattgaaaatgtggtaactttatttaaaatgatttttaacattatgagagactgctcagattctaagttgttggccttgtgtgtgtgtttttttttaagttctcatcattattacatagactgtgatgtatctttactggaaatgagcccaagcacacatgcatggcatttgttccacaggagggcatccctggggatgtggctggagcatgagccagctctgtcccaggatggtcccagcggatgctgccaggggcagtgaagtgtttaggtgaaggacaagtaggtaagaggacgccttcaggcaccacagataagcctgaaacagcctctccaagggttttcaccttagcaacaatgggagctgtgggagtgattttggccacactgtcaacatttgttagaaccagtcttttgaaagaaaagtatttccaacttgtcacttgccagtcactccgttttgcaaaaggtggcccttcactgtccattccaaatagcccacacgtgctctctgctggattctaaattatgtgaattttgccatattaaatcttcctcatttatactattatttgttacgttcaatcagaatccccgaaacctcctataaagcttagctgccccttctgaggatgctgagaacggtgtctttctttataaatgcaaatggctaccgttttacaataaaattttgcatgtgc

SEQ ID NO: 191713 - DNA, 2769 bp, Homo sapiens
  Payload ID: 17875
  Gene Name: torsin family 1, member B (torsin B)
  Uniprot ID: O14657
  ENST ID: ENST00000259339
  CDS Start-End: 61-1071
tcctgccgcttggccgcggggcgcctggctcagtggcttctgcgggcttcgaggagcgggatgttgcgggctgggtggctccggggcgcggcggcgctggcgctgctgctggcggcccgagtggtggcggcgttcgagcccatcaccgtgggcctagccatcggggccgcgtcggccatcaccggctacctgtcctacaatgacatctactgccgcttcgccgagtgctgccgcgaggagcggccgctcaacgcttcggctctcaagctggatttggaggagaagctgtttggacagcatctagccacggaagtgattttcaaggcgctgactggcttcaggaacaacaaaaatcccaagaaaccactgaccctttccttacacggctgggctggcacaggcaagaattttgtcagtcaaattgtggctgaaaatcttcacccaaaaggtctgaagagtaactttgtccacctgtttgtatcgactctgcacttccctcatgagcagaagataaaactgtaccaggaccagttacagaagtggatccgcggtaatgtgagtgcatgtgcgaactctgttttcatatttgacgagatggataaattgcaccccgggatcattgacgcaatcaagccgtttctagactactacgagcaggttgacggagtgtcttaccgcaaagccatcttcatctttctcagcaatgcaggcggggaccttataactaagacggctcttgacttttggcgggccggaagaaagagggaagacattcagctgaaggacctggaacctgtactgtctgtcggagtcttcaataataaacacagtggcctgtggcacagtggactgatcgacaaaaacctcattgattactttatccccttcctgcctttggagtacagacatgtgaaaatgtgtgtgagggccgagatgagggcccgtggttctgccatagatgaagacattgtcacaagagtggcagaggaaatgacgtttttccccagagacgagaaaatctactcagacaagggctgcaagactgtgcagtcgcggctggatttccactgagctcctatccagatggggtaggagacagctgggaggctccgcacgccagaggccttgcctttcagaagaaccctgaagaccgctttggggttttgcctgtttgcaccttagacttttgggtatagaatcttttttttgagaagaggtctcactccgtcatccaagctggagtgcagtggtgcaatcctcaactcactgcaacctccgctcccggtttgagtgattctcatgcctcagcctcccgagtagctgggattacaggcatgagccactgtgcccagctgggatatagaatctaagagttgattgtggaaaacacgtgaatctattgcgcgcatttgtcatttagcaagatggcagcagtccagctgttctttgcagctggagatgaacttttaaaaatccccttcacacttaatgtactgaccgagacagaagtacctgaaaacagctgtgcatggcaggcccggcaatagcttctgacccacagcacccgcgcctcagaagctacggtcacaactaaaggagtccagggacttgctgcaggctggggggcactgggtggttctcaccagcaggctgcggggcactgtgttctcattggccaaaaacatccttttgctctgtctcgttctttacacagagttcactgacttgaagtatactcagttaaaatcggggctggaggtgcagacggtgtctgaccggaggatgtggccgtgcccgccgagcactcttgatctgagctgacctgtgtgtgtgtgtgtgggggggtggggccttcacctaagacctctgcagcagacctggacagacaggcccctcccgcctgtccatcgctctagctgctaatacagccctggctgtggaatccttcaccgtctcagctggtatcagccccagcctgccttgtgccatatctcagcttggatctctgctagagtccccccaaccatatatcatagagttgaatcacaatgagaccgttggctttgaatttgagtcgttggttcccatggtgagatgcttgttaagactttatacttgggtcaatctctcactttattttgtagaaccatttgaaatcctaggatgtgcttgttctggaaggatgacatgggcccagactgaacaagtcagcttgatgatcttaaatgatggaagtataggacgttgcttattttaaaacaagggaaggacacaaaatggaatgactgcttagtcctttctcagatactcttaaaacaattttttattgttaaatttgtggtaatacatggtcacaaccgtggatcaaacaaggtcagtctaaagtggcaggtcctaggtgtgacctgataccaccaccctttgtggcagcaccgggctggactgccctgatccctgggacgtgagacttagcttccagccagtgtgaatcattgtatctgtctcataatcacagcacagctgcagacacaacaacgtgcagcattttttacataaaaatatggtagaattaatttatgacatggaaatgccttacgtggtatcacacttagtcttgaaaaaaacaccaaggtgacgtttaaaatttttagtacatatcctcaaattggagctaagttatacttcttttataaccttttgggcatctggtcgagagaagacaagattttctctatttacagtgaggcaataaatatgtttgccaccttt

SEQ ID NO: 191714 - DNA, 702 bp, Homo sapiens
  Payload ID: 17875
  Gene Name: torsin family 1, member B (torsin B)
  ENST ID: ENST00000427860
  CDS Start-End: 1-425
cccgagtggtggcggcgttcgagcccatcaccgtgggcctagccatcggggccgcgtcggccatcaccggctacctgtcctacaatgacatctactgccgcttcgccgagtgctgccgcgaggagcggccgctcaacgcttcggctctcaagctggatttggaggagaagctgtttggacagcatctagccacggaagtgattttcaaggcgctgactggcttcaggaacaacaaaaatcccaagaaaccactgaccctttccttacacggctgggctggcacaggcaagaattttgtcagtcaaattgtggctgaaaatcttcacccaaaaggtctgaagagtaactttgtccacctgtttgtatcgactctgcacttccctcatgagcagaagataaaactgtaccagagttcactgacttgaagtatactcagttaaaatcggggctggaggtgcagacggtgtctgaccggaggatgtggccgtgcccgccgagcactcttgatctgagctgacctgtgtgtgtgtgtgtgggggggtggggccttcacctaagacctctgcagcagacctggacagacaggcccctcccgcctgtccatcgctctagctgctaatacagccctggctgtggaatccttcaccgtctcagctggtatcagccccagcctgccttgtgccatatctcagcttggatctc

SEQ ID NO: 191715 - DNA, 1370 bp, Homo sapiens
  Payload ID: 17876
  Gene Name: torsin family 2, member A
  Uniprot ID: Q8N2E6
  ENST ID: ENST00000336067
  CDS Start-End: 23-751
aacgagctcgggcctcacccggatggcggctgcgacgcgcggctgccggccctggggctcgctcctcgggctgctcgggctggtctcggccgcggccgccgcctgggacctggcttccctgcgctgcaccttgggcgccttttgcgaatgcgacttccggcccgacttgccgggtctggagtgtgacctggctcagcacctggccggccagcatctggccaaggcgctggtggtgaaggcgctgaaggcctttgtgcgggacccagcccccaccaagccgctggtcctctccctgcacggctggaccggcaccggcaaatcctatgtcagctccctgctggcgcactacctcttccagggcggcctccgcagcccccgcgtgcaccacttttctcccgtcctccacttcccccaccccagccacatcgagcgctacaagaaggatctgaagagctgggtccaagggaacctcactgcctgtggccgctccctcttcctcttcgatgagatggacaagatgcccccaggcctgatggaagtcctgcggcctttcctgggctcctcctgggtggtatacgggaccaattaccgcaaagccatcttcatcttcatcagatggcttctcaaactcgggcatcatggaagagcgcctcctagacgcagtggtgcccttcctcccgctccagcggcaccacgtccggcactgcgtgctcaacgagctggcccagctgggcctggagccaagggatgaggttgtccaggctgtgctggacagcaccaccttcttccctgaagacgagcagctcttctcctccaacggctgcaagaccgtggcctcccgaatcgccttcttcctctgactctctgagtggtgtcctcggcccccctgatggccaggccatgcaggaaaggccaggggcctctgtcacaggaacccagagcaccaagtgagatgaacggagtgtcggctaggccacgggacagatggccaggaagggccctggcctctaaactggctcgagagcatcttggccccggccaccttccccagggaaacccctggtcaccccagaacctcactgagccttgacctccccctgcagcctgagccttcttactgtgaattataactcagggactgtggctcgtggcggtgctccctcctcagtctgccacccttgccccttgcctccttggtcgggcaccatacctcctcccctccaccccacaccctgtgtccatatcaagccaggtggagccttctcagtttccagaaatggagggactcaagctgccacttgggcctggttttagatgtttttaattttgtaaaagaaaacaagtataataaactcagctgtgggaccaga

SEQ ID NO: 191716 - DNA, 2477 bp, Homo sapiens
  Payload ID: 17876
  Gene Name: torsin family 2, member A
  Uniprot ID: Q5JU69
  ENST ID: ENST00000373281
  CDS Start-End: 25-786
acaacgagctcgggcctcacccggatggcggctgcgacgcgcggctgccggccctggggctcgctcctcgggctgctcgggctggtctcggccgcggccgccgcctgggacctggcttccctgcgctgcaccttgggcgccttttgcgaatgcgacttccggcccgacttgccgggtctggagtgtgacctggctcagcacctggccggccagcatctggccaaggcgctggtggtgaaggcgctgaaggcctttgtgcgggacccagcccccaccaagccgctggtcctctccctgcacggctggaccggcaccggcaaatcctatgtcagctccctgctggcgcactacctcttccagggcggcctccgcagcccccgcgtgcaccacttttctcccgtcctccacttcccccaccccagccacatcgagcgctacaagaaggatctgaagagctgggtccaagggaacctcactgcctgtggccgctccctcttcctcttcgatgagatggacaagatgcccccaggcctgatggaagtcctgcggcctttcctgggctcctcctgggtggtatacgggaccaattaccgcaaagccatcttcatcttcatcaggtggggcccggctttgcagtgggcacagtgggggggccacttctcagaggttcagctctacagccttagcctgtgctcccagcagaatccagttccccatgggcttagctgggctttcccagtgccctccgccactctcagagatgacattgtcattccgcctggttgatttccctttggacattctcagcaaattctgggctcagtctttttgatcgccacttctttgtggaagccctgccaggtcaagaagttttccctcttttgtggtgaggaggacacaggcctgggaaaaataggaacagagttcttgtcctttagtcccagctctcagaatcctcgctgtgtttcctcaggcagcatggctccgcctctctgagcctctgtctctgcttctgaacagcggggccaataatgatgccccgatgccttcctggaagttcagtgagggaaagtcagttgagggacacaaaagtgttttgtaaactataaagtacgtggcatgtgtaggtgaattacaggggccatggatgtggacaccatggagggggaagtggagcgttttcagtggagttggctcctccccgcactgagccatgttcctatgtcaggtggcagcggggaagcgagggtccaatcctgccctgcgctagtcctcatctgagtctcagcctgggtcccccatggttttagcaacacgggtggcaagcagatcaaccaggtggcattggaggcgtggcgcagccggcgggaccgcgaggagatcctcctgcaggagctggagccggtcatctcccgcgcggtgctggacaacccgcaccgtgagtctggctcagcagccccctcccgggcagcttcaccccacacccaggggccaggctctcccggggtctcatgctttgcccactgacccggcagttctgagcctggctttggcactcccagctttgtgactttgggtgagccttacagcccctgagtcctacacccagaaggcggctgagggaactgaggccagcatttttcctcctgcccctgggggtttggggccggcttctcccctcttgtgaagcacaaagtcccctccccacctacccttcctgcagatggcttctcaaactcgggcatcatggaagagcgcctcctagacgcagtggtgcccttcctcccgctccagcggcaccacgtccggcactgcgtgctcaacgagctggcccagctgggcctggagccaagggatgaggttgtccaggctgtgctggacagcaccaccttcttccctgaagacgagcagctcttctcctccaacggctgcaagaccgtggcctcccgaatcgccttcttcctctgactctctgagtggtgtcctcggcccccctgatggccaggccatgcaggaaaggccaggggcctctgtcacaggaacccagagcaccaagtgagatgaacggagtgtcggctaggccacgggacagatggccaggaagggccctggcctctaaactggctcgagagcatcttggccccggccaccttccccagggaaacccctggtcaccccagaacctcactgagccttgacctccccctgcagcctgagccttcttactgtgaattataactcagggactgtggctcgtggcggtgctccctcctcagtctgccacccttgccccttgcctccttggtcgggcaccatacctcctcccctccaccccacaccctgtgtccatatcaagccaggtggagccttctcagtttccagaaatggagggactcaagctgccacttgggcctggttttagatgtttttaattttgtaaaagaaaacaagtataataaactcagctgtgggaccag

SEQ ID NO: 191717 - DNA, 1523 bp, Homo sapiens
  Payload ID: 17876
  Gene Name: torsin family 2, member A
  Uniprot ID: Q5JU69
  ENST ID: ENST00000373284
  CDS Start-End: 48-1013
cgggcgaggcagttgactgccccacaacgagctcgggcctcacccggatggcggctgcgacgcgcggctgccggccctggggctcgctcctcgggctgctcgggctggtctcggccgcggccgccgcctgggacctggcttccctgcgctgcaccttgggcgccttttgcgaatgcgacttccggcccgacttgccgggtctggagtgtgacctggctcagcacctggccggccagcatctggccaaggcgctggtggtgaaggcgctgaaggcctttgtgcgggacccagcccccaccaagccgctggtcctctccctgcacggctggaccggcaccggcaaatcctatgtcagctccctgctggcgcactacctcttccagggcggcctccgcagcccccgcgtgcaccacttttctcccgtcctccacttcccccaccccagccacatcgagcgctacaagaaggatctgaagagctgggtccaagggaacctcactgcctgtggccgctccctcttcctcttcgatgagatggacaagatgcccccaggcctgatggaagtcctgcggcctttcctgggctcctcctgggtggtatacgggaccaattaccgcaaagccatcttcatcttcatcagcaacacgggtggcaagcagatcaaccaggtggcattggaggcgtggcgcagccggcgggaccgcgaggagatcctcctgcaggagctggagccggtcatctcccgcgcggtgctggacaacccgcaccatggcttctcaaactcgggcatcatggaagagcgcctcctagacgcagtggtgcccttcctcccgctccagcggcaccacgtccggcactgcgtgctcaacgagctggcccagctgggcctggagccaagggatgaggttgtccaggctgtgctggacagcaccaccttcttccctgaagacgagcagctcttctcctccaacggctgcaagaccgtggcctcccgaatcgccttcttcctctgactctctgagtggtgtcctcggcccccctgatggccaggccatgcaggaaaggccaggggcctctgtcacaggaacccagagcaccaagtgagatgaacggagtgtcggctaggccacgggacagatggccaggaagggccctggcctctaaactggctcgagagcatcttggccccggccaccttccccagggaaacccctggtcaccccagaacctcactgagccttgacctccccctgcagcctgagccttcttactgtgaattataactcagggactgtggctcgtggcggtgctccctcctcagtctgccacccttgccccttgcctccttggtcgggcaccatacctcctcccctccaccccacaccctgtgtccatatcaagccaggtggagccttctcagtttccagaaatggagggactcaagctgccacttgggcctggttttagatgtttttaattttgtaaaagaaaacaagtataataaactcagctgtgggaccaga

SEQ ID NO: 191718 - DNA, 2211 bp, Homo sapiens
  Payload ID: 17876
  Gene Name: torsin family 2, member A
  Uniprot ID: Q5JU69
  ENST ID: ENST00000463577
  CDS Start-End: 25-243
acaacgagctcgggcctcacccggatggcggctgcgacgcgcggctgccggccctggggctcgctcctcgggctgctcgggctggtctcggccgcggccgccgcctgggacctggcttccctgcgctgcaccttgggcgccttttgcgaatgcgacttccggcccgacttgccggaaggatctgaagagctgggtccaagggaacctcactgcctgtggccgctccctcttcctcttcgatgagatggacaagatgcccccaggcctgatggaagtcctgcggcctttcctgggctcctcctgggtggtatacgggaccaattaccgcaaagccatcttcatcttcatcaggtggggcccggctttgcagtgggcacagtgggggggccacttctcagaggttcagctctacagccttagcctgtgctcccagcagaatccagttccccatgggcttagctgggctttcccagtgccctccgccactctcagagatgacattgtcattccgcctggttgatttccctttggacattctcagcaaattctgggctcagtctttttgatcgccacttctttgtggaagccctgccaggtcaagaagttttccctcttttgtggtgaggaggacacaggcctgggaaaaataggaacagagttcttgtcctttagtcccagctctcagaatcctcgctgtgtttcctcaggcagcatggctccgcctctctgagcctctgtctctgcttctgaacagcggggccaataatgatgccccgatgccttcctggaagttcagtgagggaaagtcagttgagggacacaaaagtgttttgtaaactataaagtacgtggcatgtgtaggtgaattacaggggccatggatgtggacaccatggagggggaagtggagcgttttcagtggagttggctcctccccgcactgagccatgttcctatgtcaggtggcagcggggaagcgagggtccaatcctgccctgcgctagtcctcatctgagtctcagcctgggtcccccatggttttagcaacacgggtggcaagcagatcaaccaggtggcattggaggcgtggcgcagccggcgggaccgcgaggagatcctcctgcaggagctggagccggtcatctcccgcgcggtgctggacaacccgcaccgtgagtctggctcagcagccccctcccgggcagcttcaccccacacccaggggccaggctctcccggggtctcatgctttgcccactgacccggcagttctgagcctggctttggcactcccagctttgtgactttgggtgagccttacagcccctgagtcctacacccagaaggcggctgagggaactgaggccagcatttttcctcctgcccctgggggtttggggccggcttctcccctcttgtgaagcacaaagtcccctccccacctacccttcctgcagatggcttctcaaactcgggcatcatggaagagcgcctcctagacgcagtggtgcccttcctcccgctccagcggcaccacgtccggcactgcgtgctcaacgagctggcccagctgggcctggagccaagggatgaggttgtccaggctgtgctggacagcaccaccttcttccctgaagacgagcagctcttctcctccaacggctgcaagaccgtggcctcccgaatcgccttcttcctctgactctctgagtggtgtcctcggcccccctgatggccaggccatgcaggaaaggccaggggcctctgtcacaggaacccagagcaccaagtgagatgaacggagtgtcggctaggccacgggacagatggccaggaagggccctggcctctaaactggctcgagagcatcttggccccggccaccttccccagggaaacccctggtcaccccagaacctcactgagccttgacctccccctgcagcctgagccttcttactgtgaattataactcagggactgtggctcgtggcggtgctccctcctcagtctgccacccttgccccttgcctccttggtcgggcaccatacctcctcccctccaccccacaccctgtgtccatatcaagccaggtggagccttctcagtttccagaaatggagggactcaagctgccacttgggcctggttttagatgtttttaattttgtaaaagaaaacaagtataataaactcagctgtgggaccag

SEQ ID NO: 191719 - DNA, 855 bp, Homo sapiens
  Payload ID: 17876
  Gene Name: torsin family 2, member A
  Uniprot ID: Q5JU69
  ENST ID: ENST00000493439
  CDS Start-End: 6-224
cccggatggcggctgcgacgcgcggctgccggccctggggctcgctcctcgggctgctcgggctggtctcggccgcggccgccgcctgggacctggcttccctgcgctgcaccttgggcgccttttgcgaatgcgacttccggcccgacttgccggaaggatctgaagagctgggtccaagggaacctcactgcctgtggccgctccctcttcctcttcgatgagatggacaagatgcccccaggcctgatggaagtcctgcggcctttcctgggctcctcctgggtggtatacgggaccaattaccgcaaagccatcttcatcttcatcagcaacacgggtggcaagcagatcaaccaggtggcattggaggcgtggcgcagccggcgggaccgcgaggagatcctcctgcaggagctggagccggtcatctcccgcgcggtgctggacaacccgcaccgtgagtctggctcagcagccccctcccgggcagcttcaccccacacccaggggccaggctctcccggggtctcatgctttgcccactgacccggcagttctgagcctggctttggcactcccagctttgtgactttgggtgagccttacagcccctgagtcctacacccagaaggcggctgagggaactgaggccagcatttttcctcctgcccctgggggtttggggccggcttctcccctcttgtgaagcacaaagtcccctccccacctacccttcctgcagatggcttctcaaactcgggcatcatggaagagcgcctcctagacgcagtggtgcccttcctcccgctccagcggcaccacgtccggcactgcgtgctcaacgagctggcc

SEQ ID NO: 191720 - DNA, 933 bp, Homo sapiens
  Payload ID: 17876
  Gene Name: torsin family 2, member A
  Uniprot ID: Q5JU69
  ENST ID: ENST00000496460
  CDS Start-End: 44-262
cgaggcagttgactgccccacaacgagctcgggcctcacccggatggcggctgcgacgcgcggctgccggccctggggctcgctcctcgggctgctcgggctggtctcggccgcggccgccgcctgggacctggcttccctgcgctgcaccttgggcgccttttgcgaatgcgacttccggcccgacttgccggaaggatctgaagagctgggtccaagggaacctcactgcctgtggccgctccctcttcctcttcgatgagatggacaagatgcccccaggcctgatggaagtcctgcggcctttcctgggctcctcctgggtggtatacgggaccaattaccgcaaagccatcttcatcttcatcagcaacacgggtggcaagcagatcaaccaggtggcattggaggcgtggcgcagccggcgggaccgcgaggagatcctcctgcaggagctggagccggtcatctcccgcgcggtgctggacaacccgcaccatggcttctcaaactcgggcatcatggaagagcgcctcctagacgcagtggtgcccttcctcccgctccagcggcaccacgtccggcactgcgtgctcaacgagctggcccagctgggcctggagccaagggatgaggttgtccaggctgtgctggacagcaccaccttcttccctgaagacgagcagctcttctcctccaacggctgcaagaccgtggcctcccgaatcgccttcttcctctgactctctgagtggtgtcctcggcccccctgatggccaggccatgcaggaaaggccaggggcctctgtcacaggaacccagagcaccaagtgagatgaacggagtgtcggctaggccacgggacagatggccaggaagggccctggcctctaaactggctcgagagcatcttggccccggccaccttcccca

SEQ ID NO: 191721 - DNA, 831 bp, Homo sapiens
  Payload ID: 17876
  Gene Name: torsin family 2, member A
  Uniprot ID: Q5JU69
  ENST ID: ENST00000463256
  CDS Start-End: 6-224
cccggatggcggctgcgacgcgcggctgccggccctggggctcgctcctcgggctgctcgggctggtctcggccgcggccgccgcctgggacctggcttccctgcgctgcaccttgggcgccttttgcgaatgcgacttccggcccgacttgccggaaggatctgaagagctgggtccaagggaacctcactgcctgtggccgctccctcttcctcttcgatgagatggacaagatgcccccaggcctgatggaagtcctgcggcctttcctgggctcctcctgggtggtatacgggaccaattaccgcaaagccatcttcatcttcatcagatggcttctcaaactcgggcatcatggaagagcgcctcctagacgcagtggtgcccttcctcccgctccagcggcaccacgtccggcactgcgtgctcaacgagctggcccagctgggcctggagccaagggatgaggttgtccaggctgtgctggacagcaccaccttcttccctgaagacgagcagctcttctcctccaacggctgcaagaccgtggcctcccgaatcgccttcttcctctgactctctgagtggtgtcctcggcccccctgatggccaggccatgcaggaaaggccaggggcctctgtcacaggaacccagagcaccaagtgagatgaacggagtgtcggctaggccacgggacagatggccaggaagggccctggcctctaaactggctcgagagcatcttggccccggccaccttccccagggaaacccctggtcaccccagaacctcactgagccttgacctccccctgcagcctgagccttc

SEQ ID NO: 191722 - DNA, 1182 bp, Homo sapiens
  Payload ID: 17877
  Gene Name: torsin family 3, member A
  Uniprot ID: Q9H497
  ENST ID: ENST00000352445
  CDS Start-End: 44-1054
ggctaggccggcagccggatggtcccgcagctcggggccggccatgcttcgcggtccgtggcgccagctttggctctttttcctgctgctgctcccgggcgcgcctgagccccgcggcgcctccaggccgtgggagggaaccgacgagccgggctcggcctgggcctggccgggcttccagcgcctgcaggagcagctcagggcggcgggtgccctctccaagcggtactggacgctcttcagctgccaggtgtggcccgacgactgtgacgaggacgaggaggcagccacggggcccctgggctggcgccttcctctgttgggccagcggtacctggacctcctgaccacgtggtactgcagcttcaaagactgctgccctagaggggattgcagaatctccaacaactttacaggcttagagtgggacctgaatgtgcggctgcatggccagcatttggtccagcagctggtcctaagaacagtgaggggctacttagagacgccccagccagaaaaggcccttgctctgtcgttccacggctggtctggcacaggcaagaacttcgtggcacggatgctggtggagaacctgtatcgggacgggctgatgagtgactgtgtcaggatgttcatcgccacgttccactttcctcaccccaaatatgtggacctgtacaaggagcagctgatgagccagatccgggagacgcagcagctctgccaccagaccctgttcatcttcgatgaagcggagaagctgcacccagggctgctggaggtccttgggccacacttagaacgccgggcccctgagggccacagggctgagtctccatggactatctttctgtttctcagtaatctcaggggcgatataatcaatgaggtggtcctaaagttgctcaaggctggatggtcccgggaagaaattacgatggaacacctggagccccacctccaggcggagattgtggagaccataggtttttcatttctaacaaccagatggccccacctggacctgccaaccagttctgtggcccccacctaggaactgactcagcagaagagaacagcttcgattccccatgcttttactcaccaaattatccttaaaaactctgatccccaagttttctgagactgatttgagtaataataaaactccggtctcccgca

SEQ ID NO: 191723 - DNA, 519 bp, Homo sapiens
  Payload ID: 17877
  Gene Name: torsin family 3, member A
  ENST ID: ENST00000367625
  CDS Start-End: 60-519
gggcttaagggagcctggctaggccggcagccggatggtcccgcagctcggggccggccatgcttcgcggtccgtggcgccagctttggctctttttcctgctgctgctcccgggcgcgcctgagccccgcggcgcctccaggccgtgggagggaaccgacgagccgggctcggcctgggcctggccgggcttccagcgcctgcaggagcagctcagggcggcgggtgccctctccaagcggtactggacgctcttcagctgccaggtgtggcccgacgactgtgacgaggacgaggaggcagccacggggcccctgggctggcgccttcctctgttgggccagcggtacctggacctcctgaccacgtggtactgcagcttcaaagactgctgccctagaggggattgcagaatctccaacaactttacaggcaagaacttcgtggcacggatgctggtggagaacctgtatcgggacgggctgatgagtgactgtgtcaggatgttcatcgccacgt

SEQ ID NO: 191724 - DNA, 2724 bp, Homo sapiens
  Payload ID: 17877
  Gene Name: torsin family 3, member A
  Uniprot ID: Q9H497
  ENST ID: ENST00000367627
  CDS Start-End: 753-1946
cggatttttatgagatataattacattgacatgacgcctcatgatttacccatgactcggggggtttccaaactccaaacacctccagactggagcccgtcaatcagcttcctcttgcttttcgtggactcccactgtggaaacctgctggtgttttgctgcggtttcatttccctctgcggaggagccagggcaaccttggccagacaggcacctagctgtgcccttctttccagggcctcttctccactcagctgactcccctggcctgcctaacgctcctgactgagacggttttccggcttcctctaacaggttggcgggaagttgatctgcaaacgcgaggcaaagcaggagtgtccttattcggtaggcctctgatgggccaccagagccgtccgaaagtcctagcggagtgattgacagtggccatttcaaagcctgagttcaccttctttgcaaccacaatcacgacccagaataaactgcttcctggaagccggctagttgcacctggcctgaagtcagtctcgggactgcctctcaggaccccagacagggtttcgggttcccgcctgggtcacgtgtacggaggctgccagtgcgcactcagcccggcccgccggtcgccacagcaacaccaatcccgggttcaagcccgcctaggaagtgcggtccccgcctgaccgccccgggcttaagggagcctggctaggccggcagccggatggtcccgcagctcggggccggccatgcttcgcggtccgtggcgccagctttggctctttttcctgctgctgctcccgggcgcgcctgagccccgcggcgcctccaggccgtgggagggaaccgacgagccgggctcggcctgggcctggccgggcttccagcgcctgcaggagcagctcagggcggcgggtgccctctccaagcggtactggacgctcttcagctgccaggtgtggcccgacgactgtgacgaggacgaggaggcagccacggggcccctgggctggcgccttcctctgttgggccagcggtacctggacctcctgaccacgtggtactgcagcttcaaagactgctgccctagaggggattgcagaatctccaacaactttacaggcttagagtgggacctgaatgtgcggctgcatggccagcatttggtccagcagctggtcctaagaacagtgaggggctacttagagacgccccagccagaaaaggcccttgctctgtcgttccacggctggtctggcacaggcaagaacttcgtggcacggatgctggtggagaacctgtatcgggacgggctgatgagtgactgtgtcaggatgttcatcgccacgttccactttcctcaccccaaatatgtggacctgtacaaggagcagctgatgagccagatccgggagacgcagcagctctgccaccagaccctgttcatcttcgatgaagcggagaagctgcacccagggctgctggaggtccttgggccacacttagaacgccgggcccctgagggccacagggctgagtctccatggactatctttctgtttctcagtaatctcaggggcgatataatcaatgaggtggtcctaaagttgctcaaggctggatggtcccgggaagaaattacgatggaacacctggagccccacctccaggcggagattgtggagaccatagacaatggctttggccacagccgtcttgtgaaggaaaacctgattgactacttcatccccttcctgcctttggagtaccgtcacgtgaggctgtgtgcacgggatgccttcctgagccaggagctcctgtataaagaagagacactggatgaaatagcccagatgatggtgtatgtccccaaggaggaacaactcttttcttcccagggctgcaagtctatttcccagaggattaactacttcctgtcatgaaggctagaggaagacttcctggaactgcctttcttccactaacaggaccctgggacctgtaggagcaccccgtttgggactgtgaggtgtttgagggtgtggactggcatccagcagccactaacaaacacacaactggtgtgtaaaaggcaggccttacattagaagccaagccaatcctttttcttttttttggaggtcccaccgagatagataggaacttggattgctgaattcaaaaacagagcccattcttaagatcacttggtgccttaaagacacgcattccaaagtggaatgtggttgaagaaagtgggccaggtggttgaagaaagccatgtgggagctcagcaaatcccaagggcttattatgacactccagatggtctccttagcatctcagctcttctgcaaggaagagcttgggtgttaggcctcagaggctgtagggtccttgggttacagagccggggagaacgaagttctgtgacccaggggtggagaatacactctaggtttgcaggctggtgggctttcaaattggtacttccagaggaaagccaagctgcttctgttgtgagcgaatcagccaagagcctgaggctgaagggaaaagtacacagaggaagatattttacaaaccaggtcagtgtaggccaagacttatggtctacagattttggcgggggaggggggaccttttcaaagacaatagggggtcttgacatgtttgttgtatgtaaagatgataagattaaaatttttgattttcctaaaa

SEQ ID NO: 191725 - DNA, 730 bp, Homo sapiens
  Payload ID: 17877
  Gene Name: torsin family 3, member A
  ENST ID: ENST00000447595
  CDS Start-End: 208-730
tgagattgcgccactgcactccagcctggtgacagagcaagactccatctcaaaaaaaaaaaaaaaaagaaagtagtccttgaatcccttctgctacaaagtctgccctctggcttcttattctaaggccaaacaggaggagtaactgattccacccgagagagattcagagttgcttggtttcttggctgttggctgttgtggtggatgggcctgtgtgtgccttttgctgtgactacctctttcctgtccttaggcttagagtgggacctgaatgtgcggctgcatggccagcatttggtccagcagctggtcctaagaacagtgaggggctacttagagacgccccagccagaaaaggcccttgctctgtcgttccacggctggtctggcacaggcaagaacttcgtggcacggatgctggtggagaacctgtatcgggacgggctgatgagtgactgtgtcaggatgttcatcgccacgttccactttcctcaccccaaatatgtggacctgtacaaggagcagctgatgagccagatccgggagacgcagcagctctgccaccagaccctgttcatcttcgatgaagcggagaagctgcacccagggctgctggaggtccttgggccacacttagaacgccgggcccctgagggccacagggctgagtctccatggactatctttctgtttctcagtaatctcaggggcgatataatcaatgagg

SEQ ID NO: 191726 - DNA, 1084 bp, Homo sapiens
  Payload ID: 17877
  Gene Name: torsin family 3, member A
  ENST ID: ENST00000483887
  CDS Start-End: 52-345
gggagcctggctaggccggcagccggatggtcccgcagctcggggccggccatgcttcgcggtccgtggcgccagctttggctctttttcctgctgctgctcccgggcgcgcctgagccccgcggcgcctccaggccgtgggagggaaccgacgagccgggctcggcctgggcctggccgggcttccagcgcctgcaggagcagctcagggcggcgggtgccctctccaagcggtactggacgctcttcagctgccaggtgtggcccgacgactgtgacgaggacgaggaggcagccacggggcccctggctctagggaacgtccgctgtggacatgcctggtgactgccgtctcccttgctgcttttggacgcagggcttgaggaccgacagtgggccgagtcggggctgggagttagaatctgagttctgggtgtccctctgtccctgacaagttgtgtggcaaggttgccgcatcactgtagagcaccggatggtctcctctcggtctcacagctcctccttttccaggctggcgccttcctctgttgggccagcggtacctggacctcctgaccacgtggtactgcagcttcaaagactgctgccctagaggggattgcagaatctccaacaactttacaggcttagagtgggacctgaatgtgcggctgcatggccagcatttggtccagcagctggtcctaagaacagtgaggggctacttagagacgccccagccagaaaaggcccttgctctgtcgttccacggctggtctggcacaggcaagaacttcgtggcacggatgctggtggagaacctgtatcgggacgggctgatgagtgactgtgtcaggatgttcatcgccacgttccactttcctcaccccaaatatgtggacctgtacaaggagcagctgatgagccagatccgggagacgcagcagctctgccaccagaccctgttcatcttcgatgaagcggagaagctgcacccagggctgctggaggtccttgggccacacttagaacgccgggcccctgagggccacagggctgagtctccatggactatctttctgtt

SEQ ID NO: 191727 - DNA, 4148 bp, Homo sapiens
  Payload ID: 17878
  Gene Name: torsin family 4, member A
  Uniprot ID: Q9NXH8
  ENST ID: ENST00000357503
  CDS Start-End: 197-1468
gacccacaggtgtcgctgcccctccaggccgaagctggcccaggaggcccctggcccaccccctcgccctgggaggcgcatttcctgcttggagtctcaggccccagcgtctggcacaggcaggggcctgcggagctgagggcagtggaccagctgcagggagggcgacctgtatgcggagcgccgttcctgcgacatggaccgcggccagcccagcctggagcctgctgccgcggccccccgagcctcgggccggtgcgtgatcgcgcccgtgcgcgctgtgctccgcctgcgccgccgggtgtgtgtcctacgcaaacggcgcctcctgcagccgggtggggggcccgacgtcgggaccggggcgcccaggccgggctgcagcccccgggcaccgcgcgcggacctggaccagccaaagttcttcaccttcgacagccccgcggagctaccctccaggacgccacgcaagaagcgccggcgcagccgcctggtgctttacccggagacctcgcgcaagtatcggccgcgcgtggagcacaggagccgcgcgcagcgctgccttctgctgctagtcgccatcgtgggcttccaagttctcaacgctatcgagaacctggacgataacgcgcagcgctatgacctcgacgggctggagaaagcgctgcagcgcgcggtgttcggccagcccgctgccgtatcgcgcatcgtggcgctgatgcgggactacctggccacgcatgtgcacagtcgtccgctcctcctggcgctgcacgggcccagtggcgtgggcaagagccacgtgggccgcctgctggcgcgccacttccgctcggtgctggaggacagcgcgctcgtgctgcaataccatgcgcggcaccactgccccgaggcgcgcgccgcacaggactgccgcgaggagctggcgcggcgcgtggccgacgtggtggcgcgggccgaagcggaggagaagaccccactcttggtgctggacgacgtggagctcatgccgcggccgctgctggacgagctgcacggcttcctgcagccgcagcgctcccaccacttccacaacgccatctacgtgctcctcagtggcgcgggtggcgccgaggtcacgcgcttcgtgctgcagaacgcgtcccgcgcgctgcccctgcgccccgacggcttccgcagtgccgaggccgcagcggcgcaggcggaagaagacctgcgcgccagcctgctggctgtgctgtcccgggagcatccgctgtggcaggccgcggccatcgtgccgtttctgctgctggacaagcgggatgtggtcagctgcttccgggacgagatggcgggtgagggcttctttcctgaccaggcccgcgcggagaacctggccgcgcagctcagcttctaccgcgtggctggccgcgagtttgccgtcaccggctgcaagcaggtggtggccacggtgaacctcctgtagtggaggcgcaggacgggacgtttgggttgatggcggcagtaggagggcgaccagggaccttgtgggctggtgcaggcccctgaggtttctagtgaatttgtggctgcccggctggtgggtgcggatcagcttggagctctgcttccaggtccacacccgcctcagagtccggagtctgtccctgggggcggcaggacagcagccacctccctcccaaacttgcccattgccctgctgggcgtcccaggcatggtctggtgcgttctccctgtggccccaagaggtgggttcccatggtacaaggatgatctcagggccaacaattcccggggtcacacagctgggacgtgaccccgcctcttgggggtggtcgcgtgttgctcagtgctgaagtggggttctcattccggcccccctggagatgaccccggaggaggccacagccaaccatgacagtgctggggctctggctgccttctccacccaccccacccctcactcaggtcgtgttttcaggagctcaaggctggagtgtcttgacagtaaggggaggggagcggaggcggaggcgcctcaggcagcctctccccctccttcctggaccccccaaccccgggcccgccagccctggcttgggcttactgggtgaccgagagcccgcggggcaagcgggaggtgcctaggcctctccccatccccctcttctccgcacgtgggacccttagcccgtggccagtcccctggtcaccacgattgcgcgacctccctttccctggggccttttgtgccccgagttccgcccacccgcaccctctgcgcagagcgccctccccacgccagtcgaccccacaccccacactccccacgcgccgcctcccggaagccctcctggacgcctcccgtggatgggcccaccgcgcccacgggggctttaggggaaggtgctttgggcgttttttgcgccatgtctcctcggggccggcggttgcctcgggacggttctcgcctcctcccacagccccggtgtctgggacgcacccggcagccccgctgctgccgccttgtggcgcgcccggcccagccggtggcttctgtggtcgccgggggctgagcgcgcggctgggccctgagtcccccaggccgccccgatcctctgtccccgccgccggccccgctgcagtcccaacccgggcctgcccgggaggagcgcaggggcggcgatgaccagtcccgaaaggggctcagagggcagcgaggaggtttcacgccggtgcggggcgccgtcgaggtgggggcaccgcgaaggtggaggcggggccgcgccggaagccccgagtcgagcgcacacggcgggcgcccctggcaagtgggactcctccggccccgaggcctgaactcagcccggagaccgcgcccaccagcgccggtgtccccggaggggccccgctagttccctgagcagaggtcctgcggcttcccggagggtgtcctgttctctcccccgcctcgcatccattctcgccctggtggttggtgtctgtggtcgggggcgagggccgtctagtggagacggggattcaggccgcttgaaagtctgggatctctgggcggatggcagcggctccgcggagctcgagctcggcgcgcaggtcctgggcccagggcgggagcgctagcgagagggctgccccgtcctgcccagagggtcctgaggactcccgctgctcctggagtcttggggaggggtccggctccacggggtgggggtgggggctaccaggaaacctttgcctcctggggctgtgcaggaccggctagccagcgctgggaaccagggctgagttcagcccagctctgtccaccccaaccccagggctaggggaaggagctgggagaaggagccccacctctcccaggcgagtatctgtcccaggagcccacacagagggacacccagctctggtctggccttcgtgttggcttcaaggtggtaacagagagagctgcagagtgggggtgtgtttgccagtccctgcatgggtgaatgttggggtgcccactgctccccaggcaggacccccaggactgtcagctccccttcccacagagcacccacctggaggtgtcacctgccggcaagcgtgggccattcatccacctgtcagtcaacaacacccgctgagcatcggcttgtatcaaaaggtccagacctaaggggaaattttatctctttctttctttctttcttttttttttgacacagagttttgctcttgttgcccaggctggagtgcaatgacacgatctcggttcactgcaacctctgcctcctgggttcaagcgattctcctgcctcagcctcccgagtagctgggattacaggcgcccgccatcacgcccgggtaatttttttgtattgttggtagagacggtgattcactatgttggccaggctagtcacgaactcctgacctcgtgatccgcccacctcggcctcccaaagtgctgggattacaggtgtgagccaccgtgcccggcctctttttatttattcctaaaatattaccttgaggccaaattctgcgcttaaggagaatgtgcaccaagtgctggggtgggggctggtaataaacgaggccacaaatcatgcttgttaataaattgtgtggttcaaatctga

SEQ ID NO: 191728 - DNA, 4321 bp, Homo sapiens
  Payload ID: 17879
  Gene Name: tousled-like kinase 1
  ENST ID: ENST00000359766
  CDS Start-End: 68-418
cgggtgccggtgccgttgccgccgctgccgtcgcagggggggagtcgggttcccagaaagtagcttgatgagtgtccaaagtagcagtggaagtttggaggggccgccatcttggtcccagctctccacgtctccaaccccgggctcggcggcggcggccaggtccctgctgaatcacacgccgccatccgggaggcccagggaaggtgcaatggatgagcttcatagtctggatccaagaaggcaagagttattggaagctagatttactggagttgcaagtgggagcactggaagtacgggcagttgcagtgttggagctaaagcctcaacaaataacgaaagctctaatcacagttttggaagcttgggatctttaagtgacaaagaatcagagaaacaactggcaggcagctgaaaggactgtgcaagtgacgggactttatctgcagtaggttcccttgagacaccggagaagaaacaatcggaatcatccaggggaagaaagagaaaagcagaaaaccagaatgaaagtagtcagggaaaaagtattgggggacgtggccacaaaattagcgactattttgaataccagggtggaaatggctcaagtccagtaagaggcatacctcctgcaatccgttctcctcaaaattcacattcacattccactccttcctcatctgttcgaccgaatagcccttctcctactgcattagcatttggggaccaccctattgtacaaccaaagcaattatcctttaaaattattcagactgatctcacaatgctgaaattagcagcattagaaagtaataaaatccaggacctggaaaagaaggagggacgtatagatgatttgctcagggctaactgtgatctcagacggcaaatagatgaacaacaaaaattacttgaaaaatacaaagaacgattaaataagtgcatatcaatgagcaagaaacttcttattgaaaagagtacacaagaaaagctgtcaagcagagagaagagtatgcaagatcgattacgcctcgggcactttacaacagttagacatggcgcttcatttactgaacaatggacagatggttttgcatttcagaatcttgtgaagcaacaagaatgggtgaatcagcaaagggaagatattgaaaggcaaaggaaacttctagccaaacgcaaacctcccacagctaataattctcaggcaccctctaccaattctgaaccaaaacaaaggaaaaacaaagcagtcaatggagcagagaatgatccctttgttagaccaaatttaccacaactgttgactttggcagaatatcatgaacaggaagaaattttcaaacttagactaggacatctcaaaaagagataacagtatagcaacaactctgccactgaaatcctgttctctgaccgatattggcacctgcaaagagaaacaaccagtaacaggcagcagcagcatcagtattaatcttccatgatgaaatctttacaggtcaagaacaagtacacagctcttttctcactccttcacagtggaccatgcaactagttgaaatggaagacaatggattgtctacaagccttttgaacagtggagaatgcagggcgttggctttaggaagaggcagaaatccaggcagaacttgaacgtttggaaagagtcagaaatcttcacatacgtgagctgaaaagaataaacaatgaagataattcacagttcaaagatcacccaacattaaatgaaagatatttattacttcatctgcttggtagaggtggctttagtgaagtgtataaggcttttgacctttatgaacaaagatatgctgctgtgaagatacatcagcttaataaaagctggagagatgagaagaaagaaaactaccacaaacatgcctgcagagagtatagaatacacaaagaactggatcaccccagaatagttaaactctatgattatttctccttggatacagatacgttttgtacagtgttagaatactgtgaaggcaatgacttggatttctatctgaagcaacacaagttaatgtcagagaaagaagctcggtctattgtaatgcagattgtaaatgcactaagatatctcaatgagatcaaaccccctattatacattatgatcttaagccaggaaacatcctactggtagatggaacagcatgtggtgaaatcaaaatcactgattttggtctgtccaagattatggatgatgatagctatggtgtagatggaatggatctaacttcccagggggcaggcacttactggtatttacctcctgagtgttttgtagttggaaaagagccaccaaagatttccaacaaggttgatgtatggtcggttggagtcatcttctttcagtgtctttatggtagaaagccatttggtcacaatcaatctcaacaagacattcttcaagaaaatacaatattaaaagccacagaagtccagttccctgtaaaaccggttgtaagcagtgaagccaaggcatttataagacgctgtttggcatatcgaaaagaagatcgatttgatgtgcaccagctggcaaatgacccataccttctcccacacatgagaagatcaaattcttcaggaaacctacacatggctgggctgacagcatcccctacacccccttcttcaagcataattacttactgactttcctccaagattggcatgatatctttgaatttgcttccagatgcacacttaagtttgagagcatttgagtgtttgttttctttttcttttttttttttttttttttttacacaagacgtggttaagaactgtttgtgaactgaagttcctcatagtgtcatttgtatgagagaggatcatggacaatgaataaatgcacacttctgactataattttgagcagtgaaggaaggatgactgcctgttacacagaaacaggaataccatgttaagatagaggaaaaaaattttgtttatttgggggaacactgtaaataacgtttataatacttaaatacatttggttgttactagagagttctaatatgaagggtagtttttcattatttaaaaacacatggaaaaatatgagacatatttctaacatacgaactatagtgcctggatacattcttcagcatttggcagttaatctgctgaaaccaaagtaagaactgaatgacagtgacagttgtgttttatagtaatagaatgtgagagttagaatctttggacaaagttaggctttgtcatttgcctattcagacttttaccaagttgtacctcgagatcacatgtccgttttctttcactggttatattaaagggagagctattatttctaaatactttacacctttgacaaaatgagctgcttgtgttgaaatcagttgaattcactaaattataatattgccagtgttttcaacacgttagaattgataacaggtatttttcttttgttaccaggccttgttcatcaaaacaggtgacagtgagtaaccaaatgcagaccagttctatgcaggataatgataaattcccttctagctctattgtaaattgttgtacagatgtcatatttcaattactaagtttcagcagcttattcttgtacaaatgtttaaaatatggcttttctaattggatattgtattttttttaagtcttcttgaaggcactctaattgctgctaaatgatgttgcttctttgctaaaaaattaaatgacctagaaggtgcaagttgactgtacatcatagatattaaaaagcagacagtcattaacaatcaagatgtaaaagtgatccatgttggacataattgagtttttaaatcagtttattgggttctagggctgtagaacacatagatactagatttttaatttgttcatggttattctacatttctagaaagttcttatcagcaagatggtcccataagcaaatttcttgtggtttgtacagatttgttaaaatgtgaacgttttctaactgcctcgtagggtagaaaccaatatttttcaggatgctgtatttcactcctgtaaggactttttctttattgtcacattcataatgctgatacttacatgtaagttgttcatgttgcagaaaaaggttatacgtaccacggattctctttaatattgtacagttaaactgtatttctgatgttgcaagccattttgttttttcattgtacatagacacattgtctctttaaaatgctgctgaaattgtagagagtatagccaaaacagtaataaacaatgacagttaaaatgtaaagactatgaaaa

SEQ ID NO: 191729 - DNA, 5726 bp, Homo sapiens
  Payload ID: 17879
  Gene Name: tousled-like kinase 1
  Uniprot ID: Q9UKI8
  ENST ID: ENST00000360843
  CDS Start-End: 406-2769
gacgccgggggccgacgcactgcagaggtgccggcaggttccgcccgcggaagtgtcctcggccggcgcagcccgcgctccgcccgcgctccgaccccggcccggctggcaccccctcgacgcctccgccgccgcgctcctttcctcctcctctcctctggcgcgcccgctcgctccctcgcttctccccctttccctcctccctgtcccctctccttccctcacctctttcctccccacctcccctcttctcggtttcctcccccatccccttgactctcccctcccagccctcgctctctcgctcgccctcagcgcggcccccgccatgacggaggcgggtgccggtgccgttgccgccgctgccgtcgcagggggggagtcgggttcccagaaagtagcttgatgagtgtccaaagtagcagtggaagtttggaggggccgccatcttggtcccagctctccacgtctccaaccccgggctcggcggcggcggccaggtccctgctgaatcacacgccgccatccgggaggcccagggaaggtgcaatggatgagcttcatagtctggatccaagaaggcaagagttattggaagctagatttactggagttgcaagtgggagcactggaagtacgggcagttgcagtgttggagctaaagcctcaacaaataacgaaagctctaatcacagttttggaagcttgggatctttaagtgacaaagaatcagagacaccggagaagaaacaatcggaatcatccaggggaagaaagagaaaagcagaaaaccagaatgaaagtagtcaggggttccccaacctcccggtcttccagtccttggcctattgggaaatgggtcgtacagcaggaggaaaaagtattgggggacgtggccacaaaattagcgactattttgaataccagggtggaaatggctcaagtccagtaagaggcatacctcctgcaatccgttctcctcaaaattcacattcacattccactccttcctcatctgttcgaccgaatagcccttctcctactgcattagcatttggggaccaccctattgtacaaccaaagcaattatcctttaaaattattcagactgatctcacaatgctgaaattagcagcattagaaagtaataaaatccaggacctggaaaagaaggagggacgtatagatgatttgctcagggctaactgtgatctcagacggcaaatagatgaacaacaaaaattacttgaaaaatacaaagaacgattaaataagtgcatatcaatgagcaagaaacttcttattgaaaagagtacacaagaaaagctgtcaagcagagagaagagtatgcaagatcgattacgcctcgggcactttacaacagttagacatggcgcttcatttactgaacaatggacagatggttttgcatttcagaatcttgtgaagcaacaagaatgggtgaatcagcaaagggaagatattgaaaggcaaaggaaacttctagccaaacgcaaacctcccacagctaataattctcaggcaccctctaccaattctgaaccaaaacaaaggaaaaacaaagcagtcaatggagcagagaatgatccctttgttagaccaaatttaccacaactgttgactttggcagaatatcatgaacaggaagaaattttcaaacttagactaggacatctcaaaaaggaagaggcagaaatccaggcagaacttgaacgtttggaaagagtcagaaatcttcacatacgtgagctgaaaagaataaacaatgaagataattcacagttcaaagatcacccaacattaaatgaaagatatttattacttcatctgcttggtagaggtggctttagtgaagtgtataaggcttttgacctttatgaacaaagatatgctgctgtgaagatacatcagcttaataaaagctggagagatgagaagaaagaaaactaccacaaacatgcctgcagagagtatagaatacacaaagaactggatcaccccagaatagttaaactctatgattatttctccttggatacagatacgttttgtacagtgttagaatactgtgaaggcaatgacttggatttctatctgaagcaacacaagttaatgtcagagaaagaagctcggtctattgtaatgcagattgtaaatgcactaagatatctcaatgagatcaaaccccctattatacattatgatcttaagccaggaaacatcctactggtagatggaacagcatgtggtgaaatcaaaatcactgattttggtctgtccaagattatggatgatgatagctatggtgtagatggaatggatctaacttcccagggggcaggcacttactggtatttacctcctgagtgttttgtagttggaaaagagccaccaaagatttccaacaaggttgatgtatggtcggttggagtcatcttctttcagtgtctttatggtagaaagccatttggtcacaatcaatctcaacaagacattcttcaagaaaatacaatattaaaagccacagaagtccagttccctgtaaaaccggttgtaagcagtgaagccaaggcatttataagacgctgtttggcatatcgaaaagaagatcgatttgatgtgcaccagctggcaaatgacccataccttctcccacacatgagaagatcaaattcttcaggaaacctacacatggctgggctgacagcatcccctacacccccttcttcaagcataattacttactgactttcctccaagattggcatgatatctttgaatttgcttccagatgcacacttaagtttgagagcatttgagtgtttgttttctttttcttttttttttttttttttttttacacaagacgtggttaagaactgtttgtgaactgaagttcctcatagtgtcatttgtatgagagaggatcatggacaatgaataaatgcacacttctgactataattttgagcagtgaaggaaggatgactgcctgttacacagaaacaggaataccatgttaagatagaggaaaaaaattttgtttatttgggggaacactgtaaataacgtttataatacttaaatacatttggttgttactagagagttctaatatgaagggtagtttttcattatttaaaaacacatggaaaaatatgagacatatttctaacatacgaactatagtgcctggatacattcttcagcatttggcagttaatctgctgaaaccaaagtaagaactgaatgacagtgacagttgtgttttatagtaatagaatgtgagagttagaatctttggacaaagttaggctttgtcatttgcctattcagacttttaccaagttgtacctcgagatcacatgtccgttttctttcactggttatattaaagggagagctattatttctaaatactttacacctttgacaaaatgagctgcttgtgttgaaatcagttgaattcactaaattataatattgccagtgttttcaacacgttagaattgataacaggtatttttcttttgttaccaggccttgttcatcaaaacaggtgacagtgagtaaccaaatgcagaccagttctatgcaggataatgataaattcccttctagctctattgtaaattgttgtacagatgtcatatttcaattactaagtttcagcagcttattcttgtacaaatgtttaaaatatggcttttctaattggatattgtattttttttaagtcttcttgaaggcactctaattgctgctaaatgatgttgcttctttgctaaaaaattaaatgacctagaaggtgcaagttgactgtacatcatagatattaaaaagcagacagtcattaacaatcaagatgtaaaagtgatccatgttggacataattgagtttttaaatcagtttattgggttctagggctgtagaacacatagatactagatttttaatttgttcatggttattctacatttctagaaagttcttatcagcaagatggtcccataagcaaatttcttgtggtttgtacagatttgttaaaatgtgaacgttttctaactgcctcgtagggtagaaaccaatatttttcaggatgctgtatttcactcctgtaaggactttttctttattgtcacattcataatgctgatacttacatgtaagttgttcatgttgcagaaaaaggttatacgtaccacggattctctttaatattgtacagttaaactgtatttctgatgttgcaagccattttgttttttcattgtacatagacacattgtctctttaaaatgctgctgaaattgtagagagtatagccaaaacagtaataaacaatgacagttaaaatgtaaagactatgaaaattacattggaagggagctttcaagatggtaggatattgactaactgagctccttcacttaaaaatcagctgaataaattccttaagtatacttcaagacaagtgtaaattgtttcaagctgttaaagttaaacctaataaccattatcaaggcaactcctgggtaagtaacacttagaaccatcaagagtggtttaaggggctggctatacccattcctctgtagagcacagagaaatcctattaaaaaaaaaatactacatggtaatgaaatcttagcattgattgagtgctttacgtgctgcctgcaagttttcagttttgttgttagagttttcgtctttatgaatgataaagtcctatgttcataaagtaacatttaaattcctgaactaaaaggaaatgcctgttgtgcttaaaattttggggagatacgaagtgaatgtgtaaatctaactttgaggttcagtaagttaagtagtatagacctagagatcactgctttaccattttactttcaaatgaatgagagcgactgctagtggcagaacgcagaaaaggggaaaaacaagccatgaaatgaagttgctttcctgacctgggtttaggtcatcattttaaaatcaaagatgtgtaggagatgaatcaacttatagacccatattttccttctaaaagtttcccaaagaaatgttatagattttgaataacatgccagtgacccagcaggtccaagatggctaaccaagatggctaatttagccacattgaataacttacttttaccctcacatggaaagttggtatctattgctaaatgatttcaaggtcactctgacagtctttgacactgttttttttagggttttattgttttctggtctcctggtgtctgtcctcagaattaaagcatgtcctgcatccctaagatgatagccaaggcctctcttttattaagagtcagcactgatgtagggtaaaatcaacagtttttgcatatgattttaaaatctttctttgatttgaatttgctttagtgtgtgcatgttgagaggaagtaagtgtagaaaccaccctaatttgtaagttgggagttggagatacttggtggtttttcaaaaataaagactcaatcttttttttttttttaaacactcactaccatctccttctaaaacaactctgtcagtttaaatggcatataaaatgtgaacaaacacctcattacatgaagtcaaaatggtgaagagcttcagtgaaacatttaaagagtatattgtgtgttgttttgctgttcatcattacttattaaatgcagtaatgttgattgcc

SEQ ID NO: 191730 - DNA, 2783 bp, Homo sapiens
  Payload ID: 17879
  Gene Name: tousled-like kinase 1
  ENST ID: ENST00000409443
  CDS Start-End: 473-1714
aactgatgcagaggttaccccaccgcctcagccgccacccacagcccgccgccgccgcctcccgggcgacgccgggggccgacgcactgcagaggtgccggcaggttccgcccgcggaagtgtcctcggccggcgcagcccgcgctccgcccgcgctccgaccccggcccggctggcaccccctcgacgcctccgccgccgcgctcctttcctcctcctctcctctggcgcgcccgctcgctccctcgcttctccccctttccctcctccctgtcccctctccttccctcacctctttcctccccacctcccctcttctcggtttcctcccccatccccttgactctcccctcccagccctcgctctctcgctcgccctcagcgcggcccccgccatgacggaggcgggtgccggtgccgttgccgccgctgccgtcgcagggggggagtcgggttcccagaaagtagcttgatgagtgtccaaagtagcagtggaagtttggaggggccgccatcttggtcccagctctccacgtctccaaccccgggctcggcggcggcggccaggtccctgctgaatcacacgccgccatccgggaggcccagggaaggtgcaatggatgagcttcatagtctggatccaagaaggcaagagttattggaagctagatttactggagttgcaagtgggagcactggaagtacgggcagttgcagtgttggagctaaagcctcaacaaataacgaaagctctaatcacagttttggaagcttgggatctttaagtgacaaagaatcagagacaccggagaagaaacaatcggaatcatccaggggaagaaagagaaaagcagaaaaccagaatgaaagtagtcagggaaaaagtattgggggacgtggccacaaaattagcgactattttgaataccagggtggaaatggctcaagtccagtaagaggcatacctcctgcaatccgttctcctcaaaattcacattcacattccactccttcctcatctgttcgaccgaatagcccttctcctactgcattagcatttggggaccaccctattgtacaaccaaagcaattatcctttaaaattattcagactgatctcacaatgctgaaattagcagcattagaaagtaataaaatccaggacctggaaaagaaggagggacgtatagatgatttgctcagggctaactgtgatctcagacggcaaatagatgaacaacaaaaattacttgaaaaatacaaagaacgattaaataagtgcatatcaatgagcaagaaacttcttattgaaaagagtacacaagaaaagctgtcaagcagagagaagagtatgcaagatcgattacgcctcgggcactttacaacagttagacatggcgcttcatttactgaacaatggacagatggttttgcatttcagaatcttgtgaagcaacaagaatgggtgaatcagcaaagggaagatattgaaaggcaaaggaaacttctagccaaacgcaaacctcccacagctaataattctcaggcaccctctaccaattctgaaccaaaacaaaggaaaaacaaagcagtcaatggagcagagaatgatccctttgttagaccaaatttaccacaactgttgactttggcagaatatcatgaacaggaagaaattttcaaacttagactaggacatctcaaaaagagataacagtatagcaacaactctgccactgaaatcctgttctctgaccgatattggcacctgcaaagagaaacaaccagtaacaggcagcagcagcatcagtattaatcttccatgatgaaatctttacaggtcaagaacaagtacacagctcttttctcactccttcacagtggaccatgcaactagttgaaatggaagacaatggattgtctacaagccttttgaacagtggagaatgcagggcgttggctttaggaagaggcagaaatccaggcagaacttgaacgtttggaaagagtcagaaatcttcacatacgtgagctgaaaagaataaacaatgaagataattcacagttcaaagatcacccaacattaaatgaaagatatttattacttcatctgcttggtagaggtggctttagtgaagtgtataaggcttttgacctttatgaacaaagatatgctgctgtgaagatacatcagcttaataaaagctggagagatgagaagaaagaaaactaccacaaacatgcctgcagagagtatagaatacacaaagaactggatcaccccagaatagttaaactctatgattatttctccttggatacagatacgttttgtacagtgttagaatactgtgaaggcaatgacttggatttctatctgaagcaacacaagttaatgtcagagaaagaagctcggtctattgtaatgcagattgtaaatgcactaagatatctcaatgagatcaaaccccctattatacattatgatcttaagccaggaaacatcctactggtagatggaacagcatgtggtgaaatcaaaatcactgattttggtctgtccaagattatggatgatgatagctatggtgtagatggaatggatctaacttcccagggggcaggcacttactggtatttacctcctgagtgttttgtagttggaaaagagccaccaaagatttccaacaaggttgatgtatggtcggttggagtcatcttctttcagtgtctttatggtagaaagccatttggtcacaatcaatctcaacaagacattcttc

SEQ ID NO: 191731 - DNA, 539 bp, Homo sapiens
  Payload ID: 17879
  Gene Name: tousled-like kinase 1
  ENST ID: ENST00000453628
  CDS Start-End: 54-539
aaattatctgaaagtgttacttcccaacccccacccttcagcagttgttctaaatggctgttttattcttgtatgatttgaaaactactggcaagacaccggagaagaaacaatcggaatcatccaggggaagaaagagaaaagcagaaaaccagaatgaaagtagtcaggggttccccaacctcccggtcttccagtccttggcctattgggaaatgggtcgtacagcaggaggaaaaagtattgggggacgtggccacaaaattagcgactattttgaataccagggtggaaatggctcaagtccagtaagaggcatacctcctgcaatccgttctcctcaaaattcacattcacattccactccttcctcatctgttcgaccgaatagcccttctcctactgcattagcatttggggaccaccctattgtacaaccaaagcaattatcctttaaaattattcagactgatctcacaatgctgaaattagcagcattagaaagtaataaaatccaggacctggaaaagaaggaggga

SEQ ID NO: 191732 - DNA, 2156 bp, Homo sapiens
  Payload ID: 17879
  Gene Name: tousled-like kinase 1
  Uniprot ID: Q9UKI8
  ENST ID: ENST00000434911
  CDS Start-End: 91-2103
attacaagcactttcaaaatgccaacatttccagaataaattatctgaaagtgttacttcccaacccccacccttcagcagttgttctaaatggctgttttattcttgtatgatttgaaaactactggcaagacaccggagaagaaacaatcggaatcatccaggggaagaaagagaaaagcagaaaaccagaatgaaagtagtcagggaaaaagtattgggggacgtggccacaaaattagcgactattttgaataccagggtggaaatggctcaagtccagtaagaggcatacctcctgcaatccgttctcctcaaaattcacattcacattccactccttcctcatctgttcgaccgaatagcccttctcctactgcattagcatttggggaccaccctattgtacaaccaaagcaattatcctttaaaattattcagactgatctcacaatgctgaaattagcagcattagaaagtaataaaatccaggacctggaaaagaaggagggacgtatagatgatttgctcagggctaactgtgatctcagacggcaaatagatgaacaacaaaaattacttgaaaaatacaaagaacgattaaataagtgcatatcaatgagcaagaaacttcttattgaaaagagtacacaagaaaagctgtcaagcagagagaagagtatgcaagatcgattacgcctcgggcactttacaacagttagacatggcgcttcatttactgaacaatggacagatggttttgcatttcagaatcttgtgaagcaacaagaatgggtgaatcagcaaagggaagatattgaaaggcaaaggaaacttctagccaaacgcaaacctcccacagctaataattctcaggcaccctctaccaattctgaaccaaaacaaaggaaaaacaaagcagtcaatggagcagagaatgatccctttgttagaccaaatttaccacaactgttgactttggcagaatatcatgaacaggaagaaattttcaaacttagactaggacatctcaaaaaggaagaggcagaaatccaggcagaacttgaacgtttggaaagagtcagaaatcttcacatacgtgagctgaaaagaataaacaatgaagataattcacagttcaaagatcacccaacattaaatgaaagatatttattacttcatctgcttggtagaggtggctttagtgaagtgtataaggcttttgacctttatgaacaaagatatgctgctgtgaagatacatcagcttaataaaagctggagagatgagaagaaagaaaactaccacaaacatgcctgcagagagtatagaatacacaaagaactggatcaccccagaatagttaaactctatgattatttctccttggatacagatacgttttgtacagtgttagaatactgtgaaggcaatgacttggatttctatctgaagcaacacaagttaatgtcagagaaagaagctcggtctattgtaatgcagattgtaaatgcactaagatatctcaatgagatcaaaccccctattatacattatgatcttaagccaggaaacatcctactggtagatggaacagcatgtggtgaaatcaaaatcactgattttggtctgtccaagattatggatgatgatagctatggtgtagatggaatggatctaacttcccagggggcaggcacttactggtatttacctcctgagtgttttgtagttggaaaagagccaccaaagatttccaacaaggttgatgtatggtcggttggagtcatcttctttcagtgtctttatggtagaaagccatttggtcacaatcaatctcaacaagacattcttcaagaaaatacaatattaaaagccacagaagtccagttccctgtaaaaccggttgtaagcagtgaagccaaggcatttataagacgctgtttggcatatcgaaaagaagatcgatttgatgtgcaccagctggcaaatgacccataccttctcccacacatgagaagatcaaattcttcaggaaacctacacatggctgggctgacagcatcccctacacccccttcttcaagcataattacttactgactttcctccaagattggcatgatatctttgaatttgcttccagatgcacactt

SEQ ID NO: 191733 - DNA, 5663 bp, Homo sapiens
  Payload ID: 17879
  Gene Name: tousled-like kinase 1
  Uniprot ID: Q9UKI8
  ENST ID: ENST00000431350
  CDS Start-End: 406-2706
gacgccgggggccgacgcactgcagaggtgccggcaggttccgcccgcggaagtgtcctcggccggcgcagcccgcgctccgcccgcgctccgaccccggcccggctggcaccccctcgacgcctccgccgccgcgctcctttcctcctcctctcctctggcgcgcccgctcgctccctcgcttctccccctttccctcctccctgtcccctctccttccctcacctctttcctccccacctcccctcttctcggtttcctcccccatccccttgactctcccctcccagccctcgctctctcgctcgccctcagcgcggcccccgccatgacggaggcgggtgccggtgccgttgccgccgctgccgtcgcagggggggagtcgggttcccagaaagtagcttgatgagtgtccaaagtagcagtggaagtttggaggggccgccatcttggtcccagctctccacgtctccaaccccgggctcggcggcggcggccaggtccctgctgaatcacacgccgccatccgggaggcccagggaaggtgcaatggatgagcttcatagtctggatccaagaaggcaagagttattggaagctagatttactggagttgcaagtgggagcactggaagtacgggcagttgcagtgttggagctaaagcctcaacaaataacgaaagctctaatcacagttttggaagcttgggatctttaagtgacaaagaatcagagacaccggagaagaaacaatcggaatcatccaggggaagaaagagaaaagcagaaaaccagaatgaaagtagtcagggaaaaagtattgggggacgtggccacaaaattagcgactattttgaataccagggtggaaatggctcaagtccagtaagaggcatacctcctgcaatccgttctcctcaaaattcacattcacattccactccttcctcatctgttcgaccgaatagcccttctcctactgcattagcatttggggaccaccctattgtacaaccaaagcaattatcctttaaaattattcagactgatctcacaatgctgaaattagcagcattagaaagtaataaaatccaggacctggaaaagaaggagggacgtatagatgatttgctcagggctaactgtgatctcagacggcaaatagatgaacaacaaaaattacttgaaaaatacaaagaacgattaaataagtgcatatcaatgagcaagaaacttcttattgaaaagagtacacaagaaaagctgtcaagcagagagaagagtatgcaagatcgattacgcctcgggcactttacaacagttagacatggcgcttcatttactgaacaatggacagatggttttgcatttcagaatcttgtgaagcaacaagaatgggtgaatcagcaaagggaagatattgaaaggcaaaggaaacttctagccaaacgcaaacctcccacagctaataattctcaggcaccctctaccaattctgaaccaaaacaaaggaaaaacaaagcagtcaatggagcagagaatgatccctttgttagaccaaatttaccacaactgttgactttggcagaatatcatgaacaggaagaaattttcaaacttagactaggacatctcaaaaaggaagaggcagaaatccaggcagaacttgaacgtttggaaagagtcagaaatcttcacatacgtgagctgaaaagaataaacaatgaagataattcacagttcaaagatcacccaacattaaatgaaagatatttattacttcatctgcttggtagaggtggctttagtgaagtgtataaggcttttgacctttatgaacaaagatatgctgctgtgaagatacatcagcttaataaaagctggagagatgagaagaaagaaaactaccacaaacatgcctgcagagagtatagaatacacaaagaactggatcaccccagaatagttaaactctatgattatttctccttggatacagatacgttttgtacagtgttagaatactgtgaaggcaatgacttggatttctatctgaagcaacacaagttaatgtcagagaaagaagctcggtctattgtaatgcagattgtaaatgcactaagatatctcaatgagatcaaaccccctattatacattatgatcttaagccaggaaacatcctactggtagatggaacagcatgtggtgaaatcaaaatcactgattttggtctgtccaagattatggatgatgatagctatggtgtagatggaatggatctaacttcccagggggcaggcacttactggtatttacctcctgagtgttttgtagttggaaaagagccaccaaagatttccaacaaggttgatgtatggtcggttggagtcatcttctttcagtgtctttatggtagaaagccatttggtcacaatcaatctcaacaagacattcttcaagaaaatacaatattaaaagccacagaagtccagttccctgtaaaaccggttgtaagcagtgaagccaaggcatttataagacgctgtttggcatatcgaaaagaagatcgatttgatgtgcaccagctggcaaatgacccataccttctcccacacatgagaagatcaaattcttcaggaaacctacacatggctgggctgacagcatcccctacacccccttcttcaagcataattacttactgactttcctccaagattggcatgatatctttgaatttgcttccagatgcacacttaagtttgagagcatttgagtgtttgttttctttttcttttttttttttttttttttttacacaagacgtggttaagaactgtttgtgaactgaagttcctcatagtgtcatttgtatgagagaggatcatggacaatgaataaatgcacacttctgactataattttgagcagtgaaggaaggatgactgcctgttacacagaaacaggaataccatgttaagatagaggaaaaaaattttgtttatttgggggaacactgtaaataacgtttataatacttaaatacatttggttgttactagagagttctaatatgaagggtagtttttcattatttaaaaacacatggaaaaatatgagacatatttctaacatacgaactatagtgcctggatacattcttcagcatttggcagttaatctgctgaaaccaaagtaagaactgaatgacagtgacagttgtgttttatagtaatagaatgtgagagttagaatctttggacaaagttaggctttgtcatttgcctattcagacttttaccaagttgtacctcgagatcacatgtccgttttctttcactggttatattaaagggagagctattatttctaaatactttacacctttgacaaaatgagctgcttgtgttgaaatcagttgaattcactaaattataatattgccagtgttttcaacacgttagaattgataacaggtatttttcttttgttaccaggccttgttcatcaaaacaggtgacagtgagtaaccaaatgcagaccagttctatgcaggataatgataaattcccttctagctctattgtaaattgttgtacagatgtcatatttcaattactaagtttcagcagcttattcttgtacaaatgtttaaaatatggcttttctaattggatattgtattttttttaagtcttcttgaaggcactctaattgctgctaaatgatgttgcttctttgctaaaaaattaaatgacctagaaggtgcaagttgactgtacatcatagatattaaaaagcagacagtcattaacaatcaagatgtaaaagtgatccatgttggacataattgagtttttaaatcagtttattgggttctagggctgtagaacacatagatactagatttttaatttgttcatggttattctacatttctagaaagttcttatcagcaagatggtcccataagcaaatttcttgtggtttgtacagatttgttaaaatgtgaacgttttctaactgcctcgtagggtagaaaccaatatttttcaggatgctgtatttcactcctgtaaggactttttctttattgtcacattcataatgctgatacttacatgtaagttgttcatgttgcagaaaaaggttatacgtaccacggattctctttaatattgtacagttaaactgtatttctgatgttgcaagccattttgttttttcattgtacatagacacattgtctctttaaaatgctgctgaaattgtagagagtatagccaaaacagtaataaacaatgacagttaaaatgtaaagactatgaaaattacattggaagggagctttcaagatggtaggatattgactaactgagctccttcacttaaaaatcagctgaataaattccttaagtatacttcaagacaagtgtaaattgtttcaagctgttaaagttaaacctaataaccattatcaaggcaactcctgggtaagtaacacttagaaccatcaagagtggtttaaggggctggctatacccattcctctgtagagcacagagaaatcctattaaaaaaaaaatactacatggtaatgaaatcttagcattgattgagtgctttacgtgctgcctgcaagttttcagttttgttgttagagttttcgtctttatgaatgataaagtcctatgttcataaagtaacatttaaattcctgaactaaaaggaaatgcctgttgtgcttaaaattttggggagatacgaagtgaatgtgtaaatctaactttgaggttcagtaagttaagtagtatagacctagagatcactgctttaccattttactttcaaatgaatgagagcgactgctagtggcagaacgcagaaaaggggaaaaacaagccatgaaatgaagttgctttcctgacctgggtttaggtcatcattttaaaatcaaagatgtgtaggagatgaatcaacttatagacccatattttccttctaaaagtttcccaaagaaatgttatagattttgaataacatgccagtgacccagcaggtccaagatggctaaccaagatggctaatttagccacattgaataacttacttttaccctcacatggaaagttggtatctattgctaaatgatttcaaggtcactctgacagtctttgacactgttttttttagggttttattgttttctggtctcctggtgtctgtcctcagaattaaagcatgtcctgcatccctaagatgatagccaaggcctctcttttattaagagtcagcactgatgtagggtaaaatcaacagtttttgcatatgattttaaaatctttctttgatttgaatttgctttagtgtgtgcatgttgagaggaagtaagtgtagaaaccaccctaatttgtaagttgggagttggagatacttggtggtttttcaaaaataaagactcaatcttttttttttttttaaacactcactaccatctccttctaaaacaactctgtcagtttaaatggcatataaaatgtgaacaaacacctcattacatgaagtcaaaatggtgaagagcttcagtgaaacatttaaagagtatattgtgtgttgttttgctgttcatcattacttattaaatgcagtaatgttgattgcc

SEQ ID NO: 191734 - DNA, 2605 bp, Homo sapiens
  Payload ID: 17879
  Gene Name: tousled-like kinase 1
  Uniprot ID: Q9UKI8
  ENST ID: ENST00000521943
  CDS Start-End: 176-2332
aagagaagagagggagaaggcacactgaggaatgccaaggactgccagcagcaccagaagctaggagagaggcacagaacagactcctagcttctcctaggctccctctgagcctccaggaagaaccaatcccggtgacatcttgattttggacttctggcatcagaactgtgcaatggatgagcttcatagtctggatccaagaaggcaagagttattggaagctagatttactggagttgcaagtgggagcactggaagtacgggcagttgcagtgttggagctaaagcctcaacaaataacgaaagctctaatcacagttttggaagcttgggatctttaagtgacaaagaatcagagacaccggagaagaaacaatcggaatcatccaggggaagaaagagaaaagcagaaaaccagaatgaaagtagtcagggaaaaagtattgggggacgtggccacaaaattagcgactattttgaataccagggtggaaatggctcaagtccagtaagaggcatacctcctgcaatccgttctcctcaaaattcacattcacattccactccttcctcatctgttcgaccgaatagcccttctcctactgcattagcatttggggaccaccctattgtacaaccaaagcaattatcctttaaaattattcagactgatctcacaatgctgaaattagcagcattagaaagtaataaaatccaggacctggaaaagaaggagggacgtatagatgatttgctcagggctaactgtgatctcagacggcaaatagatgaacaacaaaaattacttgaaaaatacaaagaacgattaaataagtgcatatcaatgagcaagaaacttcttattgaaaagagtacacaagaaaagctgtcaagcagagagaagagtatgcaagatcgattacgcctcgggcactttacaacagttagacatggcgcttcatttactgaacaatggacagatggttttgcatttcagaatcttgtgaagcaacaagaatgggtgaatcagcaaagggaagatattgaaaggcaaaggaaacttctagccaaacgcaaacctcccacagctaataattctcaggcaccctctaccaattctgaaccaaaacaaaggaaaaacaaagcagtcaatggagcagagaatgatccctttgttagaccaaatttaccacaactgttgactttggcagaatatcatgaacaggaagaaattttcaaacttagactaggacatctcaaaaaggaagaggcagaaatccaggcagaacttgaacgtttggaaagagtcagaaatcttcacatacgtgagctgaaaagaataaacaatgaagataattcacagttcaaagatcacccaacattaaatgaaagatatttattacttcatctgcttggtagaggtggctttagtgaagtgtataaggcttttgacctttatgaacaaagatatgctgctgtgaagatacatcagcttaataaaagctggagagatgagaagaaagaaaactaccacaaacatgcctgcagagagtatagaatacacaaagaactggatcaccccagaatagttaaactctatgattatttctccttggatacagatacgttttgtacagtgttagaatactgtgaaggcaatgacttggatttctatctgaagcaacacaagttaatgtcagagaaagaagctcggtctattgtaatgcagattgtaaatgcactaagatatctcaatgagatcaaaccccctattatacattatgatcttaagccaggaaacatcctactggtagatggaacagcatgtggtgaaatcaaaatcactgattttggtctgtccaagattatggatgatgatagctatggtgtagatggaatggatctaacttcccagggggcaggcacttactggtatttacctcctgagtgttttgtagttggaaaagagccaccaaagatttccaacaaggttgatgtatggtcggttggagtcatcttctttcagtgtctttatggtagaaagccatttggtcacaatcaatctcaacaagacattcttcaagaaaatacaatattaaaagccacagaagtccagttccctgtaaaaccggttgtaagcagtgaagccaaggcatttataagacgctgtttggcatatcgaaaagaagatcgatttgatgtgcaccagctggcaaatgacccataccttctcccacacatgagaagatcaaattcttcaggaaacctacacatggctgggctgacagcatcccctacacccccttcttcaagcataattacttactgactttcctccaagattggcatgatatctttgaatttgcttccagatgcacacttaagtttgagagcatttgagtgtttgttttctttttcttttttttttttttttttttttacacaagacgtggttaagaactgtttgtgaactgaagttcctcatagtgtcatttgtatgagagaggatcatggacaatgaataaatgcacacttctgactataattttgagcagtgaaggaaggatgactgcctgttacacagaaacaggaataccatgtt

SEQ ID NO: 191735 - DNA, 3449 bp, Homo sapiens
  Payload ID: 17880
  Gene Name: tousled-like kinase 2
  Uniprot ID: Q86UE8
  ENST ID: ENST00000346027
  CDS Start-End: 272-2524
gcggccgcccgggcccgggcccgcgtcgggcgcctggctctgtacgcgagcccggggatctgcggccttcgtgccccccctcccccgcccgccctctcgtggagcccggcgccggcggcggctgcccgggcggggggttgcggcgctcaggagaggccccggctccgccccgggcctgcccagggggagagcggagcggtccgcagccgggtcgggtcggggcccctcccgggaggagcgtggagcggcggcggcggcggcggcagcagaaatgatggaagaattgcatagcctggacccacgacggcaggaattattggaggccaggtttactggagtaggtgttagtaagggaccacttaatagtgagtcttccaaccagagcttgtgcagcgtcggatccttgagtgataaagaagtagagactcccgagaaaaagcagaatgaccagcgaaatcggaaaagaaaagctgaaccatatgaaactagccaagggaaaggcactcctaggggacataaaattagtgattactttgagtttgctgggggaagcgcgccaggaaccagccctggcagaagtgttccaccagttgcacgatcctcaccgcaacattccttatccaatcccttaccgcgacgagtagaacagcccctctatggtttagatggcagtgctgcaaaggaggcaacggaggagcagtctgctctgccaaccctcatgtcagtgatgctagcaaaacctcggcttgacacagagcagctggcgcaaaggggagctggcctctgcttcacttttgtttcagctcagcaaaacagtccctcatctacgggatctggcaacacagagcattcctgcagctcccaaaaacagatctccatccagcacagacagacccagtccgacctcacaatagaaaaaatatctgcactagaaaacagtaagaattctgacttagagaagaaggagggaagaatagatgatttattaagagccaactgtgatttgagacggcagattgatgaacagcaaaagatgctagagaaatacaaggaacgattaaatagatgtgtgacaatgagcaagaaactccttatagaaaagtcaaaacaagagaagatggcgtgtagagataagagcatgcaagaccgcttgagactgggccactttactactgtccgacacggagcctcatttactgaacagtggacagatggttatgcttttcagaatcttatcaagcaacaggaaaggataaattcacagagggaagagatagaaagacaacggaaaatgttagcaaagcggaaacctcctgccatgggtcaggcccctcctgcaaccaatgagcagaaacagcggaaaagcaagaccaatggagctgaaaatgaaacgttaacgttagcagaataccatgaacaagaagaaatcttcaaactcagattaggtcatcttaaaaaggaggaagcagagatccaggcagagctggagagactagaaagggttagaaatctacatatcagggaactaaaaaggatacataatgaagataattcacaatttaaagatcatccaacgctaaatgacagatatttgttgttacatcttttgggtagaggaggtttcagtgaagtttacaaggcatttgatctaacagagcaaagatacgtagctgtgaaaattcaccagttaaataaaaactggagagatgagaaaaaggagaattaccacaagcatgcatgtagggaataccggattcataaagagctggatcatcccagaatagttaagctgtatgattacttttcactggatactgactcgttttgtacagtattagaatactgtgagggaaatgatctggacttctacctgaaacagcacaaattaatgtcggagaaagaggcccggtccattatcatgcagattgtgaatgctttaaagtacttaaatgaaataaaacctcccatcatacactatgacctcaaaccaggtaatattcttttagtaaatggtacagcgtgtggagagataaaaattacagattttggtctttcgaagatcatggatgatgatagctacaattcagtggatggcatggagctaacatcacaaggtgctggtacttattggtatttaccaccagagtgttttgtggttgggaaagaaccaccaaagatctcaaataaagttgatgtgtggtcggtgggtgtgatcttctatcagtgtctttatggaaggaagccttttggccataaccagtctcagcaagacatcctacaagagaatacgattcttaaagctactgaagtgcagttcccgccaaagccagtagtaacacctgaagcaaaggcgtttattcgacgatgcttggcctaccgaaaggaggaccgcattgatgtccagcagctggcctgtgatccctacttgttgcctcacatccgaaagtcagtctctacaagtagccctgctggagctgctattgcatcaacctctggggcgtccaataacagttcttctaattgagactgactccaaggccacaaactgttcaacacacacaaagtggacaaatggcgttcagcagcgggtttggaacatagcgaatccgaatggatctgatgaaacctgtaccaggtgcttttattttcttgcttttttcccatccatagagcatgacagcatcgattctcattgaggagaaaccttgggcagctccggccaggccttgtaggaaaaggccccgcccgaggttccagcgtcaacggccactgtgtgtggctgctctgagtgaggaaaaaattaaaaagaaaaactggttccatgtactgtgaacttgaaaacttgcagactcaggggggtccctgatgcagtgcttcagatgaagaatgtggacttgaaaatacagactgggctagtccagtgtctatatttaaacttgttcttttcttttaataaagtttaggtaacatctcctgaaaagcttgtagcacaaaggctcagctggggatggtgtttgacttcggaggaaaaaagttgctattgcccgttaaaggcactagagttagtgttttatccctaaataatttcaatttttaaaaacatgcagcttccctctccccttttttatttttgaaagaatacatttggtcataaagtgaaacccgtattagcaagtacgtggcaatgttcattccaatcagatgcagctttctcctccgtctggtctcctgtttgcaattgcttccctcatctcagtagggaaaaaattgagtgggagtactgagatgtgtgggtttttgccattggacaaagaatgaggttagaagactgcagcttggagtctctctaggttttcaactatttcttcacaatttgaacacttgacggttgtcccttttaatttatttgaagtgctatttttttaaataaaggttcatctgtccatgca

SEQ ID NO: 191736 - DNA, 3512 bp, Homo sapiens
  Payload ID: 17880
  Gene Name: tousled-like kinase 2
  Uniprot ID: Q86UE8
  ENST ID: ENST00000326270
  CDS Start-End: 269-2587
gcggccgcccgggcccgggcccgcgtcgggcgcctggctctgtacgcgagcccggggatctgcggccttcgtgccccccctcccccgcccgccctctcgtggagcccggcgccggcggcggctgcccgggcggggggttgcggcgctcaggagaggccccggctccgccccgggcctgcccagggggagagcggagcggtccgcagccgggtcgggtcggggcccctcccgggaggagcgtggagcggcggcggcggcggcggcagaaatgatggaagaattgcatagcctggacccacgacggcaggaattattggaggccaggtttactggagtaggtgttagtaagggaccacttaatagtgagtcttccaaccagagcttgtgcagcgtcggatccttgagtgataaagaagtagagactcccgagaaaaagcagaatgaccagcgaaatcggaaaagaaaagctgaaccatatgaaactagccaagggaaaggcactcctaggggacataaaattagtgattactttgagtttgctgggggaagcgcgccaggaaccagccctggcagaagtgttccaccagttgcacgatcctcaccgcaacattccttatccaatcccttaccgcgacgagtagaacagcccctctatggtttagatggcagtgctgcaaaggaggcaacggaggagcagtctgctctgccaaccctcatgtcagtgatgctagcaaaacctcggcttgacacagagcagctggcgcaaaggggagctggcctctgcttcacttttgtttcagctcagcaaaacagtccctcatctacgggatctggcaacacagagcattcctgcagctcccaaaaacagatctccatccagcacagacagacccagtccgacctcacaatagaaaaaatatctgcactagaaaacagtaagaattctgacttagagaagaaggagggaagaatagatgatttattaagagccaactgtgatttgagacggcagattgatgaacagcaaaagatgctagagaaatacaaggaacgattaaatagatgtgtgacaatgagcaagaaactccttatagaaaagtcaaaacaagagaagatggcgtgtagagataagagcatgcaagaccgcttgagactgggccactttactactgtccgacacggagcctcatttactgaacagtggacagatggttatgcttttcagaatcttatcaagcaacaggaaaggataaattcacagagggaagagatagaaagacaacggaaaatgttagcaaagcggaaacctcctgccatgggtcaggcccctcctgcaaccaatgagcagaaacagcggaaaagcaagaccaatggagctgaaaatgaaacgccctcttctgggaatacagagctaaaggatacagccccagccttaggagcccacagtttacttaggttaacgttagcagaataccatgaacaagaagaaatcttcaaactcagattaggtcatcttaaaaaggaggaagcagagatccaggcagagctggagagactagaaagggttagaaatctacatatcagggaactaaaaaggatacataatgaagataattcacaatttaaagatcatccaacgctaaatgacagatatttgttgttacatcttttgggtagaggaggtttcagtgaagtttacaaggcatttgatctaacagagcaaagatacgtagctgtgaaaattcaccagttaaataaaaactggagagatgagaaaaaggagaattaccacaagcatgcatgtagggaataccggattcataaagagctggatcatcccagaatagttaagctgtatgattacttttcactggatactgactcgttttgtacagtattagaatactgtgagggaaatgatctggacttctacctgaaacagcacaaattaatgtcggagaaagaggcccggtccattatcatgcagattgtgaatgctttaaagtacttaaatgaaataaaacctcccatcatacactatgacctcaaaccaggtaatattcttttagtaaatggtacagcgtgtggagagataaaaattacagattttggtctttcgaagatcatggatgatgatagctacaattcagtggatggcatggagctaacatcacaaggtgctggtacttattggtatttaccaccagagtgttttgtggttgggaaagaaccaccaaagatctcaaataaagttgatgtgtggtcggtgggtgtgatcttctatcagtgtctttatggaaggaagccttttggccataaccagtctcagcaagacatcctacaagagaatacgattcttaaagctactgaagtgcagttcccgccaaagccagtagtaacacctgaagcaaaggcgtttattcgacgatgcttggcctaccgaaaggaggaccgcattgatgtccagcagctggcctgtgatccctacttgttgcctcacatccgaaagtcagtctctacaagtagccctgctggagctgctattgcatcaacctctggggcgtccaataacagttcttctaattgagactgactccaaggccacaaactgttcaacacacacaaagtggacaaatggcgttcagcagcgggtttggaacatagcgaatccgaatggatctgatgaaacctgtaccaggtgcttttattttcttgcttttttcccatccatagagcatgacagcatcgattctcattgaggagaaaccttgggcagctccggccaggccttgtaggaaaaggccccgcccgaggttccagcgtcaacggccactgtgtgtggctgctctgagtgaggaaaaaattaaaaagaaaaactggttccatgtactgtgaacttgaaaacttgcagactcaggggggtccctgatgcagtgcttcagatgaagaatgtggacttgaaaatacagactgggctagtccagtgtctatatttaaacttgttcttttcttttaataaagtttaggtaacatctcctgaaaagcttgtagcacaaaggctcagctggggatggtgtttgacttcggaggaaaaaagttgctattgcccgttaaaggcactagagttagtgttttatccctaaataatttcaatttttaaaaacatgcagcttccctctccccttttttatttttgaaagaatacatttggtcataaagtgaaacccgtattagcaagtacgtggcaatgttcattccaatcagatgcagctttctcctccgtctggtctcctgtttgcaattgcttccctcatctcagtagggaaaaaattgagtgggagtactgagatgtgtgggtttttgccattggacaaagaatgaggttagaagactgcagcttggagtctctctaggttttcaactatttcttcacaatttgaacacttgacggttgtcccttttaatttatttgaagtgctatttttttaaataaaggttcatctgtccatgca

SEQ ID NO: 191737 - DNA, 3227 bp, Homo sapiens
  Payload ID: 17880
  Gene Name: tousled-like kinase 2
  Uniprot ID: Q86UE8
  ENST ID: ENST00000343388
  CDS Start-End: 147-2303
ccgggcggggggttgcggcgctcaggagaggccccggctccgccccgggcctgcccagggggagagcggagcggtccgcagccgggtcgggtcggggcccctcccgggaggagcgtggagcggcggcggcggcggcggcagcagaaatgatggaagaattgcatagcctggacccacgacggcaggaattattggaggccaggtttactggagtaggtgttagtaagggaccacttaatagtgagtcttccaaccagagcttgtgcagcgtcggatccttgagtgataaagaagtagagactcccgagaaaaagcagaatgaccagcgaaatcggaaaagaaaagctgaaccatatgaaactagccaagggaaaggcactcctaggggacataaaattagtgattactttgagcgacgagtagaacagcccctctatggtttagatggcagtgctgcaaaggaggcaacggaggagcagtctgctctgccaaccctcatgtcagtgatgctagcaaaacctcggcttgacacagagcagctggcgcaaaggggagctggcctctgcttcacttttgtttcagctcagcaaaacagtccctcatctacgggatctggcaacacagagcattcctgcagctcccaaaaacagatctccatccagcacagacagacccagtccgacctcacaatagaaaaaatatctgcactagaaaacagtaagaattctgacttagagaagaaggagggaagaatagatgatttattaagagccaactgtgatttgagacggcagattgatgaacagcaaaagatgctagagaaatacaaggaacgattaaatagatgtgtgacaatgagcaagaaactccttatagaaaagtcaaaacaagagaagatggcgtgtagagataagagcatgcaagaccgcttgagactgggccactttactactgtccgacacggagcctcatttactgaacagtggacagatggttatgcttttcagaatcttatcaagcaacaggaaaggataaattcacagagggaagagatagaaagacaacggaaaatgttagcaaagcggaaacctcctgccatgggtcaggcccctcctgcaaccaatgagcagaaacagcggaaaagcaagaccaatggagctgaaaatgaaacgttaacgttagcagaataccatgaacaagaagaaatcttcaaactcagattaggtcatcttaaaaaggaggaagcagagatccaggcagagctggagagactagaaagggttagaaatctacatatcagggaactaaaaaggatacataatgaagataattcacaatttaaagatcatccaacgctaaatgacagatatttgttgttacatcttttgggtagaggaggtttcagtgaagtttacaaggcatttgatctaacagagcaaagatacgtagctgtgaaaattcaccagttaaataaaaactggagagatgagaaaaaggagaattaccacaagcatgcatgtagggaataccggattcataaagagctggatcatcccagaatagttaagctgtatgattacttttcactggatactgactcgttttgtacagtattagaatactgtgagggaaatgatctggacttctacctgaaacagcacaaattaatgtcggagaaagaggcccggtccattatcatgcagattgtgaatgctttaaagtacttaaatgaaataaaacctcccatcatacactatgacctcaaaccaggtaatattcttttagtaaatggtacagcgtgtggagagataaaaattacagattttggtctttcgaagatcatggatgatgatagctacaattcagtggatggcatggagctaacatcacaaggtgctggtacttattggtatttaccaccagagtgttttgtggttgggaaagaaccaccaaagatctcaaataaagttgatgtgtggtcggtgggtgtgatcttctatcagtgtctttatggaaggaagccttttggccataaccagtctcagcaagacatcctacaagagaatacgattcttaaagctactgaagtgcagttcccgccaaagccagtagtaacacctgaagcaaaggcgtttattcgacgatgcttggcctaccgaaaggaggaccgcattgatgtccagcagctggcctgtgatccctacttgttgcctcacatccgaaagtcagtctctacaagtagccctgctggagctgctattgcatcaacctctggggcgtccaataacagttcttctaattgagactgactccaaggccacaaactgttcaacacacacaaagtggacaaatggcgttcagcagcgggtttggaacatagcgaatccgaatggatctgatgaaacctgtaccaggtgcttttattttcttgcttttttcccatccatagagcatgacagcatcgattctcattgaggagaaaccttgggcagctccggccaggccttgtaggaaaaggccccgcccgaggttccagcgtcaacggccactgtgtgtggctgctctgagtgaggaaaaaattaaaaagaaaaactggttccatgtactgtgaacttgaaaacttgcagactcaggggggtccctgatgcagtgcttcagatgaagaatgtggacttgaaaatacagactgggctagtccagtgtctatatttaaacttgttcttttcttttaataaagtttaggtaacatctcctgaaaagcttgtagcacaaaggctcagctggggatggtgtttgacttcggaggaaaaaagttgctattgcccgttaaaggcactagagttagtgttttatccctaaataatttcaatttttaaaaacatgcagcttccctctccccttttttatttttgaaagaatacatttggtcataaagtgaaacccgtattagcaagtacgtggcaatgttcattccaatcagatgcagctttctcctccgtctggtctcctgtttgcaattgcttccctcatctcagtagggaaaaaattgagtgggagtactgagatgtgtgggtttttgccattggacaaagaatgaggttagaagactgcagcttggagtctctctaggttttcaactatttcttcacaatttgaacacttgacggttgtcccttttaatttatttgaagtgctatttttttaaataaaggttcatctgtccatgc

SEQ ID NO: 191738 - DNA, 1784 bp, Homo sapiens
  Payload ID: 17880
  Gene Name: tousled-like kinase 2
  ENST ID: ENST00000581041
  CDS Start-End: 6-1784
cagaaatgatggaagaattgcatagcctggacccacgacggcaggaattattggaggccaggtttactggagtaggtgttagtaagggaccacttaatagtgagtcttccaaccagagcttgtgcagcgtcggatccttgagtgataaagaagtagagactcccgagaaaaagcagaatgaccagcgaaatcggaaaagaaaagctgaaccatatgaaactagccaagggaaaggcactcctaggggacataaaattagtgattactttgagcgacgagtagaacagcccctctatggtttagatggcagtgctgcaaaggaggcaacggaggagcagtctgctctgccaaccctcatgtcagtgatgctagcaaaacctcggcttgacacagagcagctggcgcaaaggggagctggcctctgcttcacttttgtttcatccgacctcacaatagaaaaaatatctgcactagaaaacagtaagaattctgacttagagaagaaggagggaagaatagatgatttattaagagccaactgtgatttgagacggcagattgatgaacagcaaaagatgctagagaaatacaaggaacgattaaatagatgtgtgacaatgagcaagaaactccttatagaaaagtcaaaacaagagaagatggcgtgtagagataagagcatgcaagaccgcttgagactgggccactttactactgtccgacacggagcctcatttactgaacagtggacagatggttatgcttttcagaatcttatcaagcaacaggaaaggataaattcacagagggaagagatagaaagacaacggaaaatgttagcaaagcggaaacctcctgccatgggtcaggcccctcctgcaaccaatgagcagaaacagcggaaaagcaagaccaatggagctgaaaatgaaacgttaacgttagcagaataccatgaacaagaagaaatcttcaaactcagattaggtcatcttaaaaaggaggaagcagagatccaggcagagctggagagactagaaagggttagaaatctacatatcagggaactaaaaaggatacataatgaagataattcacaatttaaagatcatccaacgctaaatgacagatatttgttgttacatcttttgggtagaggaggtttcagtgaagtttacaaggcatttgatctaacagagcaaagatacgtagctgtgaaaattcaccagttaaataaaaactggagagatgagaaaaaggagaattaccacaagcatgcatgtagggaataccggattcataaagagctggatcatcccagaatagttaagctgtatgattacttttcactggatactgactcgttttgtacagtattagaatactgtgagggaaatgatctggacttctacctgaaacagcacaaattaatgtcggagaaagaggcccggtccattatcatgcagattgtgaatgctttaaagtacttaaatgaaataaaacctcccatcatacactatgacctcaaaccaggtaatattcttttagtaaatggtacagcgtgtggagagataaaaattacagattttggtctttcgaagatcatggatgatgatagctacaattcagtggatggcatggagctaacatcacaaggtgctggtacttattggtatttaccaccagagtgttttgtggttgggaaagaaccaccaaagatctcaaataaagttgatgtgtggtcggtgggtgtgatcttctatcagtgtctttatggaaggaag

SEQ ID NO: 191739 - DNA, 512 bp, Homo sapiens
  Payload ID: 17880
  Gene Name: tousled-like kinase 2
  ENST ID: ENST00000582195
  CDS Start-End: 246-512
aggagatactctgtgaggggccggcgtgttttctccatcttggcacttaccctcagaccctcctaagtacccgggagggccgtgtttttcatcggaggttgaaatggaacctccccctgggtgcccggggagagtaccttgggggcagcgcccctccttccggagggcagcatccccgcgggggcgggggctcggctttgatcccagggcaccttttgtccctggagacgctctgccagccagaaatgatggaagaattgcatagcctggacccacgacggcaggaattattggaggccaggtttactggagtaggtgttagtaagggaccacttaatagtgagtcttccaaccagagcttgtgcagcgtcggatccttgagtgataaagaagtagagactcccgagaaaaagcagaatgaccagcgaaatcggaaaagaaaagctgaaccatatgaaactagccaagggaaaggcactcctaggggacataaaattagtgattactttgag

SEQ ID NO: 191740 - DNA, 530 bp, Homo sapiens
  Payload ID: 17880
  Gene Name: tousled-like kinase 2
  ENST ID: ENST00000578697
  CDS Start-End: 1-530
cagcaaaacagtccctcatctacgggatctggcaacacagagcattcctgcagctcccaaaaacagatctccatccagcacagacagacccaggccaactgtgatttgagacggcagattgatgaacagcaaaagatgctagagaaatacaaggaacgattaaatagatgtgtgacaatgagcaagaaactccttatagaaaagtcaaaacaagagaagatggcgtgtagagataagagcatgcaagaccgcttgagactgggccactttactactgtccgacacggagcctcatttactgaacagtggacagatggttatgcttttcagaatcttatcaagcaacaggaaaggataaattcacagagggaagagatagaaagacaacggaaaatgttagcaaagcggaaacctcctgccatgggtcaggcccctcctgcaaccaatgagcagaaacagcggaaaagcaagaccaatggagctgaaaatgaaacgttaacgttagcagaataccatgaacaagaagaaat

SEQ ID NO: 191741 - DNA, 3608 bp, Homo sapiens
  Payload ID: 17880
  Gene Name: tousled-like kinase 2
  ENST ID: ENST00000582809
  CDS Start-End: 704-2509
gttcagaatacagctgagcccagagattgcatggcaccaagagaggtttctgtcaagccgtcccgttccgagatgccccatcgcaccaacgaagcaactgctgagcagaaatgatggaagaattgcatagcctggacccacgacggcaggaattattggaggccaggtttactggagtaggtgttagtaaggaaaactagaaaagaggaggaaaaaacaataaatatgcaagaagaaataaatacattgcaaaacagaagaatgggaaataatcaagagttggaaaattaggaaacaaaaggcaaaatgaaggagagtacatcggatataacaaaagggaccacttaatagtgagtcttccaaccagagcttgtgcagcgtcggatccttgagtgataaagaagtagagactcccgagaaaaagcagaatgaccagcgaaatcggaaaagaaaagctgaaccatatgaaactagccaagggaaaggcactcctaggggacataaaattagtgattactttgagtttgctgggggaagcgcgccaggaaccagccctggcagaagtgttccaccagttgcacgatcctcaccgcaacattccttatccaatcccttaccgcgacgagtagaacagcccctctatggtttagatggcagtgctgcaaaggaggcaacggaggagcagtctgctctgccaaccctcatgtcagtgatgctagcaaaacctcggcttgacacagagcagctggcgcaaaggggagctggcctctgcttcacttttgtttcagctcagcaaaacagtccctcatctacgggatctggcaacacagagcattcctgcagctcccaaaaacagatctccatccagcacagacagacccagtccgacctcacaatagaaaaaatatctgcactagaaaacagtaagaattctgacttagagaagaaggagggaagaatagatgatttattaagagccaactgtgatttgagacggcagattgatgaacagcaaaagatgctagagaaatacaaggaacgattaaatagatgtgtgacaatgagcaagaaactccttatagaaaagtcaaaacaagagaagatggcgtgtagagataagagcatgcaagaccgcttgagactgggccactttactactgtccgacacggagcctcatttactgaacagtggacagatggttatgcttttcagaatcttatcaagcaacaggaaaggataaattcacagagggaagagatagaaagacaacggaaaatgttagcaaagcggaaacctcctgccatgggtcaggcccctcctgcaaccaatgagcagaaacagcggaaaagcaagaccaatggagctgaaaatgaaacgttaacgttagcagaataccatgaacaagaagaaatcttcaaactcagattaggtcatcttaaaaaggaggaagcagagatccaggcagagctggagagactagaaagggttagaaatctacatatcagggaactaaaaaggatacataatgaagataattcacaatttaaagatcatccaacgctaaatgacagatatttgttgttacatcttttgggtagaggaggtttcagtgaagtttacaaggcatttgatctaacagagcaaagatacgtagctgtgaaaattcaccagttaaataaaaactggagagatgagaaaaaggagaattaccacaagcatgcatgtagggaataccggattcataaagagctggatcatcccagaatagttaagctgtatgattacttttcactggatactgactcgttttgtacagtattagaatactgtgagggaaatgatctggacttctacctgaaacagcacaaattaatgtcggagaaagaggcccggtccattatcatgcagattgtgaatgctttaaagtacttaaatgaaataaaacctcccatcatacactatgacctcaaaccaggtaatattcttttagtaaatggtacagcgtgtggagagataaaaattacagattttggtctttcgaagatcatggatgatgatagctacaattcagtggatggcatggagctaacatcacaaggtgctggtacttattggtatttaccaccagagtgttttgtggttgggaaagaaccaccaaagatctcaaataaagttgatgtgtggtcggtgggtgtgatcttctatcagtgtctttatggaaggaagccttttggccataaccagtctcagcaagacatcctacaagagaatacgattcttaaagctactgaagtgcagttcccgccaaagccagtagtaacacctgaagcaaaggcgtttattcgacgatgcttggcctaccgaaaggaggaccgcattgatgtccagcagctggcctgtgatccctacttgttgcctcacatccgaaagtcagtctctacaagtagccctgctggagctgctattgcatcaacctctggggcgtccaataacagttcttctaattgagactgactccaaggccacaaactgttcaacacacacaaagtggacaaatggcgttcagcagcgggtttggaacatagcgaatccgaatggatctgatgaaacctgtaccaggtgcttttattttcttgcttttttcccatccatagagcatgacagcatcgattctcattgaggagaaaccttgggcagctccggccaggccttgtaggaaaaggccccgcccgaggttccagcgtcaacggccactgtgtgtggctgctctgagtgaggaaaaaattaaaaagaaaaactggttccatgtactgtgaacttgaaaacttgcagactcaggggggtccctgatgcagtgcttcagatgaagaatgtggacttgaaaatacagactgggctagtccagtgtctatatttaaacttgttcttttcttttaataaagtttaggtaacatctcctgaaaagcttgtagcacaaaggctcagctggggatggtgtttgacttcggaggaaaaaagttgctattgcccgttaaaggcactagagttagtgttttatccctaaataatttcaatttttaaaaacatgcagcttccctctccccttttttatttttgaaagaatacatttggtcataaagtgaaacccgtattagcaagtacgtggcaatgttcattccaatcagatgcagctttctcctccgtctggtctcctgtttgcaattgcttccctcatctcagtagggaaaaaattgagtgggagtactgagatgtgtgggtttttgccattggacaaagaatgaggttagaagactgcagcttggagtctctctaggttttcaactatttcttcacaatttgaacacttgacggttgtcccttttaatttatttgaagtgctatttttttaaataaaggttcatctgtccatgcagtcctcttggattctctgaatgtagtaactatgaagctatgccaaaggtaggcagaaaatgggcttgggagccagacactccagggatcagtagttcctacccatagtctttgtgtgcttgctaaatggtgtacatttcttgttaaccacgttattaaaacttgatcagcacat

SEQ ID NO: 191742 - DNA, 767 bp, Homo sapiens
  Payload ID: 17880
  Gene Name: tousled-like kinase 2
  ENST ID: ENST00000583843
  CDS Start-End: 646-767
aaggaagggaagcttctcggcctgacagttcagccaggtgcaggcactgtcatgttcatggccaccaggcatctgccaagcaccaggctctgtgctgcccactttacacagatggtctcatttggccttgatgacagcctgtggagaaatgatggaagaattgcatagcctggacccacgacggcaggaattattggaggccaggtttactggagtaggtgttagtaaggaaaactagaaaagaggaggaaaaaacaataaatatgcaagaagaaataaatacattgcaaaacagaagaatgggaaataatcaagagttggaaaattaggaaacaaaaggcaaaatgaaggagagtacatcggatataacaaaagggaccacttaatagtgagtcttccaaccagagcttgtgcagcgtcggatccttgagtgataaagaagtagagactcccgagaaaaagcagaatgaccagcgaaatcggaaaagaaaagctgaaccatatgaaactagccaagggaaaggcactcctaggggacataaaattagtgattactttgagcgacgagtagaacagcccctctatggtttagatggcagtgctgcaaaggaggcaacggaggagcagtctgctctgccaaccctcatgtcagtgatgctagcaaaacctcggcttgacacagagcagctggcgcaaaggggagctggcctctgcttcacttttgtttcagctcagcaaaacagtccctcatctacgggatctggcaa

SEQ ID NO: 191743 - DNA, 496 bp, Homo sapiens
  Payload ID: 17880
  Gene Name: tousled-like kinase 2
  ENST ID: ENST00000583690
  CDS Start-End: 54-209
gcccctcccgggaggagcgtggagcggcggcggcggcggcggcagcagaaatgatggaagaattgcatagcctggacccacgacggcaggaattattggaggccaggtttactggagtaggtgttagtaaggaatgctgcaaggtctctgggagtcaaactattttgatggctattttgactctggtatggtatgaaaaggaaaactagaaaagaggaggaaaaaacaataaatatgcaagaagaaataaatacattgcaaaacagaagaatgggaaataatcaagagttggaaaattaggaaacaaaaggcaaaatgaaggagagtacatcggatataacaaaagggaccacttaatagtgagtcttccaaccagagcttgtgcagcgtcggatccttgagtgataaagaagtagagactcccgagaaaaagcagaatgaccagcgaaatcggaaaagaaaagctgaaccatatgaaactagccaagggaaaggc

SEQ ID NO: 191744 - DNA, 550 bp, Homo sapiens
  Payload ID: 17880
  Gene Name: tousled-like kinase 2
  ENST ID: ENST00000580705
  CDS Start-End: 22-550
acgctctgccagccagcagaaatgatggaagaattgcatagcctggacccacgacggcaggaattattggaggccaggtttactggagtaggtgttagtaagggaccacttaatagtgagtcttccaaccagagcttgtgcagcgtcggatccttgagtgataaagaagtagagcgacgagtagaacagcccctctatggtttagatggcagtgctgcaaaggaggcaacggaggagcagtctgctctgccaaccctcatgtcagtgatgctagcaaaacctcggcttgacacagagcagctggcgcaaaggggagctggcctctgcttcacttttgtttcagctcagcaaaacagtccctcatctacgggatctggcaacacagagcattcctgcagctcccaaaaacagatctccatccagcacagacagacccagtccgacctcacaatagaaaaaatatctgcactagaaaacagtaagaattctgacttagagaagaaggagggaagaatagatgatttattaagagccaactgtgatttgagac

SEQ ID NO: 191745 - DNA, 559 bp, Homo sapiens
  Payload ID: 17880
  Gene Name: tousled-like kinase 2
  ENST ID: ENST00000579450
  CDS Start-End: 342-559
aagcttctcggcctgacagttcagccaggtgcaggcactgtcatgttcatggccaccaggcatctgccaagcaccaggctctgtgctgcccactttacacagatggtctcatttggccttgatgacagcctgtggaggtctgtgttctgttaaaatatggaagaattaagagaagaacgaagaaataagggcagaaactccactggggagtacttgtctaaccctgaaaaagttcaaggctgttgttcaaggtctgaatttttcccttgagatttgcttgtagtccttaaagtcatcttcagacatctgatcaaggcagcatccgcggaaaattataagaaatgatggaagaattgcatagcctggacccacgacggcaggaattattggaggccaggtttactggagtaggtgttagtaagggaccacttaatagtgagtcttccaaccagagcttgtgcagcgtcggatccttgagtgataaagaagtagagactcccgagaaaaagcagaatgaccagcgaaatcggaaaagaaaagctgaaccatatgaaactag

SEQ ID NO: 191746 - DNA, 1880 bp, Homo sapiens
  Payload ID: 17881
  Gene Name: TOX high mobility group box family member 2
  Uniprot ID: Q96NM4
  ENST ID: ENST00000341197
  CDS Start-End: 29-1549
agccgccgccgccgccgccgcgcccgccatggacgtccgcctgtacccctcggcgcccgcggtgggcgcgcggcccggggccgagccggccggcctggcgcacctggactattaccacggcggcaagtttgatggtgacagtgcctacgtggggatgagtgacggaaacccagagctcctgtcaaccagccagacctacaacggccagagcgagaacaacgaagactatgagatccccccgataacacctcccaacctcccggagccatccctcctgcacctgggggaccacgaagccagctaccactcgctgtgccacggcctcacccccaacggtctgctccctgcctactcctatcaggccatggacctcccagccatcatggtgtccaacatgctagcacaggacagccacctgctgtcgggccagctgcccacgatccaggagatggtccactcggaagtggctgcctatgactcgggccggcccgggcccctgctgggtcgcccggcaatgctggccagccacatgagtgccctcagccagtcccagctcatctcgcagatgggcatccggagcagcatcgcccacagctccccatcaccgccggggagcaagtcagcgaccccctctccctccagctccactcaggaagaggagtcggaagtgcatttcaagatctcgggagaaaagagaccttcagccgacccaggaaaaaaggccaagaacccgaagaagaagaaaaagaaggaccccaatgagccgcagaagcctgtgtcggcctacgcactcttcttcagagacactcaggccgccatcaagggtcagaaccccagtgccactttcggtgacgtgtccaaaatcgtggcctccatgtgggacagcctgggagaggaacagaagcaggcctacaagaggaagacagaagcagcaaagaaggaatatctgaaggccctggcagcctaccgggctagcctcgtctccaagagctccccagatcaaggtgagaccaagagcactcaggcaaacccaccagccaaaatgctcccacccaagcagcccatgtatgccatgccaggcctggcctccttcctgacgccgtcggacctgcaggccttccgcagtggggcctcccctgccagcctcgcccggacgctgggctccaagtctctgctgccaggcctcagtgcgtccccgccgccgccaccctccttcccgctcagccccacactgcaccagcagctgtcactgccccctcacgcccagggcgccctcctcagtccacctgttagcatgtccccagccccccagccccctgtcctgcccacccccatggcactccaggtgcagctggcgatgagcccctcacctccagggccacaggacttcccgcacatctctgagttccccagcagctcgggatcctgctcacctggcccatccaaccccaccagcagcggggactgggacagcagctaccccagtggggagtgtggcatcagcacctgcagcctgctccccagggacaaatcgctctacctcacctaatcccgcctccctaccatccctgaggctcgctggaaggcactgctcagagcctgaagggctgacagcagaaaagaggccctggccagaggcagggtggcccatcggagagagcagtgacacacccattgcccgggggctgagtctcttcctcaacctcccaccagactctgcagaggcagcccactgcccaccaccagcccaaagaacctgcaggaaccttccgcccgctgacctgcttgctccagggtaactgtggaccctgtcctcgccctgcgcacggtaccctatgtctggacacccggccccagctccagccccagcccaggtgggc

SEQ ID NO: 191747 - DNA, 2605 bp, Homo sapiens
  Payload ID: 17881
  Gene Name: TOX high mobility group box family member 2
  Uniprot ID: Q96NM4
  ENST ID: ENST00000358131
  CDS Start-End: 209-1675
accaggagctccgaacacgcaggcccaaattggaataggagatggattttgataaaagaggttaaataacaggtttttccatttcaccttatacgaatgggatggggggtgggggtgctgggcctccagccaatagaggaccaagagttgtcaggagggcttataaagcttgctatttctggcattttttcctctttctctgctgattatgcagcagactcgcacagaggctgtcgcgggcgcgttctctcgctgcctgggcttctgtggaatgagactcgggctccttctacttgcaagacactggtgcattgcaggtgtgtttccgcagaagtttgatggtgacagtgcctacgtggggatgagtgacggaaacccagagctcctgtcaaccagccagacctacaacggccagagcgagaacaacgaagactatgagatccccccgataacacctcccaacctcccggagccatccctcctgcacctgggggaccacgaagccagctaccactcgctgtgccacggcctcacccccaacggtctgctccctgcctactcctatcaggccatggacctcccagccatcatggtgtccaacatgctagcacaggacagccacctgctgtcgggccagctgcccacgatccaggagatggtccactcggaagtggctgcctatgactcgggccggcccgggcccctgctgggtcgcccggcaatgctggccagccacatgagtgccctcagccagtcccagctcatctcgcagatgggcatccggagcagcatcgcccacagctccccatcaccgccggggagcaagtcagcgaccccctctccctccagctccactcaggaagaggagtcggaagtgcatttcaagatctcgggagaaaagagaccttcagccgacccaggaaaaaaggccaagaacccgaagaagaagaaaaagaaggaccccaatgagccgcagaagcctgtgtcggcctacgcactcttcttcagagacactcaggccgccatcaagggtcagaaccccagtgccactttcggtgacgtgtccaaaatcgtggcctccatgtgggacagcctgggagaggaacagaagcagagctccccagatcaaggtgagaccaagagcactcaggcaaacccaccagccaaaatgctcccacccaagcagcccatgtatgccatgccaggcctggcctccttcctgacgccgtcggacctgcaggccttccgcagtggggcctcccctgccagcctcgcccggacgctgggctccaagtctctgctgccaggcctcagtgcgtccccgccgccgccaccctccttcccgctcagccccacactgcaccagcagctgtcactgccccctcacgcccagggcgccctcctcagtccacctgttagcatgtccccagccccccagccccctgtcctgcccacccccatggcactccaggtgcagctggcgatgagcccctcacctccagggccacaggacttcccgcacatctctgagttccccagcagctcgggatcctgctcacctggcccatccaaccccaccagcagcggggactgggacagcagctaccccagtggggagtgtggcatcagcacctgcagcctgctccccagggacaaatcgctctacctcacctaatcccgcctccctaccatccctgaggctcgctggaaggcactgctcagagcctgaagggctgacagcagaaaagaggccctggccagaggcagggtggcccatcggagagagcagtgacacacccattgcccgggggctgagtctcttcctcaacctcccaccagactctgcagaggcagcccactgcccaccaccagcccaaagaacctgcaggaaccttccgcccgctgacctgcttgctccagggtaactgtggaccctgtcctcgccctgcgcacggtaccctatgtctggacacccggccccagctccagccccagcccaggtgggccgcccctggcggggtcgcttaccaacggacacccaccccagatgcatgggccagagggccggcccccggcatagatgtgcacatcggttttccagtgtgaacaaaagattacgaaacctagaaactgttggttccgtgtaagtagttgactacgtgttttagaactgtgctgaagacatctgtaagactattttgtgggggaaaaaagtagtttcctttaaggtaaaaagcattttatatgatccttagcacatttttaagttttatcttaagggagacgcgcacaaaagcggctgccaaaccgtttcgtcatcctcacagcaaggaccggacgcttgctagccaccccggagcactgctctccttttaatcatgtattcatctattttaaattgccggcgacgacttttgtctatttatgaagaaaccttgagaacgaagttacagcttatcctaccgtgtgtgtggttttggggtttcgtttgggtttgggttcttgacgtcgtttgcagctgtttcctggccctggcgagtgtctgtcttggtgcccagtgcttctctcaaatctctttataataaaacttctgaaaagctgaaaa

SEQ ID NO: 191748 - DNA, 2519 bp, Homo sapiens
  Payload ID: 17881
  Gene Name: TOX high mobility group box family member 2
  Uniprot ID: Q96NM4
  ENST ID: ENST00000372999
  CDS Start-End: 195-1589
cgcagccctggcgcagacgcgtgggctccgtggcgatgcggggtgttgcctgaggctccactgaagctatggcataatttgcagaatttgcacttcattacttttctgaaattcaaacaaattctgaaactgcacgagttctggctgagagctgtggatctgtgcattttgatggtgacagtgcctacgtggggatgagtgacggaaacccagagctcctgtcaaccagccagacctacaacggccagagcgagaacaacgaagactatgagatccccccgataacacctcccaacctcccggagccatccctcctgcacctgggggaccacgaagccagctaccactcgctgtgccacggcctcacccccaacggtctgctccctgcctactcctatcaggccatggacctcccagccatcatggtgtccaacatgctagcacaggacagccacctgctgtcgggccagctgcccacgatccaggagatggtccactcggaagtggctgcctatgactcgggccggcccgggcccctgctgggtcgcccggcaatgctggccagccacatgagtgccctcagccagtcccagctcatctcgcagatgggcatccggagcagcatcgcccacagctccccatcaccgccggggagcaagtcagcgaccccctctccctccagctccactcaggaagaggagtcggaagtgcatttcaagatctcgggagaaaagagaccttcagccgacccaggaaaaaaggccaagaacccgaagaagaagaaaaagaaggaccccaatgagccgcagaagcctgtgtcggcctacgcactcttcttcagagacactcaggccgccatcaagggtcagaaccccagtgccactttcggtgacgtgtccaaaatcgtggcctccatgtgggacagcctgggagaggaacagaagcaggcctacaagaggaagacagaagcagcaaagaaggaatatctgaaggccctggcagcctaccgggctagcctcgtctccaagagctccccagatcaaggtgagaccaagagcactcaggcaaacccaccagccaaaatgctcccacccaagcagcccatgtatgccatgccaggcctggcctccttcctgacgccgtcggacctgcaggccttccgcagtggggcctcccctgccagcctcgcccggacgctgggctccaagtctctgctgccaggcctcagtgcgtccccgccgccgccaccctccttcccgctcagccccacactgcaccagcagctgtcactgccccctcacgcccagggcgccctcctcagtccacctgttagcatgtccccagccccccagccccctgtcctgcccacccccatggcactccaggtgcagctggcgatgagcccctcacctccagggccacaggacttcccgcacatctctgagttccccagcagctcgggatcctgctcacctggcccatccaaccccaccagcagcggggactgggacagcagctaccccagtggggagtgtggcatcagcacctgcagcctgctccccagggacaaatcgctctacctcacctaatcccgcctccctaccatccctgaggctcgctggaaggcactgctcagagcctgaagggctgacagcagaaaagaggccctggccagaggcagggtggcccatcggagagagcagtgacacacccattgcccgggggctgagtctcttcctcaacctcccaccagactctgcagaggcagcccactgcccaccaccagcccaaagaacctgcaggaaccttccgcccgctgacctgcttgctccagggtaactgtggaccctgtcctcgccctgcgcacggtaccctatgtctggacacccggccccagctccagccccagcccaggtgggccgcccctggcggggtcgcttaccaacggacacccaccccagatgcatgggccagagggccggcccccggcatagatgtgcacatcggttttccagtgtgaacaaaagattacgaaacctagaaactgttggttccgtgtaagtagttgactacgtgttttagaactgtgctgaagacatctgtaagactattttgtgggggaaaaaagtagtttcctttaaggtaaaaagcattttatatgatccttagcacatttttaagttttatcttaagggagacgcgcacaaaagcggctgccaaaccgtttcgtcatcctcacagcaaggaccggacgcttgctagccaccccggagcactgctctccttttaatcatgtattcatctattttaaattgccggcgacgacttttgtctatttatgaagaaaccttgagaacgaagttacagcttatcctaccgtgtgtgtggttttggggtttcgtttgggtttgggttcttgacgtcgtttgcagctgtttcctggccctggcgagtgtctgtcttggtgcccagtgcttctctcaaatctctttataataaaacttctgaaaagctgaaaa

SEQ ID NO: 191749 - DNA, 1709 bp, Homo sapiens
  Payload ID: 17881
  Gene Name: TOX high mobility group box family member 2
  Uniprot ID: Q96NM4
  ENST ID: ENST00000423191
  CDS Start-End: 87-1481
agcgcgcgtgggtttcccgcagccctggcgcagacgcgtgggctccgtggcgatgcgggtttgatggtgacagtgcctacgtggggatgagtgacggaaacccagagctcctgtcaaccagccagacctacaacggccagagcgagaacaacgaagactatgagatccccccgataacacctcccaacctcccggagccatccctcctgcacctgggggaccacgaagccagctaccactcgctgtgccacggcctcacccccaacggtctgctccctgcctactcctatcaggccatggacctcccagccatcatggtgtccaacatgctagcacaggacagccacctgctgtcgggccagctgcccacgatccaggagatggtccactcggaagtggctgcctatgactcgggccggcccgggcccctgctgggtcgcccggcaatgctggccagccacatgagtgccctcagccagtcccagctcatctcgcagatgggcatccggagcagcatcgcccacagctccccatcaccgccggggagcaagtcagcgaccccctctccctccagctccactcaggaagaggagtcggaagtgcatttcaagatctcgggagaaaagagaccttcagccgacccaggaaaaaaggccaagaacccgaagaagaagaaaaagaaggaccccaatgagccgcagaagcctgtgtcggcctacgcactcttcttcagagacactcaggccgccatcaagggtcagaaccccagtgccactttcggtgacgtgtccaaaatcgtggcctccatgtgggacagcctgggagaggaacagaagcaggcctacaagaggaagacagaagcagcaaagaaggaatatctgaaggccctggcagcctaccgggctagcctcgtctccaagagctccccagatcaaggtgagaccaagagcactcaggcaaacccaccagccaaaatgctcccacccaagcagcccatgtatgccatgccaggcctggcctccttcctgacgccgtcggacctgcaggccttccgcagtggggcctcccctgccagcctcgcccggacgctgggctccaagtctctgctgccaggcctcagtgcgtccccgccgccgccaccctccttcccgctcagccccacactgcaccagcagctgtcactgccccctcacgcccagggcgccctcctcagtccacctgttagcatgtccccagccccccagccccctgtcctgcccacccccatggcactccaggtgcagctggcgatgagcccctcacctccagggccacaggacttcccgcacatctctgagttccccagcagctcgggatcctgctcacctggcccatccaaccccaccagcagcggggactgggacagcagctaccccagtggggagtgtggcatcagcacctgcagcctgctccccagggacaaatcgctctacctcacctaatcccgcctccctaccatccctgaggctcgctggaaggcactgctcagagcctgaagggctgacagcagaaaagaggccctggccagaggcagggtggcccatcggagagagcagtgacacacccattgcccgggggctgagtctcttcctcaacctcccaccagactctgcagaggcagcccactgcccaccaccagcccaaagaacctgcaggaaccttccgcccgc

SEQ ID NO: 191750 - DNA, 1271 bp, Homo sapiens
  Payload ID: 17881
  Gene Name: TOX high mobility group box family member 2
  ENST ID: ENST00000413823
  CDS Start-End: 1-591
cgaagaagaagaaaaagaaggaccccaatgagccgcagaagcctgtgtcggcctacgcactcttcttcagagacactcaggccgccatcaagggtcagaaccccagtgccactttcggtgacgtgtccaaaatcgtggcctccatgtgggacagcctgggagaggaacagaagcaggacttcccgcacatctctgagttccccagcagctcgggatcctgctcacctggcccatccaaccccaccagcagcggggactgggacagcagctaccccagtggggagtgtggcatcagcacctgcagcctgctccccagggacaaatcgctctacctcacctaatcccgcctccctaccatccctgaggctcgctggaaggcactgctcagagcctgaagggctgacagcagaaaagaggccctggccagaggcagggtggcccatcggagagagcagtgacacacccattgcccgggggctgagtctcttcctcaacctcccaccagactctgcagaggcagcccactgcccaccaccagcccaaagaacctgcaggaaccttccgcccgctgacctgcttgctccagggtaactgtggaccctgtcctcgccctgcgcacggtaccctatgtctggacacccggccccagctccagccccagcccaggtgggccgcccctggcggggtcgcttaccaacggacacccaccccagatgcatgggccagagggccggcccccggcatagatgtgcacatcggttttccagtgtgaacaaaagattacgaaacctagaaactgttggttccgtgtaagtagttgactacgtgttttagaactgtgctgaagacatctgtaagactattttgtgggggaaaaaagtagtttcctttaaggtaaaaagcattttatatgatccttagcacatttttaagttttatcttaagggagacgcgcacaaaagcggctgccaaaccgtttcgtcatcctcacagcaaggaccggacgcttgctagccaccccggagcactgctctccttttaatcatgtattcatctattttaaattgccggcgacgacttttgtctatttatgaagaaaccttgagaacgaagttacagcttatcctaccgtgtgtgtggttttggggtttcgtttgggtttgggttcttgacgtcgtttgcagctgtttcctggccctggcgagtgtctgtcttggtgcccagtgcttctctcaaatctctttataataaaacttctgaaaagctgaaaa

SEQ ID NO: 191751 - DNA, 3233 bp, Homo sapiens
  Payload ID: 17882
  Gene Name: TOX high mobility group box family member 3
  Uniprot ID: O15405
  ENST ID: ENST00000219746
  CDS Start-End: 286-2016
ccgcgcccccggcgcccggcccgcgcgcagcgctgcctcggtgccccggcggggcgcgtccccccggccgcctcccgctctcccgcggctcgcgtggccgcgcctttgtgtgcggcggccgcggctcccgagctcctcgggctctgggtcccggcgcccctccggccgcgagtcccacgcgccacccccgggcgccctcgacggtggatctagcggcggcgaggaggcgggtcccggccccggcgaaccccagtcccggcccccggccccgggcccagcttcggcatggatgtgaggttctaccccgcggcggccggggaccctgccagcctggacttcgcgcagtgcctggggtactacggctacagcaagtttggaaataataataactatatgaatatggctgaggcgaacaatgcgttcttcgctgccagtgagcagacattccacacaccaagccttggggacgaggaattcgaaattccaccaatcacgcctcctccagagtcagaccctgccctaggcatgccggatgtactgctaccctttcaagccctcagcgatccattgccttcccagggaagtgaattcacaccccagtttccccctcaaagcctggacctcccttccattacaatctcaagaaatctcgtggaacaagatggcgtgcttcatagcagtgggttgcatatggatcagagccacacacaagtgtcccagtaccggcaggatccctccctgatcatgcggtccatcgtccacatgaccgatgctgcgcgttctggggtcatgcctcctgcccagctcaccaccatcaaccagtctcagctcagcgcccagttggggttgaatttgggaggtgccagtatgcctcacacatctccttcacctccagcaagcaaatcagccactccctccccttccagctccatcaatgaagaggatgctgatgaagccaacagagccattggagagaaaagagctgctccagactctggcaagaagcccaagactccaaagaaaaagaaaaagaaagatcccaatgagccacagaagccagtgtcagcatatgccctgtttttcagagacacacaggctgcaattaaaggtcaaaaccccaatgcaacctttggagaggtctcaaaaattgtagcatctatgtgggacagccttggagaagaacaaaagcaggtatataaaaggaaaacagaagctgccaaaaaagaatacctgaaggccctggcggcatacagggccagcctcgtttctaaggctgctgctgagtcagcagaagcccagaccatccgttctgttcagcagaccctggcgtcgaccaatctaacatcctctctccttctcaacactccactgtctcaacatggaacagtgtcagcatcacctcagactctccagcaatccctccctaggtcaatcgctcccaaacccttaaccatgagactccccatgaaccagattgtcacatcagtcaccattgcagccaacatgccctcgaacattggggctccactgataagctccatgggaacgaccatggttggctcagcaccctccacccaagtgagtccttcggtgcaaacccagcagcatcagatgcaattgcagcagcagcagcagcagcaacaacaacagatgcaacagatgcagcagcagcaactccagcagcaccaaatgcatcagcaaatccagcagcagatgcagcagcagcatttccagcaccacatgcagcagcacctgcagcagcagcagcagcatctccagcagcaaattaatcaacagcagctgcagcagcagctgcagcagcgcctccagctgcagcagctgcaacacatgcagcaccagtctcagccttctcctcggcagcactcccctgtcgcctctcagataacatcccccatccctgccatcgggagcccccagccagcctctcagcagcaccagtcgcaaatacagtctcagacacagactcaagtattatcgcaggtcagtattttctgaagacgcatatggcagacggatttgcgtataccaaggagagtggcataggagggaaaagcatatgtggctgaaacctgtaagttggtgttggttatgcagaaatgtgtaacagatcaaacggtcctctcaagtgtctattagataggcaataagaactgcagtgtagctgagtaacatcttttagctgactataaatcactttgtttttaaacaagaaaagctgtgctcttttatgtgatgccttttttatttattcaggctatacctacaatatgtgaatcaaactgtttaatgaatcctgggacatactgatgactataaactggcctctctgagtcatagaaaaatggccttatttctccagaagtgagtaaaccacacttccaggctatctgaactcctgaagccctaaaaataaaaagcacagttgtaactacctgaaatatgaagatccagtttcatacaaacatttgtatgacgtgaatagttgatggcatttttttgtcatgaaaaaaataatgtaaatcacagacttttgccaaagctcttattttttttcctaaatctctccagaaaaaaaatgcaagtgactaaattcaattattgactaatttccactttttatccatgacttctccaaatcaaaccacagtatatgttgtaacaatatctatgaccactgttagcccattatattcattccaattagaagaaatgtgaatactatattccgtgttttgagtgacaagtttcgaaaaataaaaacactgtatttttaaaagggaaatgcacttaaatgaaaacagttattacaaaagttaagatttaaaaagaaaaagcaagagtttttattatgatgtaataccagtagaatatttaaaaggcacaccacatctgaataatcaatgtaaatattttctttcaaagttgtaagttttcatatcatgtgctgtaaagttttcctaaatgaggctttaacgtaaacactggtgacataaaccattcattgctacgttgcttattgtgtttttatgctgttttatacttttttatgagttatgatagcagcaattaagttgtttgtattttgcttaactaaaacaaaaatgcttttatcttgctatagaataaacacatttcagtaaaaactgtggactgtattttgatgcaacaacaaagaaactgttcacttttcaaataaaatgatatgtcagatt

SEQ ID NO: 191752 - DNA, 3124 bp, Homo sapiens
  Payload ID: 17882
  Gene Name: TOX high mobility group box family member 3
  Uniprot ID: O15405
  ENST ID: ENST00000407228
  CDS Start-End: 189-1904
gaaccgacacgaggcttcacctgggaagcttcaagtctgcctacctgtgaaaggtcaggccccaacaccccttctgggaaatcctacagctaggatgcatttctctcactgaaccccatccagcagaggacagaagagtcagaagagggtagagaggatttagatactcatagaagatgtagtggaggatgaagtgccaacctcgctcgggagccaggcgcattgaggagagacttcattacctgataactacctatctgaaatttggaaataataataactatatgaatatggctgaggcgaacaatgcgttcttcgctgccagtgagacattccacacaccaagccttggggacgaggaattcgaaattccaccaatcacgcctcctccagagtcagaccctgccctaggcatgccggatgtactgctaccctttcaagccctcagcgatccattgccttcccagggaagtgaattcacaccccagtttccccctcaaagcctggacctcccttccattacaatctcaagaaatctcgtggaacaagatggcgtgcttcatagcagtgggttgcatatggatcagagccacacacaagtgtcccagtaccggcaggatccctccctgatcatgcggtccatcgtccacatgaccgatgctgcgcgttctggggtcatgcctcctgcccagctcaccaccatcaaccagtctcagctcagcgcccagttggggttgaatttgggaggtgccagtatgcctcacacatctccttcacctccagcaagcaaatcagccactccctccccttccagctccatcaatgaagaggatgctgatgaagccaacagagccattggagagaaaagagctgctccagactctggcaagaagcccaagactccaaagaaaaagaaaaagaaagatcccaatgagccacagaagccagtgtcagcatatgccctgtttttcagagacacacaggctgcaattaaaggtcaaaaccccaatgcaacctttggagaggtctcaaaaattgtagcatctatgtgggacagccttggagaagaacaaaagcaggtatataaaaggaaaacagaagctgccaaaaaagaatacctgaaggccctggcggcatacagggccagcctcgtttctaaggctgctgctgagtcagcagaagcccagaccatccgttctgttcagcagaccctggcgtcgaccaatctaacatcctctctccttctcaacactccactgtctcaacatggaacagtgtcagcatcacctcagactctccagcaatccctccctaggtcaatcgctcccaaacccttaaccatgagactccccatgaaccagattgtcacatcagtcaccattgcagccaacatgccctcgaacattggggctccactgataagctccatgggaacgaccatggttggctcagcaccctccacccaagtgagtccttcggtgcaaacccagcagcatcagatgcaattgcagcagcagcagcagcagcaacaacaacagatgcaacagatgcagcagcagcaactccagcagcaccaaatgcatcagcaaatccagcagcagatgcagcagcagcatttccagcaccacatgcagcagcacctgcagcagcagcagcagcatctccagcagcaaattaatcaacagcagctgcagcagcagctgcagcagcgcctccagctgcagcagctgcaacacatgcagcaccagtctcagccttctcctcggcagcactcccctgtcgcctctcagataacatcccccatccctgccatcgggagcccccagccagcctctcagcagcaccagtcgcaaatacagtctcagacacagactcaagtattatcgcaggtcagtattttctgaagacgcatatggcagacggatttgcgtataccaaggagagtggcataggagggaaaagcatatgtggctgaaacctgtaagttggtgttggttatgcagaaatgtgtaacagatcaaacggtcctctcaagtgtctattagataggcaataagaactgcagtgtagctgagtaacatcttttagctgactataaatcactttgtttttaaacaagaaaagctgtgctcttttatgtgatgccttttttatttattcaggctatacctacaatatgtgaatcaaactgtttaatgaatcctgggacatactgatgactataaactggcctctctgagtcatagaaaaatggccttatttctccagaagtgagtaaaccacacttccaggctatctgaactcctgaagccctaaaaataaaaagcacagttgtaactacctgaaatatgaagatccagtttcatacaaacatttgtatgacgtgaatagttgatggcatttttttgtcatgaaaaaaataatgtaaatcacagacttttgccaaagctcttattttttttcctaaatctctccagaaaaaaaatgcaagtgactaaattcaattattgactaatttccactttttatccatgacttctccaaatcaaaccacagtatatgttgtaacaatatctatgaccactgttagcccattatattcattccaattagaagaaatgtgaatactatattccgtgttttgagtgacaagtttcgaaaaataaaaacactgtatttttaaaagggaaatgcacttaaatgaaaacagttattacaaaagttaagatttaaaaagaaaaagcaagagtttttattatgatgtaataccagtagaatatttaaaaggcacaccacatctgaataatcaatgtaaatattttctttcaaagttgtaagttttcatatcatgtgctgtaaagttttcctaaatgaggctttaacgtaaacactggtgacataaaccattcattgctacgttgcttattgtgtttttatgctgttttatacttttttatgagttatgatagcagcaattaagttgtttgtattttgcttaactaaaacaaaaatgcttttatcttgctatagaataaacacatttcagtaaaaactgtggactgtattttgatgcaacaacaaagaaactgttcacttttcaaataaaatgatatgtcagatttca

SEQ ID NO: 191753 - DNA, 572 bp, Homo sapiens
  Payload ID: 17882
  Gene Name: TOX high mobility group box family member 3
  ENST ID: ENST00000563091
  CDS Start-End: 74-572
agcgctccgaggcagtggggacaaagaggaccggagcgggaaggggggcgagtttggaaataataataactatatgaatatggctgaggcgaacaatgcgttcttcgctgccagtgagcagacattccacacaccaagccttggggacgaggaattcgaaattccaccaatcacgcctcctccagagtcagaccctgccctaggcatgccggatgtactgctaccctttcaagccctcagcgatccattgccttcccagggaagtgaattcacaccccagtttccccctcaaagcctggacctcccttccattacaatctcaagaaatctcgtggaacaagatggcgtgcttcatagcagtgggttgcatatggatcagagccacacacaagtgtcccagtaccggcaggatccctccctgatcatgcggtccatcgtccacatgaccgatgctgcgcgttctggggtcatgcctcctgcccagctcaccaccatcaaccagtctcagctcagcgcccagttggggttgaatttgggaggtgccagtatgcctcacacatctccttcacctc

SEQ ID NO: 191754 - DNA, 548 bp, Homo sapiens
  Payload ID: 17882
  Gene Name: TOX high mobility group box family member 3
  ENST ID: ENST00000568436
  CDS Start-End: 118-300
cgagtcccacgcgccacccccgggcgccctcgacggtggatctagcggcggcgaggaggcgggtcccggccccggcgaaccccagtcccggcccccggccccgggcccagcttcggcatggatgtgaggttctaccccgcggcggccggggaccctgccagcctggacttcgcgcagtgcctggggtactacggctacagcaagcattttgcctgcaggctagaatctgtgttgttcattgcagtttgtgctcagccacggaaggcacctatccctagcacccaacccccatccacctagggctctataaaaagtttggaaataataataactatatgaatatggctgaggcgaacaatgcgttcttcgctgccagtgagacattccacacaccaagccttggggacgaggaattcgaaattccaccaatcacgcctcctccagagtcagaccctgccctaggcatgccggatgtactgctaccctttcaagccctcagcgatccattgccttcccagggaagtgaattcacaccccagtttccccct

SEQ ID NO: 191755 - DNA, 549 bp, Homo sapiens
  Payload ID: 17883
  Gene Name: TOX high mobility group box family member 4
  ENST ID: ENST00000455138
  CDS Start-End: 42-170
gagcgatgagggtctgagacggtgggagcggttgtgtgaagatggagtttcccggaggaaatgacaattacctgacgatcacagggccttcgcaccccttcctgtcaggggccgaggtgagccagagctgccgacgccgcggggacattccatacaccaagcttgggtgatgaggaatttgaaatcccacctatctccttggattctgatccctcattggctgtctcagatgtggttggccactttgatgacctggcagacccttcctcttcacaggatggcagtttttcagcccagtatggggtccagacattggacatgcctgtgggcatgacccatggcttgatggagcagggcggggggctcctgagtgggggcttgaccatggacttggaccactctataggaactcagtatagtgccaacccacctgttacaattgatgtaccaatgacagacatgacatctggcttgatggggcatagccagttgaccaccattgatcagtcagaactgagttcccagctgggtttgagcctagggggtggc

SEQ ID NO: 191756 - DNA, 2000 bp, Homo sapiens
  Payload ID: 17883
  Gene Name: TOX high mobility group box family member 4
  ENST ID: ENST00000455393
  CDS Start-End: 77-322
agtgacggcagttccgagtccagtgggggcggtgggagcgatgagggtctgagacggtgggagcggttgtgtgaagatggagtttcccggaggaaatgacaattacctgacgatcacagggccttcgcaccccttcctgtcaggggccgagacattccatacaccaagcttgggtgatgaggaatttgaaatcccacctatctccttggattctgatccctcattggctgtctcagatgtggttggccactttgatgacctggcagacccttcctcttcacaggatggcagtttttcagcccagacttggaccactctataggaactcagtatagtgccaacccacctgttacaattgatgtaccaatgacagacatgacatctggcttgatggggcatagccagttgaccaccattgatcagtcagaactgagttcccagctgggtttgagcctagggggtggcaccatcctgccacctgcccagtcacctgaagatcgtctttcaaccaccccttcacctactagttcacttcacgaggatggtgttgaggatttccggaggcaacttcccagccagaagacagtcgtggtggaagcagggaaaaagcagaaggccccaaagaagagaaaaaagaaagatcctaatgaacctcagaaaccagtttcagcatatgctttattctttcgtgatacacaggctgccatcaagggacagaatcctaatgccacttttggtgaggtttcaaaaattgtggcctccatgtgggatagtcttggagaggagcaaaaacaggtatataagaggaaaactgaggctgccaagaaagagtatctgaaggcactggctgcttacaaagacaaccaggagtgtcaggccactgtggaaacagtggaattggatccagcaccaccatcacaaactccttctccacctcctatggctactgttgacccagcatctccagcaccagcttcaatagagccccctgccctgtccccatccattgttgttaactccaccctttcatcctatgtggcaaaccaggcatcttctggagctgggggtcagcccaatatcaccaagttgattattaccaaacaaatgttgccctcttctattactatgtctcaaggagggatggttactgttatcccagccacagtggtgacctcccgggggctccaactaggccaaaccagtacagctactatccagcccagtcaacaagcccagattgtcactcggtcagtgttgcaggcagcagcagctgctgctgctgctgcttctatgcaactgcctccaccccgactacagccccctccattacaacagatgccacagcccccgactcagcagcaagttaccattctgcagcagcctcctccactccaggccatgcaacagcctccacctcagaaagttcgaatcaatttacagcaacagcctcctcctctgcagatcaagagtgtgcctctacccactttgaaaatgcagactaccttagtcccaccaactgtggaaagtagtcctgagcggcctatgaacaacagccctgaggcccatacagtggaggcaccttctcctgagactatctgtgagatgatcacagatgtagttcctgaggttgagtctccttctcagatggatgttgaattggtgagtgggtctcctgtggcactctcaccccagcctcgatgtgtgaggtctggttgtgagaaccctcccattgtgagtaaggactgggacaatgaatactgcagcaatgagtgtgtggtgaagcactgcagggatgtattcttggcctgggtagcctctagaaattcaaacacagtggtgtttgtgaaatagtccttcctgttctccaagccagtgaagagttatctgctgggaaagtgtccaagagcctgtttttgaaacacaagctgggcttctggtagtgcctcatcacaacccatgatggctgttcatgtttcaccccttttcttccttcagcagag

SEQ ID NO: 191757 - DNA, 633 bp, Homo sapiens
  Payload ID: 17883
  Gene Name: TOX high mobility group box family member 4
  ENST ID: ENST00000447695
  CDS Start-End: 56-187
agtgggggcggtgggagcgatgagggtctgagacggtgggagcggttgtgtgaagatggagtttcccggaggaaatgacaattacctgacgatcacagggccttcgcaccccttcctgtcaggggccgagcccctccttcaaaaaggcccaggaattgaacaaaggaggaaaggaaagctaagttagaagacattccatacaccaagcttgggtgatgaggaatttgaaatcccacctatctccttggattctgatccctcattggctgtctcagatgtggttggccactttgatgacctggcagacccttcctcttcacaggatggcagtttttcagcccagtatggggtccagacattggacatgcctgtgggcatgacccatggcttgatggagcagggcggggggctcctgagtgggggcttgaccatggacttggaccactctataggaactcagtatagtgccaacccacctgttacaattgatgtaccaatgacagacatgacatctggcttgatggggcatagccagttgaccaccattgatcagtcagaactgagttcccagctgggtttgagcctagggggtggcaccatcctgccacctgcccagtcacctgaagatcgtct

SEQ ID NO: 191758 - DNA, 4534 bp, Homo sapiens
  Payload ID: 17883
  Gene Name: TOX high mobility group box family member 4
  Uniprot ID: O94842
  ENST ID: ENST00000448790
  CDS Start-End: 104-1969
agcagagagaacacacgtccttgcggaagtgacggcagttccgagtccagtgggggcggtgggagcgatgagggtctgagacggtgggagcggttgtgtgaagatggagtttcccggaggaaatgacaattacctgacgatcacagggccttcgcaccccttcctgtcaggggccgagacattccatacaccaagcttgggtgatgaggaatttgaaatcccacctatctccttggattctgatccctcattggctgtctcagatgtggttggccactttgatgacctggcagacccttcctcttcacaggatggcagtttttcagcccagtatggggtccagacattggacatgcctgtgggcatgacccatggcttgatggagcagggcggggggctcctgagtgggggcttgaccatggacttggaccactctataggaactcagtatagtgccaacccacctgttacaattgatgtaccaatgacagacatgacatctggcttgatggggcatagccagttgaccaccattgatcagtcagaactgagttcccagctgggtttgagcctagggggtggcaccatcctgccacctgcccagtcacctgaagatcgtctttcaaccaccccttcacctactagttcacttcacgaggatggtgttgaggatttccggaggcaacttcccagccagaagacagtcgtggtggaagcagggaaaaagcagaaggccccaaagaagagaaaaaagaaagatcctaatgaacctcagaaaccagtttcagcatatgctttattctttcgtgatacacaggctgccatcaagggacagaatcctaatgccacttttggtgaggtttcaaaaattgtggcctccatgtgggatagtcttggagaggagcaaaaacaggtatataagaggaaaactgaggctgccaagaaagagtatctgaaggcactggctgcttacaaagacaaccaggagtgtcaggccactgtggaaacagtggaattggatccagcaccaccatcacaaactccttctccacctcctatggctactgttgacccagcatctccagcaccagcttcaatagagccccctgccctgtccccatccattgttgttaactccaccctttcatcctatgtggcaaaccaggcatcttctggagctgggggtcagcccaatatcaccaagttgattattaccaaacaaatgttgccctcttctattactatgtctcaaggagggatggttactgttatcccagccacagtggtgacctcccgggggctccaactaggccaaaccagtacagctactatccagcccagtcaacaagcccagattgtcactcggtcagtgttgcaggcagcagcagctgctgctgctgctgcttctatgcaactgcctccaccccgactacagccccctccattacaacagatgccacagcccccgactcagcagcaagttaccattctgcagcagcctcctccactccaggccatgcaacagcctccacctcagaaagttcgaatcaatttacagcaacagcctcctcctctgcagatcaagagtgtgcctctacccactttgaaaatgcagactaccttagtcccaccaactgtggaaagtagtcctgagcggcctatgaacaacagccctgaggcccatacagtggaggcaccttctcctgagactatctgtgagatgatcacagatgtagttcctgaggttgagtctccttctcagatggatgttgaattggtgagtgggtctcctgtggcactctcaccccagcctcgatgtgtgaggtctggttgtgagaaccctcccattgtgagtaaggactgggacaatgaatactgcagcaatgagtgtgtggtgaagcactgcagggatgtattcttggcctgggtagcctctagaaattcaaacacagtggtgtttgtgaaatagtccttcctgttctccaagccagtgaagagttatctgctgggaaagtgtccaagagcctgtttttgaaacacaagctgggcttctggtagtgcctcatcacaacccatgatggctgttcatgtttcaccccttttcttccttcagcagaggccaggctatggagcagggccactgaatttgctgtaatctggagatgctttttactttcaaccataagcggtaatagcagaggaaagggtgaagggagtctgggcaagcaaagcatagagatggtggggtggtggtggggttgaagaaacttgttggtataattgtcataggacttgcctaaaatattattaaaattacgggagtgtactcagctttgagcctaggagaaaatgccactgtgtgcatccattttaaagggttccctcataaaaaaatgttattccccattatcacatcagtacactgctttgaaaacaaaacttttcaacatgggcatactgggctacatggaaaatgacatcacccaggagtgatttctctttatatatattatttctgcagttaccatccttatctgagttatcacagttcatgaatctaagaggcggaactctacatcattagtaagaggttccaccaaagtctaaagttgtattcacttgtgtttgatgaactatctttaaaagaccataggtctatcattatttcttagacataatctaaagaaaaacagactagagaagccacctggttgtaacagaataagcagaagtttacagcatgatagtccaagtggtgataactttaaataaaactcaaatttttactgtttgtagacaggaatgctgtcctagagaacctcctcctcaaccagctacgtacatagttttatcctatgcattcctgttttctgtgtgttttttgttttttttttttttttttttttttgagacagagtctcgctctgtcacccaggctggagtgcagtggtgcgacctcagctcactgaaacctctgcctcccgggttcaagcgattctcctgcatcagcctcccgagtagctaggattacaggcgcccgccactacgcccagctaatttgtggtatttttagtagagacagggtttcaccatgttggccaggctggtctcgaactcctgacctcatgatccgcccgccttgacctcccaaagtgctgggattacaggcatgagccaccgcacccagcctgcattcctgtttttttaatggttttggagggtagcagtagagatggggtctcactatgttgcccagtctagtcttgaactcctgggctacagttaccctcctacctcggcttcccaaagtgctcggattacaggtgtgagccactgtgcctagcctataatgatcattttaatgtttcccatgcactcatttagtttgaaccttcacagcaacccaatgaggtaatactcccatttcacatataatactgagagatgagttgcacaagattatacactgttaagtagcagagccagaatggacttcagaatcccaactacaatacaaatgtttatttaaataaagaagaaagctattgtacaaatatcactcttcaggtttagcttacagagccatggctatggattcttagctctgtaaggaagtgcttctataaattcttaggtttagagatgataccatctgggtacctttgcttgaaccgtgcaaccacatctgggtctagtaggtggatcccatccagttggtttccaagggtgatcctgaaacagtgtaaaaggaggggcaaaccagaaatcctggaattagagggtttaatattgttaaaaaatgcataccaaatgaagactgcctatcatcatatcaaatatgccaattctaaaaagagcttaacattagaatagtatatggtagaattactagttcagaattggcatagattctggtgttaaaatagactggatctgtattatctgagggttagtaactaatgcttagccaggcctgcttcacagagttgctaccagggagtattctttggataagcaaaatgctagcagcatgtgttttaagctctgttaaggggtgaaagatgtaattattgacagattaaatagataacttcgtaaccaccagggggcagattcaatacatcacagaatggctgaggaagatccttgggttgtgaagagagtagaaaccctagggagcagtgcttttgggtcctagaacctgttgagtttctaatgaatatttgtagaatctcataaaacagtttaaatacaagcttaagtggcttatgaatcctgtgaagctcatttatggactagtgtaaaacaatgtgaagctctactaagttctgtccttaatcataaataatagccccttgaggactagcctgttctctggtcaccttaccagttgggttgcacattgtgtggtcgtccaaataactcaatcttgcgagtgccaggagatagtctttcaatcatgccatagatttcatctggtttatgactggtggaacgaacctaggaaataaaaactagctgctttttaagttac

SEQ ID NO: 191759 - DNA, 724 bp, Homo sapiens
  Payload ID: 17883
  Gene Name: TOX high mobility group box family member 4
  ENST ID: ENST00000416256
  CDS Start-End: 59-724
cacctgaaagagaaagcacactcccggaatcacgcagccctggaacaccttccagagtatggacttcccggaccagagaaggggggctcccgagccccgcccccggccgccccgaaccgccccgcccgtctcgaatcgcccagcccacaaatttcccggaggaaatgacaattacctgacgatcacagggccttcgcaccccttcctgtcaggggccgagacattccatacaccaagcttgggtgatgaggaatttgaaatcccacctatctccttggattctgatccctcattggctgtctcagatgtggttggccactttgatgacctggcagacccttcctcttcacaggatggcagtttttcagcccagtatggggtccagacattggacatgcctgtgggcatgacccatggcttgatggagcagggcggggggctcctgagtgggggcttgaccatggacttggaccactctataggaactcagtatagtgccaacccacctgttacaattgatgtaccaatgacagacatgacatctggcttgatggggcatagccagttgaccaccattgatcagtcagaactgagttcccagctgggtttgagcctagggggtggcaccatcctgccacctgcccagtcacctgaagatcgtctttcaaccaccccttcacctactagttcacttcacgaggatggtgttgaggatttccggagg

SEQ ID NO: 191760 - DNA, 565 bp, Homo sapiens
  Payload ID: 17883
  Gene Name: TOX high mobility group box family member 4
  ENST ID: ENST00000457430
  CDS Start-End: 56-565
agtgggggcggtgggagcgatgagggtctgagacggtgggagcggttgtgtgaagatggagacattccatacaccaagcttgggtgatgaggaatttgaaatcccacctatctccttggattctgatccctcattggctgtctcagatgtggttggccactttgatgacctggcagacccttcctcttcacaggatggcagtttttcagcccagtatggggtccagacattggacatgcctgtgggcatgacccatggcttgatggagcagggcggggggctcctgagtgggggcttgaccatggacttggaccactctataggaactcagtatagtgccaacccacctgttacaattgatgtaccaatgacagacatgacatctggcttgatggggcatagccagttgaccaccattgatcagtcagaactgagttcccagctgggtttgagcctagggggtggcaccatcctgccacctgcccagtcacctgaagatcgtctttcaaccaccccttcacctactagttcacttcacgaggatggtgttgaggatttccggagg

SEQ ID NO: 191761 - DNA, 4711 bp, Homo sapiens
  Payload ID: 17883
  Gene Name: TOX high mobility group box family member 4
  Uniprot ID: O94842
  ENST ID: ENST00000613569
  CDS Start-End: 277-2142
ccgcccccgccacccaatttgggagcttcgaatgcccgcccgagccttgaaggcgaaccacctgagggttacctgtgtctccgatgatgatatacttgaagagataagcataagtcatgggggcgatagcccagcgcctgactctctgcagccccacggcgctccttccaatcagcagagagaacacacgtccttgcggaagtgacggcagttccgagtccagtgggggcggtgggagcgatgagggtctgagacggtgggagcggttgtgtgaagatggagtttcccggaggaaatgacaattacctgacgatcacagggccttcgcaccccttcctgtcaggggccgagacattccatacaccaagcttgggtgatgaggaatttgaaatcccacctatctccttggattctgatccctcattggctgtctcagatgtggttggccactttgatgacctggcagacccttcctcttcacaggatggcagtttttcagcccagtatggggtccagacattggacatgcctgtgggcatgacccatggcttgatggagcagggcggggggctcctgagtgggggcttgaccatggacttggaccactctataggaactcagtatagtgccaacccacctgttacaattgatgtaccaatgacagacatgacatctggcttgatggggcatagccagttgaccaccattgatcagtcagaactgagttcccagctgggtttgagcctagggggtggcaccatcctgccacctgcccagtcacctgaagatcgtctttcaaccaccccttcacctactagttcacttcacgaggatggtgttgaggatttccggaggcaacttcccagccagaagacagtcgtggtggaagcagggaaaaagcagaaggccccaaagaagagaaaaaagaaagatcctaatgaacctcagaaaccagtttcagcatatgctttattctttcgtgatacacaggctgccatcaagggacagaatcctaatgccacttttggtgaggtttcaaaaattgtggcctccatgtgggatagtcttggagaggagcaaaaacaggtatataagaggaaaactgaggctgccaagaaagagtatctgaaggcactggctgcttacaaagacaaccaggagtgtcaggccactgtggaaacagtggaattggatccagcaccaccatcacaaactccttctccacctcctatggctactgttgacccagcatctccagcaccagcttcaatagagccccctgccctgtccccatccattgttgttaactccaccctttcatcctatgtggcaaaccaggcatcttctggagctgggggtcagcccaatatcaccaagttgattattaccaaacaaatgttgccctcttctattactatgtctcaaggagggatggttactgttatcccagccacagtggtgacctcccgggggctccaactaggccaaaccagtacagctactatccagcccagtcaacaagcccagattgtcactcggtcagtgttgcaggcagcagcagctgctgctgctgctgcttctatgcaactgcctccaccccgactacagccccctccattacaacagatgccacagcccccgactcagcagcaagttaccattctgcagcagcctcctccactccaggccatgcaacagcctccacctcagaaagttcgaatcaatttacagcaacagcctcctcctctgcagatcaagagtgtgcctctacccactttgaaaatgcagactaccttagtcccaccaactgtggaaagtagtcctgagcggcctatgaacaacagccctgaggcccatacagtggaggcaccttctcctgagactatctgtgagatgatcacagatgtagttcctgaggttgagtctccttctcagatggatgttgaattggtgagtgggtctcctgtggcactctcaccccagcctcgatgtgtgaggtctggttgtgagaaccctcccattgtgagtaaggactgggacaatgaatactgcagcaatgagtgtgtggtgaagcactgcagggatgtattcttggcctgggtagcctctagaaattcaaacacagtggtgtttgtgaaatagtccttcctgttctccaagccagtgaagagttatctgctgggaaagtgtccaagagcctgtttttgaaacacaagctgggcttctggtagtgcctcatcacaacccatgatggctgttcatgtttcaccccttttcttccttcagcagaggccaggctatggagcagggccactgaatttgctgtaatctggagatgctttttactttcaaccataagcggtaatagcagaggaaagggtgaagggagtctgggcaagcaaagcatagagatggtggggtggtggtggggttgaagaaacttgttggtataattgtcataggacttgcctaaaatattattaaaattacgggagtgtactcagctttgagcctaggagaaaatgccactgtgtgcatccattttaaagggttccctcataaaaaaatgttattccccattatcacatcagtacactgctttgaaaacaaaacttttcaacatgggcatactgggctacatggaaaatgacatcacccaggagtgatttctctttatatatattatttctgcagttaccatccttatctgagttatcacagttcatgaatctaagaggcggaactctacatcattagtaagaggttccaccaaagtctaaagttgtattcacttgtgtttgatgaactatctttaaaagaccataggtctatcattatttcttagacataatctaaagaaaaacagactagagaagccacctggttgtaacagaataagcagaagtttacagcatgatagtccaagtggtgataactttaaataaaactcaaatttttactgtttgtagacaggaatgctgtcctagagaacctcctcctcaaccagctacgtacatagttttatcctatgcattcctgttttctgtgtgttttttgttttttttttttttttttttttttgagacagagtctcgctctgtcacccaggctggagtgcagtggtgcgacctcagctcactgaaacctctgcctcccgggttcaagcgattctcctgcatcagcctcccgagtagctaggattacaggcgcccgccactacgcccagctaatttgtggtatttttagtagagacagggtttcaccatgttggccaggctggtctcgaactcctgacctcatgatccgcccgccttgacctcccaaagtgctgggattacaggcatgagccaccgcacccagcctgcattcctgtttttttaatggttttggagggtagcagtagagatggggtctcactatgttgcccagtctagtcttgaactcctgggctacagttaccctcctacctcggcttcccaaagtgctcggattacaggtgtgagccactgtgcctagcctataatgatcattttaatgtttcccatgcactcatttagtttgaaccttcacagcaacccaatgaggtaatactcccatttcacatataatactgagagatgagttgcacaagattatacactgttaagtagcagagccagaatggacttcagaatcccaactacaatacaaatgtttatttaaataaagaagaaagctattgtacaaatatcactcttcaggtttagcttacagagccatggctatggattcttagctctgtaaggaagtgcttctataaattcttaggtttagagatgataccatctgggtacctttgcttgaaccgtgcaaccacatctgggtctagtaggtggatcccatccagttggtttccaagggtgatcctgaaacagtgtaaaaggaggggcaaaccagaaatcctggaattagagggtttaatattgttaaaaaatgcataccaaatgaagactgcctatcatcatatcaaatatgccaattctaaaaagagcttaacattagaatagtatatggtagaattactagttcagaattggcatagattctggtgttaaaatagactggatctgtattatctgagggttagtaactaatgcttagccaggcctgcttcacagagttgctaccagggagtattctttggataagcaaaatgctagcagcatgtgttttaagctctgttaaggggtgaaagatgtaattattgacagattaaatagataacttcgtaaccaccagggggcagattcaatacatcacagaatggctgaggaagatccttgggttgtgaagagagtagaaaccctagggagcagtgcttttgggtcctagaacctgttgagtttctaatgaatatttgtagaatctcataaaacagtttaaatacaagcttaagtggcttatgaatcctgtgaagctcatttatggactagtgtaaaacaatgtgaagctctactaagttctgtccttaatcataaataatagccccttgaggactagcctgttctctggtcaccttaccagttgggttgcacattgtgtggtcgtccaaataactcaatcttgcgagtgccaggagatagtctttcaatcatgccatagatttcatctggtttatgactggtggaacgaacctaggaaataaaaactagctgctttttaagttacacaa

SEQ ID NO: 191762 - DNA, 2782 bp, Homo sapiens
  Payload ID: 17884
  Gene Name: TP53 induced glycolysis regulatory phosphatase
  Uniprot ID: Q9NQ88
  ENST ID: ENST00000179259
  CDS Start-End: 68-880
ggggaggtagcccgcagtgcaggggcagcgcggcgcggggccaccgacgggacgcggctccgggaacatggctcgcttcgctctgactgttgtccggcatggagaaacaagatttaacaaggagaaaataatccaaggacaaggagtagatgaacctctttcagaaactggatttaaacaagcagcagctgctggtatatttctgaataatgtgaagtttactcatgctttctccagtgatctcatgaggacaaagcagaccatgcatggaattttggagagaagcaaattttgcaaagatatgacggtaaagtatgactcaagacttcgggaaaggaaatacggggttgtagaaggcaaagcgctaagtgagctgagggccatggccaaagcagccagggaagagtgccctgtgtttacaccgcccggaggagagacgctggaccaggtgaaaatgcgtggaatagacttttttgaatttctttgtcaactaatcctgaaagaagcggatcaaaaagaacagttttcccaaggatctccaagcaactgtctggaaacttctttggcagagatatttcctttaggaaaaaatcacagctctaaagttaattcagacagcggtattccaggattagcagccagtgtcttagttgtgagtcacggtgcttacatgagaagtctgtttgattattttctgactgaccttaagtgttccttaccagccactctgagcagatctgaacttatgtcagtcactcccaatacagggatgagtctctttatcataaactttgaggaaggaagagaagttaaaccaacggttcagtgtatttgtatgaacctacaggatcatctaaatggactgactgaaactcgctaaggttaaatctgcatcaaaatctaaccattttgagcctctgaagggagtgccattggctttatttacttctctcctctgctagttctgatttggaaacagttaaaagccaatttttagctccagtggaaccatagccacataaaactttaatggacaaccatatagaattaacttattttgtccaagtacagttggcattttccagaataattttaccaccctgctagatgtcatctctggattgcacatggatgatgaaggaactcagcattgaaagttgggggattagtaaccttgttacaacggtttctttttcattttagcctattttaatggctattggtaagatactgtatgtttttagtatctcatccagtgcttagaagaaagaatggtttataattcccagtacatgtttatattgactgtgttatatttttaaatcctttaaataaaaaatccttataagtttatgtaaagcaaaataacactaacatgttttacgtataaatcaactattggaattttttattctagagggcttgaaatgtggatgaatacagattatgattgcagaatggtctgggggaagaagttaaaacatttgatttaaatacagtaaagaaagaatcttggagcagaagatagaagaacagccttttctaaataatgccttgccaaagtcaagtcaatggaaaccaggaaagccaaaaaaatgaagaatatccacttgcttcttatctaacctgtaggctgaagaatttccagtttgaggaaggctctaaagaaagtaaacagttaacagaacaccacacagtaatcagaataaaagaggggccttctttgtaaagaatggtgctctgggccgggcccagtggctcacacctgtaatcccagcactttgggaggctgaggcgggcggatcacaaggtcaggaattctagaccagcctggccaacaatggtgaaaccctgtctctactacaaatacaaaaaagccaggcgtggtagcaggcgcctgtaatcccagctacttgggaggttgaggcaggagaatcgcttgaacccgggaggtggaggttgcagtgagccgagatcgcaccacttcactccagcctaggtgacagaggggatgacagagggtgctctgcgggcagggaaggcggggtggttgggggggagagaatgttgctctgataaccacagctgtggttattttgtggcaggtacaggtgaggttgcctcttctttccaccagatggcactggagaaaagggattttgattaacttaattttatacacaagattggtctttcagaaatctttatctaaatgaagaaactgttctacatgtagttcgcttttaagtcaccatgttgctaaatgctgtgagtctcaactttaaagagggttaatactaaagttgtcagttaaggctatagtcacatatagtcaaaatttactttgacatcattttaaatcatatgtaaaattcagtattatattgttcttagtgtgtctagcactaccagttttctaccagtattgaaacagggcacgtgtttgagcatcagaggaagtatactgtaaataaaaatttgaaaaataagcaaaaaggacagacaataattatctccattcccaccatactgaagtcatctttccacttttttttttaaagaaacaaaacataaagataaaagtagagttctctttaaccagctctcacagtcctgttccctccagaggcagccactgcagtgagtctgtgtatatgttcacctgttcatctgcttgcaatgttcatctgttccttatattttcacctagtgtctggaaggagatggtactgttttggtgctttaaaaataaatatcaagccatctgtgttctttattttta

SEQ ID NO: 191763 - DNA, 3633 bp, Homo sapiens
  Payload ID: 17884
  Gene Name: TP53 induced glycolysis regulatory phosphatase
  ENST ID: ENST00000635110
  CDS Start-End: 1140-1775
aactgggcggcctgagaaagcaagaccagcgcccctgcctctgtctcattgtccccctgaagctttgagtttatgcttcaagctttgagtttactcattattatggtttctttcatgctgattcgctcggaggaccctggcccttctgctgcgctcaccgccgccgctctggtaaatgactgtccgcatggtttcaacatgcagttcttcctgcgaagtccactaggtggtactaatgccacggacaggatcactcacaaggaaacccagagccagccgggtgtaggttgcctctgccctgcacggaagggaacacctccctccagcagacagcactggagcagcacccccgcctccgccatctccccagggcagcctggggaaggaacgtcaggcctttcccgtccacacctggcgcagttccctcacctgcttctctcactaccgccacatcgtgactccatctggggtggctggtgctggttcatcaccttccctgactcttcagtgactaatccagagatggcacactggcagcttacagaccaaatccagcctgcagacataattagcttgactcccacagtgattgaaactgtcttggatttacttgccaatacaagatgagagctttcacataaaagtcaggattgtaacgactcttgggagatttaagtcctggcaaccacaggcccgcgaggccgcgagggctgcagctgagtgtgactggcccctttctctaccctctgcccaccccacaaccgactgaacccgctgctctcttttacggcgcctgccagtcggcttagggcttacagctctgcagcctaacctgtgtctgttttacctccctggccaggaaggagggcccagtaagtcccaagtggagtcatcctcctccaaccctctccaccacaaacagacctggaatacttctttcagtttgtggaccataacctctccttctcagacgaagaaagaccgtactgcctcatggagaaacaagatttaacaaggagaaaataatccaaggacaaggagtagatgaacctctttcagaaactggatttaaacaagcagcagctgctggtatatttctgaataatgtgaagtttactcatgctttctccagtgatctcatgaggacaaagcagaccatgcatggaattttggagagaagcaaattttgcaaagatatgacggtaaagtatgactcaagacttcgggaaaggaaatacggggttgtagaaggcaaagcgctaagtgagctgagggccatggccaaagcagccagggaagagtgccctgtgtttacaccgcccggaggagagacgctggaccaggtgaaaatgcgtggaatagacttttttgaatttctttgtcaactaatcctgaaagaagcggatcaaaaagaacagttttcccaaggatctccaagcaactgtctggaaacttctttggcagagatatttcctttaggaaaaaatcacagctctaaagttaattcagacagcggtattccaggattagcagccagtgtcttagttgtgagtcacggtgcttacatgagaagtctgtttgattattttctgactgaccttaagtgttccttaccagccactctgagcagatctgaacttatgtcagtcactcccaatacagggatgagtctctttatcataaactttgaggaaggaagagaagttaaaccaacggttcagtgtatttgtatgaacctacaggatcatctaaatggactgactgaaactcgctaaggttaaatctgcatcaaaatctaaccattttgagcctctgaagggagtgccattggctttatttacttctctcctctgctagttctgatttggaaacagttaaaagccaatttttagctccagtggaaccatagccacataaaactttaatggacaaccatatagaattaacttattttgtccaagtacagttggcattttccagaataattttaccaccctgctagatgtcatctctggattgcacatggatgatgaaggaactcagcattgaaagttgggggattagtaaccttgttacaacggtttctttttcattttagcctattttaatggctattggtaagatactgtatgtttttagtatctcatccagtgcttagaagaaagaatggtttataattcccagtacatgtttatattgactgtgttatatttttaaatcctttaaataaaaaatccttataagtttatgtaaagcaaaataacactaacatgttttacgtataaatcaactattggaattttttattctagagggcttgaaatgtggatgaatacagattatgattgcagaatggtctgggggaagaagttaaaacatttgatttaaatacagtaaagaaagaatcttggagcagaagatagaagaacagccttttctaaataatgccttgccaaagtcaagtcaatggaaaccaggaaagccaaaaaaatgaagaatatccacttgcttcttatctaacctgtaggctgaagaatttccagtttgaggaaggctctaaagaaagtaaacagttaacagaacaccacacagtaatcagaataaaagaggggccttctttgtaaagaatggtgctctgggccgggcccagtggctcacacctgtaatcccagcactttgggaggctgaggcgggcggatcacaaggtcaggaattctagaccagcctggccaacaatggtgaaaccctgtctctactacaaatacaaaaaagccaggcgtggtagcaggcgcctgtaatcccagctacttgggaggttgaggcaggagaatcgcttgaacccgggaggtggaggttgcagtgagccgagatcgcaccacttcactccagcctaggtgacagaggggatgacagagggtgctctgcgggcagggaaggcggggtggttgggggggagagaatgttgctctgataaccacagctgtggttattttgtggcaggtacaggtgaggttgcctcttctttccaccagatggcactggagaaaagggattttgattaacttaattttatacacaagattggtctttcagaaatctttatctaaatgaagaaactgttctacatgtagttcgcttttaagtcaccatgttgctaaatgctgtgagtctcaactttaaagagggttaatactaaagttgtcagttaaggctatagtcacatatagtcaaaatttactttgacatcattttaaatcatatgtaaaattcagtattatattgttcttagtgtgtctagcactaccagttttctaccagtattgaaacagggcacgtgtttgagcatcagaggaagtatactgtaaataaaaatttgaaaaataagcaaaaaggacagacaataattatctccattcccaccatactgaagtcatctttccacttttttttttaaagaaacaaaacataaagataaaagtagagttctctttaaccagctctcacagtcctgttccctccagaggcagccactgcagtgagtctgtgtatatgttcacctgttcatctgcttgcaatgttcatctgttccttatattttcacctagtgtctggaaggagatggtactgttttgg

SEQ ID NO: 191764 - DNA, 1182 bp, Homo sapiens
  Payload ID: 17885
  Gene Name: TP53 regulated inhibitor of apoptosis 1
  Uniprot ID: O43715
  ENST ID: ENST00000546954
  CDS Start-End: 41-271
atcagagtgcgccgtcgtcgccgccgccaccactgtcgccatgaacagtgtgggggaggcatgcacggacatgaagcgcgagtacgaccagtgcttcaatcgctggttcgccgagaaatttctcaagggggacagctccggggacccgtgcaccgacctcttcaagcgctaccagcagtgtgttcagaaagcaataaaggagaaagagattcctattgaaggactggagttcatgggccatggcaaagaaaagcctgaaaattcttcttgaccttgacagtcaccttgaaggatttcgcaagtccagaaattgaggactctggatttttgtcaactaactctgtgaacatagccatcagatttgatgaggaacttaggagagaggagttttatttcctccttcgatgttttcctctcagttgtaaaagatgaactctttgagatgatttctcacctgctgtggtatcttgcaggaactgtgtgctaaaattgaacaatttttttgagattatggttgcaatacttggcgtggaatcagctttacataaatataccttgtatgcaaacgatgataaactagtcaggatgagcagagctgcctgacctcttgatttctgctgcaaaagacatatacactgtactggggtcactatttatgaaagcaattggttaggacctctttttttcctctcagggaactaatgctctgaaaagggatctgggcacaacagtttcagtgagtgcttttgagcacacttttatttttatatagtaactaatggttaagattgatggtggcctggattagcaaagaggaagacagcttttaacacagttccctgccttcacaagaggtgtcagattaagatgtgaaagctgcaagaatgttgcagtgaacaccatttcagagctctcagtgtgcagttcaggaattaagatacttggaatagctgtggaggaagaacctaaattgcaaagatctgctattgccagctctcaacccaagtcagtgaattgtcaacctgcatatcctaaaaatgtcaaaatgctgcatctggttaaatgtcggggtaggggggaagctgaaggtgctcgcttcatttgccttgtttactcatcctgccctgtaatgtctgtaatcctgaagatggaataaattgtaacatttagtttctatcatta

SEQ ID NO: 191765 - DNA, 2012 bp, Homo sapiens
  Payload ID: 17886
  Gene Name: TP53 regulating kinase
  ENST ID: ENST00000372102
  CDS Start-End: 27-392
ggttggagctgttgcgccgagcagtcatggcggcggccagagctactacgccggccgatggcgaggagcccgccccggaggctgaggctctggccgcagcccgggagcggagcagccgcttcttgagcggcctggagctggtgaagcagggtgccgaggcgcgcgtgttccgtggccgcttccagggccgcgcggcggtgatcaagcaccgcttccccaagggctaccggcacccggcgctggaggcgcggcttggcagacggcggacggtgcaggaggcccgggcgctcctccgctgtcgccgcgctggtaaggaatatctgccccagttgtcttttttgtggactatgcttccaactgcttatatatggaagaaattgaaggctcagtgactgttcgagattatattcagtccactatggagactgaaaaaactccccagggtctctccaacttagccaagacaattgggcaggttttggctcgaatgcacgatgaagacctcattcatggtgatctcaccacctccaacatgctcctgaaaccccccctggaacagctgaacattgtgctcatagactttgggctgagtttcatttcagcacttccagaggataagggagtagacctctatgtcctggagaaggccttcctcagtacccatcccaacactgaaactgtgtttgaagcctttctgaagagctactccacctcctccaaaaaggccaggccagtgctaaaaaaattagatgaagtgcgcctgagaggaagaaagaggtccatggttgggtagaagaatgtgtatgacaaccacacacagtgaagctcttttttcaaagtaaatttgaagaaatgctacaagtatgagatgagatctaagtaaaggtgttaagatatttttaagtggtatgtgatcgtgtcattatcatctgcacttcactcaagagcttactatgtgtctaagtcatgttctaggcagaattgggtatttaaagtaaattgaggacaggcttctcccagattgtgacatgtatatctcagatacatgggtgtggcattgaaccacataatgagaacattattctctttttagtccttgtgagacaaggatgaagtctcagttgctgatactcgctgagcttactggccctctaacccagtgtttttttttgttgttgttgtgtacatgttatatttattttgaaaccagtttaatgggatacaaccagcattttaaaaaatgaaatagaatacagcatggaaaatatcagtgtattgttttatgaaactttcacgtgtatatatagaccaaggatatgtgctgagttttgatgtcaaatatatttctctttcagggtcatgatcaaaaaatgaaaagtctgcttaactccaatttctcttttaaaaaagcagacttacagctttcaggcaactgaaattcatgttaacatgtttttatttttattgctttgtatttttgtggttaccttctaagacaagtgattgatctaaagttccttttaagtttataccgctaaacaaactgagttgatttctatcacaggcagtaagtaggtagagcaaaaatggtgaagtgacttgtgaagactgaagtttgatgaagtctggtttaaggcacaggtaaactgagtgtggatgcaaaagtaccaggagctagcttttaaccttgcccagcctcagtttcttttcttagaagaagctatgtttgggtgggaagggaagagagggataagaaaatacctttcttccttgtaaactccaatcaacaaacatattttgagtgccttttgtgttccttggcaccctgttgggtattgggtacttggcaccctgttgggtattgggtacaatggtgagccagacagacacagcgcctgtccttttgtaagaatatttatttttataaaaaagtataaagtatacagtgggatgttttgatatacattatgaaatgattgctacagctgagctaattaacacccatcacctca

SEQ ID NO: 191766 - DNA, 3515 bp, Homo sapiens
  Payload ID: 17886
  Gene Name: TP53 regulating kinase
  Uniprot ID: Q96S44
  ENST ID: ENST00000372114
  CDS Start-End: 366-1127
gaaagagacgaccaactgagaggtgggcccccaaagccggctgcgagagtcaccgaagatttccggagagccaaggagtcgggaagagccacttactgagcgttgccgaacgtgtacggagatagccgaagaggcggaaggcggggccacaagagcccttcctgcagggaacctcaggcttcagagagccgaaaagttgggaggcgtaaccacttacaggccggaagtgtccggggtggacgcattcgggtagccgaagaagtcccaggattgccgaagaagtcccaggatttccgaagcgagccgaagcatcgcgacagttttcagagacagctgatcggttggagctgttgcgccgagcagtcatggcggcggccagagctactacgccggccgatggcgaggagcccgccccggaggctgaggctctggccgcagcccgggagcggagcagccgcttcttgagcggcctggagctggtgaagcagggtgccgaggcgcgcgtgttccgtggccgcttccagggccgcgcggcggtgatcaagcaccgcttccccaagggctaccggcacccggcgctggaggcgcggcttggcagacggcggacggtgcaggaggcccgggcgctcctccgctgtcgccgcgctggaatatctgccccagttgtcttttttgtggactatgcttccaactgcttatatatggaagaaattgaaggctcagtgactgttcgagattatattcagtccactatggagactgaaaaaactccccagggtctctccaacttagccaagacaattgggcaggttttggctcgaatgcacgatgaagacctcattcatggtgatctcaccacctccaacatgctcctgaaaccccccctggaacagctgaacattgtgctcatagactttgggctgagtttcatttcagcacttccagaggataagggagtagacctctatgtcctggagaaggccttcctcagtacccatcccaacactgaaactgtgtttgaagcctttctgaagagctactccacctcctccaaaaaggccaggccagtgctaaaaaaattagatgaagtgcgcctgagaggaagaaagaggtccatggttgggtagaagaatgtgtatgacaaccacacacagtgaagctcttttttcaaagtaaatttgaagaaatgctacaagtatgagatgagatctaagtaaaggtgttaagatatttttaagtggtatgtgatcgtgtcattatcatctgcacttcactcaagagcttactatgtgtctaagtcatgttctaggcagaattgggtatttaaagtaaattgaggacaggcttctcccagattgtgacatgtatatctcagatacatgggtgtggcattgaaccacataatgagaacattattctctttttagtccttgtgagacaaggatgaagtctcagttgctgatactcgctgagcttactggccctctaacccagtgtttttttttgttgttgttgtgtacatgttatatttattttgaaaccagtttaatgggatacaaccagcattttaaaaaatgaaatagaatacagcatggaaaatatcagtgtattgttttatgaaactttcacgtgtatatatagaccaaggatatgtgctgagttttgatgtcaaatatatttctctttcagggtcatgatcaaaaaatgaaaagtctgcttaactccaatttctcttttaaaaaagcagacttacagctttcaggcaactgaaattcatgttaacatgtttttatttttattgctttgtatttttgtggttaccttctaagacaagtgattgatctaaagttccttttaagtttataccgctaaacaaactgagttgatttctatcacaggcagtaagtaggtagagcaaaaatggtgaagtgacttgtgaagactgaagtttgatgaagtctggtttaaggcacaggtaaactgagtgtggatgcaaaagtaccaggagctagcttttaaccttgcccagcctcagtttcttttcttagaagaagctatgtttgggtgggaagggaagagagggataagaaaatacctttcttccttgtaaactccaatcaacaaacatattttgagtgccttttgtgttccttggcaccctgttgggtattgggtacttggcaccctgttgggtattgggtacaatggtgagccagacagacacagcgcctgtccttttgtaagaatatttatttttataaaaaagtataaagtatacagtgggatgttttgatatacattatgaaatgattgctacagctgagctaattaacacccatcacctcacatagttactgtcttgtttcttaatatggacatttgcagctatgaatttccctctgcacactgttgtcatcacacactctcagttttggtattttgtgtttttgttttcattcatctcaaagtattttctaatttcccttgtgatttcttctttgaccccttgattgtttagaaatctgttaatttccacacatttgtaaatgttccaatttttcttttgttattgccagcttcattccattgtgttcagagatgatacagtcagtgcctgttcttatgaagcaaacattctataatagtaggaccagtaccctgtctgtttcattcaccacagtcagcatgccccaagtgcccagcatggggcggatggccaggaatgagtgaaaacttcccttcctgggtagttgtgactagtagagaggaaaaataatataattgcctgcttactgcatgccaggcattgggctgggaatttttatattggatctaaaataactcttaagttaggcattatccccattttatagatggagaaactggccccaaaaggtgggaacttgtccaagacgtcacaggtagcaagaggtacttttacctggctccaaatctgtgttctttccactgacaaatgagatatgggatatggtgcatctttacagtactataataagtattggcgtataacattattttcaaggaactccaagggccacaggagctgacaggtttttcaattaatattcccaacatgaatgagatgcctcattcctcagtttcctcacgtgtactataaggctagtacctgctttgttggggtatggttggctcgtgtgcattaagtcaacaaatccctagttgatagggtttggctgtgtccccatccaaatctcatcttgaattgttcccgtaatccccacgtgacatgggagggacccagtgggaggtaatttaatcctcggggcggctacctccgtgctgttctcgtgatagcgagtgagttctcacgagatctgatggttttataaggggcttttccctcttgttcggcacttcctgctgccacgtggagaagggtgtgtttgtttccccatctgccatgattataagttttctgaggcatccccagccatgctgaactgtgagttattaaacttttcctttataaatta

SEQ ID NO: 191767 - DNA, 2031 bp, Homo sapiens
  Payload ID: 17887
  Gene Name: TP53 target 3
  Uniprot ID: Q9ULZ0
  ENST ID: ENST00000398682
  CDS Start-End: 636-1010
ggctccacggccacatccgcaaaaagggtactggtgaacgtgacattttcacgaagccacagcccatggtcactccctgcaaagctctgaacttgcgcattcccaggccaggccgtggttgtctttccaaggcggctcagcttgtgctttgcttggagagagcggagggcagcagcacagtgacagcgtctgggacctcagaccagtttccacagccacttatgaaagcagacggctccatgggctggaggaggtgggacgctctggaaagaactcgggtgcgagtgggaaagaaaatcgagctgagcagctggaagtcgaagtcgcgtgagtgaggaccagacactctcgatttaggcaaaggcggggtgcacttcccaacaacacatcctcctcactggcgagaccaggcctgcccttcaagttcctctcctgatttaatccccttggcgagggtttggcatgaaatcaatggccagcaagcttggtaaacgaagccgcctacaccgccctccccctccctgcacggccgcgccccgcctccgctcctgtctcaatctgggattgtcctcctgtagccccaccatccaccgtggggaacggtggagagactacaactcccagtatgcaccgcgatgcgcgcctcaccctgcatctcccagcccgcagccagctggcatcctagaccctctgccctgcgaccaacagccgggagcggaccagacaccagaactcccggaacggttgaagacggttccgctccctgtcccgcctttcgcagcccagcagtttcgccctgcggagaggagccttgctgtttccaaatctctcctgctgaagagacattggagctagggcggctagtttcacctggtaattgtgacaccctgtctcctcgagctgcaggcttttatgcttgtcatgttcgaagtttgataccttgcagatcaacaaagggccggtggcctctcactgcctccgcggcagggttgtcaagtttttcaggttaagtactgcacgactactcgcttctgaaactgatagacactgcctcagctccgtgcagggcagacgcacaagagcagaatctccgtgggacatctctctggagcatcaatattactgcagtatttggaagaaacaaatttaaataagttctaaggtgaagaatggaacatttaagacaagtctggaaagtcatctgcctttaataactgtcgtttgtccttaacgtcagactttctccaagaccaaaactctaagaacttatttccattcttacaaatagtaaaaatgataaatcatatcaagtcaattgaaagtcctgcctgctgctttcctaaattgcaatatggccttggtatggttttatttgtacttttgtgggggattcgtggatctttagattaaaaaaaaaaaaataggtttttgaacaatttttgcaagtttgcagctgttagttattgatttatttttccaacccatctaattcttctgtctctctcctctcctcaggctcaataattccatgggtctctaaggctgtgtttattttctttaaattttgttgatttacttttatactccatttgattttttctatctctcaccttttctcagactcagtcatcccacaggtctgtaaggctctgttcattttctttaaacttcttttttttttcctctcctcagattggataaattatattgctatgtctctgtttctgaactatagaaaagctcaaaattattatttttatttctcattttttatatggctattttttctctgctgatgtttcacatctattcatttatgagaatattttcctttgccctcatgagcgtgtttataatagctgccttcaaattcttgtctgccgtttacatcttggacatcttggagatggctactgcctgctttttatcttgtgtatttattacattttcacgtgtcttcacgcatcccttgaattggaaattgtgccctggagactgtatacaagactggattaaaaagactggattctg

SEQ ID NO: 191768 - DNA, 1887 bp, Homo sapiens
  Payload ID: 17887
  Gene Name: TP53 target 3
  Uniprot ID: Q9ULZ0
  ENST ID: ENST00000565622
  CDS Start-End: 33-431
tggagagactacaactcccagtatgcaccgcgatgcgcgcctcaccctgcatctcccagcccgcagccagctggcatcctagaccctctgccctgcgaccaacagccgggagcggaccagacaccagaactcccggaacggttgaagacggttccgctccctgtcccgcctttcgcagcccagcagtttcgccctgcggagaggagccttgctgtttccaaatctctcctgctgaagagacattggagctagggcggctagtttcacctggtaattgtgacaccctgtctcctcgagctgcaggcttttatgcttgtcatgttcgaagtttgataccttgcagatcaacaaagggccggtggcctctcactgcctccgcggcagggttgtcaagacatgcgcagtgcggcccgtccctagggctgggttaagggccgcggatgtggcagttctcaggcctcttgggatcgcctcaagaagccccctcacgagtgtctcgatttcctgtcagccaacaaagggccgttcgcctttcatggcctccacagcagcgttgccgtggctgtcacaaatcctctgcaccccaggagcgccgcttggacccccgggctcgctgcgtggtccatatctaggtcgggcctctcacggagactttcccaccagtgtaataaagaggagaaaacgtcacagcggaagggcctgaccctgctgcatccactaaggaaacagctacggggatgggaccctgggagctgctgtggagcctcatccaccgcttctctgaccccacccaggctgcttcccaggcctcagggtcttagtgtggacctccgggccgtgattaatgcagtttttcaggttaagtactgcacgactactcgcttctgaaactgatagacactgcctcagctccgtgcagggcagacgcacaagagcagaatctccgtgggacatctctctggagcatcaatattactgcagtatttggaagaaacaaatttaaataagttctaaggtgaagaatggaacatttaagacaagtctggaaagtcatctgcctttaataactgtcgtttgtccttaacgtcagactttctccaagaccaaaactctaagaacttatttccattcttacaaatagtaaaaatgataaatcatatcaagtcaattgaaagtcctgcctgctgctttcctaaattgcaatatggccttggtatggttttatttgtacttttgtgggggattcgtggatctttagattaaaaaaaaaaaaataggtttttgaacaatttttgcaagtttgcagctgttagttattgatttatttttccaacccatctaattcttctgtctctctcctctcctcaggctcaataattccatgggtctctaaggctgtgtttattttctttaaattttgttgatttacttttatactccatttgattttttctatctctcaccttttctcagactcagtcatcccacaggtctgtaaggctctgttcattttctttaaacttcttttttttttcctctcctcagattggataaattatattgctatgtctctgtttctgaactatagaaaagctcaaaattattatttttatttctcattttttatatggctattttttctctgctgatgtttcacatctattcatttatgagaatattttcctttgccctcatgagcgtgtttataatagctgccttcaaattcttgtctgccgtttacatcttggacatcttggagatggctactgcctgctttttatcttgtgtatttattacattttcacgtgtcttcacgcatcccttgaattggaaattgtgccctggagactgtatacaagactggattaaaaagactggattctgttt

SEQ ID NO: 191769 - DNA, 1116 bp, Homo sapiens
  Payload ID: 17887
  Gene Name: TP53 target 3
  Uniprot ID: Q9ULZ0
  ENST ID: ENST00000569420
  CDS Start-End: 31-339
gagagactacaactcccagtatgcaccgcgatgcgcgcctcaccctgcatctcccagcccgcagccagctggcatcctagaccctctgccctgcgaccaacagccgggagcggaccagacaccagaactcccggaacggttgaagacggttccgctccctgtcccgcctttcgcagcccagcagtttcgccctgcggagaggagccttgctgtttccaaatctctcctgctgaagagacattggagctagggcggctagtttcacctggctgtcacaaatcctctgcaccccaggagcgccgcttggacccccgggctcgctgcgtggtccatatctaggtcgggcctctcacggagactttcccaccagtgtaataaagaggagaaaacgtcacagcggaagggcctgaccctgctgcatccactaaggaaacagctacggggatgggaccctgggagctgctgtggagcctcatccaccgcttctctgaccccacccaggctgcttcccaggcctcagggtcttagtgtggacctccgggccgtgattaatgcaggtcagcaggaccagagcgccccttggtccctcccaacacatgagggtagtttgtgtggtgaggtcagggatagtgtctgcgcttctaccctgaatagggctcccttggaaaatactttaatatctctttttaaatacccccttggaccacttttaatagttttctgatagaactaaacagtgatcattctcttaattcatgtttccattaagtttttcaggttaagtactgcacgactactcgcttctgaaactgatagacactgcctcagctccgtgcagggcagacgcacaagagcagaatctccgtgggacatctctctggagcatcaatattactgcagtatttggaagaaacaaatttaaataagttctaaggtgaagaatggaacatttaagacaagtctggaaagtcatctgcctttaataactgtcgtttgtccttaacgtcagactttctccaagaccaaaactctaagaacttatttccattcttacaaatagtaaaaatgataaatcatatcaagtcaattgaaagtcctgcctgctgctttcctaaa

SEQ ID NO: 191770 - DNA, 1053 bp, Homo sapiens
  Payload ID: 17887
  Gene Name: TP53 target 3
  ENST ID: ENST00000563102
  CDS Start-End: 1-429
gggagcggaccagacaccagaactcccggaacggttgaagacggttccgctccctgtcccgcctttcgcagcccagcagtttcgccctgcggagaggagccttgctgtttccaaatctctcctgctgaagagacattggagctagggcggctagtttcacctggtaattgtgacaccctgtctcctcgagctgcaggcttttatgcttgtcatgttcgaagtttgataccttgcagatcaacaaagggccggtggcctctcactgcctccgcggcagggttgtcaaggctgtcacaaatcctctgcaccccaggagcgccgcttggacccccgggctcgctgcgtggtccatatctaggtcgggcctctcacggagactttcccaccagtgtaataaagaggagaaaacgtcacagcggaagggcctgaccctgctgcatccactaaggaaacagctacggggatgggaccctgggagctgctgtggagcctcatccaccgcttctctgaccccacccaggctgcttcccaggcctcagggtcttagtgtggacctccgggccgtgattaatgcagtttttcaggttaagtactgcacgactactcgcttctgaaactgatagacactgcctcagctccgtgcagggcagacgcacaagagcagaatctccgtgggacatctctctggagcatcaatattactgcagtatttggaagaaacaaatttaaataagttctaaggtgaagaatggaacatttaagacaagtctggaaagtcatctgcctttaataactgtcgtttgtccttaacgtcagactttctccaagaccaaaactctaagaacttatttccattcttacaaatagtaaaaatgataaatcatatcaagtcaattgaaagtcctgcctgctgctttcctaaattgcaatatggccttggtatggttttatttgtacttttgtgggggattcgtggatctttagattaaaaaaaaaaaaataggtttttgaacaatttttgcaagtttgcagctgttagttattgatttattt

SEQ ID NO: 191771 - DNA, 1181 bp, Homo sapiens
  Payload ID: 17888
  Gene Name: TP53 target 3 family member E
  ENST ID: ENST00000611321
  CDS Start-End: 31-339
gagagactacaactcccagtatgcaccgcgatgcgcgcctcaccctgcatctcccagcccgcagccagctggcatcctagaccctctgccctgcgaccaacagccgggagcggaccagacaccagaactcccggaacggttgaagacggttccgctccctgtcccgcctttcgcagcccagcagtttcgccctgcggagaggagccttgctgtttccaaatctctcctgctgaagagacattggagctagggcggctagtttcacctggctgtcacaaatcctctgcaccccaggagcgccgcttggacccccgggctcgctgcgtggtccatatctaggtcgggcctctcacggagactttcccaccagtgtaataaagaggagaaaacgtcacagcggaagggcctgaccctgctgcatccactaaggaaacagctacggggatgggaccctgggagctgctgtggagcctcatccaccgcttctctgaccccacccaggctgcttcccaggcctcagggtcttagtgtggacctccgggccgtgattaatgcaggtcagcaggaccagagcgccccttggtccctcccaacacatgagggtagtttgtgtggtgaggtcagggatagtgtctgcgcttctaccctgaatagggctcccttggaaaatactttaatatctctttttaaatacccccttggaccacttttaatagttttctgatagaactaaacagtgatcattctcttaattcatgtttccattaagtttttcaggttaagtactgcacgactactcgcttctgaaactgatagacactgcctcagctccgtgcagggcagacgcacaagagcagaatctccgtgggacatctctctggagcatcaatattactgcagtatttggaagaaacaaatttaaataagttctaaggtgaagaatggaacatttaagacaagtctggaaagtcatctgcctttaataactgtcgtttgtccttaacgtcagactttctccaagaccaaaactctaagaacttatttccattcttacaaatagtaaaaatgataaatcatatcaagtcaattgaaagtcctgcctgctgctttcctaaattgcaatatggccttggtatggttttatttgtacttttgtgggggattcgtggatctttagatta

SEQ ID NO: 191772 - DNA, 2026 bp, Homo sapiens
  Payload ID: 17888
  Gene Name: TP53 target 3 family member E
  ENST ID: ENST00000623491
  CDS Start-End: 636-1010
ggctccacggccacatccgcaaaaagggtactggtgaacgtgacattttcacgaagccacagcccatggtcactccctgcaaagctctgaacttgcgcattcccaggccaggccgtggttgtctttccaaggcggctcagcttgtgctttgcttggagagagcggagggcagcagcacagtgacagcgtctgggacctcagaccagtttccacagccacttatgaaagcagacggctccatgggctggaggaggtgggacgctctggaaagaactcgggtgcgagtgggaaagaaaatcgagctgagcagctggaagtcgaagtcgcgtgagtgaggaccagacactctcgatttaggcaaaggcggggtgcacttcccaacaacacatcctcctcactggcgagaccaggcctgcccttcaagttcctctcctgatttaatccccttggcgagggtttggcatgaaatcaatggccagcaagcttggtaaacgaagccgcctacaccgccctccccctccctgcacggccgcgccccgcctccgctcctgtctcaatctgggattgtcctcctgtagccccaccatccaccgtggggaacggtggagagactacaactcccagtatgcaccgcgatgcgcgcctcaccctgcatctcccagcccgcagccagctggcatcctagaccctctgccctgcgaccaacagccgggagcggaccagacaccagaactcccggaacggttgaagacggttccgctccctgtcccgcctttcgcagcccagcagtttcgccctgcggagaggagccttgctgtttccaaatctctcctgctgaagagacattggagctagggcggctagtttcacctggtaattgtgacaccctgtctcctcgagctgcaggcttttatgcttgtcatgttcgaagtttgataccttgcagatcaacaaagggccggtggcctctcactgcctccgcggcagggttgtcaagtttttcaggttaagtactgcacgactactcgcttctgaaactgatagacactgcctcagctccgtgcagggcagacgcacaagagcagaatctccgtgggacatctctctggagcatcaatattactgcagtatttggaagaaacaaatttaaataagttctaaggtgaagaatggaacatttaagacaagtctggaaagtcatctgcctttaataactgtcgtttgtccttaacgtcagactttctccaagaccaaaactctaagaacttatttccattcttacaaatagtaaaaatgataaatcatatcaagtcaattgaaagtcctgcctgctgctttcctaaattgcaatatggccttggtatggttttatttgtacttttgtgggggattcgtggatctttagattaaaaaaaaaaaaataggtttttgaacaatttttgcaagtttgcagctgttagttattgatttatttttccaacccatctaattcttctgtctctctcctcaggctcaataattccatgggtctctaaggctgtgtttattttctttaaattttgttgatttacttttatactccatttgattttttctatctctcaccttttctcagactcagtcatcccacaggtctgtaaggctctgttcattttctttaaacttcttttttttttcctctcctcagattggataaattatattgctatgtctctgtttctgaactatagaaaagctcaaaattattatttttatttctcattttttatatggctattttttctctgctgatgtttcacatctattcatttatgagaatattttcctttgccctcatgagcgtgtttataatagctgccttcaaattcttgtctgccgtttacatcttggacatcttggagatggctactgcctgctttttatcttgtgtatttattacattttcacgtgtcttcacgcatcccttgaattggaaattgtgccctggagactgtatacaagactggattaaaaagactggattctg

SEQ ID NO: 191773 - DNA, 1806 bp, Homo sapiens; identical to SEQ ID NO: 103612
  Payload ID: 17889
  Gene Name: TP53 target 3 family member F
  ENST ID: ENST00000617705
  CDS Start-End: 31-339

SEQ ID NO: 191774 - DNA, 2031 bp, Homo sapiens; identical to SEQ ID NO: 191767
  Payload ID: 17889
  Gene Name: TP53 target 3 family member F
  ENST ID: ENST00000623042
  CDS Start-End: 636-1010

SEQ ID NO: 191775 - DNA, 2034 bp, Homo sapiens
  Payload ID: 17890
  Gene Name: TP53 target 3B
  Uniprot ID: Q9ULZ0
  ENST ID: ENST00000341305
  CDS Start-End: 636-1010
ggctccacggccacatccgcaaaaagggtactggtgaacgtgacattttcacgaagccacagcccatggtcactccctgcaaagctctgaacttgcgcattcccaggccaggccgtggttgtctttccaaggcggctcagcttgtgctttgcttggagagagcggagggcagcagcacagtgacagcgtctgggacctcagaccagtttccacagccacttatgaaagcagacggctccatgggctggaggaggtgggacgctctggaaagaactcgggtgcgagtgggaaagaaaatcgagctgagcagctggaagtcgaagtcgcgtgagtgaggaccagacactctcgatttaggcaaaggcggggtgcacttcccaacaacacatcctcctcactggcgagaccaggcctgcccttcaagttcctctcctgatttaatccccttggcgagggtttggcatgaaatcaatggccagcaagcttggtaaacgaagccgcctacaccgccctccccctccctgcacggccgcgccccgcctccgctcctgtctcaatctgggattgtcctcctgtagccccaccatccaccgtggggaacggtggagagactacaactcccagtatgcaccgcgatgcgcgcctcaccctgcatctcccagcccgcagccagctggcatcctagaccctctgccctgcgaccaacagccgggagcggaccagacaccagaactcccggaacggttgaagacggttccgctccctgtcccgcctttcgcagcccagcagtttcgccctgcggagaggagccttgctgtttccaaatctctcctgctgaagagacattggagctagggcggctagtttcacctggtaattgtgacaccctgtctcctcgagctgcaggcttttatgcttgtcatgttcgaagtttgataccttgcagatcaacaaagggccggtggcctctcactgcctccgcggcagggttgtcaagtttttcaggttaagtactgcacgactactcgcttctgaaactgatagacactgcctcagctccgtgcagggcagacgcacaagagcagaatctccgtgggacatctctctggagcatcaatattactgcagtatttggaagaaacaaatttaaataagttctaaggtgaagaatggaacatttaagacaagtctggaaagtcatctgcctttaataactgtcgtttgtccttaacgtcagactttctccaagaccaaaactctaagaacttatttccattcttacaaatagtaaaaatgataaatcatatcaagtcaattgaaagtcctgcctgctgctttcctaaattgcaatatggccttggtatggttttatttgtacttttgtgggggattcgtggatctttagattaaaaaaaaaaaaataggtttttgaacaatttttgcaagtttgcagctgttagttattgatttatttttccaacccatctaattcttctgtctctctcctctcctcaggctcaataattccatgggtctctaaggctgtgtttattttctttaaattttgttgatttacttttatactccatttgattttttctatctctcaccttttctcagactcagtcatcccacaggtctgtaaggctctgttcattttctttaaacttcttttttttttcctctcctcagattggataaattatattgctatgtctctgtttctgaactatagaaaagctcaaaattattatttttatttctcattttttatatggctattttttctctgctgatgtttcacatctattcatttatgagaatattttcctttgccctcatgagcgtgtttataatagctgccttcaaattcttgtctgccgtttacatcttggacatcttggagatggctactgcctgctttttatcttgtgtatttattacattttcacgtgtcttcacgcatcccttgaattggaaattgtgccctggagactgtatacaagactggattaaaaagactggattctgttt

SEQ ID NO: 191776 - DNA, 1116 bp, Homo sapiens; identical to SEQ ID NO: 191769
  Payload ID: 17890
  Gene Name: TP53 target 3B
  Uniprot ID: Q9ULZ0
  ENST ID: ENST00000569741
  CDS Start-End: 31-339

SEQ ID NO: 191777 - DNA, 1884 bp, Homo sapiens
  Payload ID: 17890
  Gene Name: TP53 target 3B
  Uniprot ID: Q9ULZ0
  ENST ID: ENST00000567724
  CDS Start-End: 33-431
tggagagactacaactcccagtatgcaccgcgatgcgcgcctcaccctgcatctcccagcccgcagccagctggcatcctagaccctctgccctgcgaccaacagccgggagcggaccagacaccagaactcccggaacggttgaagacggttccgctccctgtcccgcctttcgcagcccagcagtttcgccctgcggagaggagccttgctgtttccaaatctctcctgctgaagagacattggagctagggcggctagtttcacctggtaattgtgacaccctgtctcctcgagctgcaggcttttatgcttgtcatgttcgaagtttgataccttgcagatcaacaaagggccggtggcctctcactgcctccgcggcagggttgtcaagacatgcgcagtgcggcccgtccctagggctgggttaagggccgcggatgtggcagttctcaggcctcttgggatcgcctcaagaagccccctcacgagtgtctcgatttcctgtcagccaacaaagggccgttcgcctttcatggcctccacagcagcgttgccgtggctgtcacaaatcctctgcaccccaggagcgccgcttggacccccgggctcgctgcgtggtccatatctaggtcgggcctctcacggagactttcccaccagtgtaataaagaggagaaaacgtcacagcggaagggcctgaccctgctgcatccactaaggaaacagctacggggatgggaccctgggagctgctgtggagcctcatccaccgcttctctgaccccacccaggctgcttcccaggcctcagggtcttagtgtggacctccgggccgtgattaatgcagtttttcaggttaagtactgcacgactactcgcttctgaaactgatagacactgcctcagctccgtgcagggcagacgcacaagagcagaatctccgtgggacatctctctggagcatcaatattactgcagtatttggaagaaacaaatttaaataagttctaaggtgaagaatggaacatttaagacaagtctggaaagtcatctgcctttaataactgtcgtttgtccttaacgtcagactttctccaagaccaaaactctaagaacttatttccattcttacaaatagtaaaaatgataaatcatatcaagtcaattgaaagtcctgcctgctgctttcctaaattgcaatatggccttggtatggttttatttgtacttttgtgggggattcgtggatctttagattaaaaaaaaaaaaataggtttttgaacaatttttgcaagtttgcagctgttagttattgatttatttttccaacccatctaattcttctgtctctctcctctcctcaggctcaataattccatgggtctctaaggctgtgtttattttctttaaattttgttgatttacttttatactccatttgattttttctatctctcaccttttctcagactcagtcatcccacaggtctgtaaggctctgttcattttctttaaacttcttttttttttcctctcctcagattggataaattatattgctatgtctctgtttctgaactatagaaaagctcaaaattattatttttatttctcattttttatatggctattttttctctgctgatgtttcacatctattcatttatgagaatattttcctttgccctcatgagcgtgtttataatagctgccttcaaattcttgtctgccgtttacatcttggacatcttggagatggctactgcctgctttttatcttgtgtatttattacattttcacgtgtcttcacgcatcccttgaattggaaattgtgccctggagactgtatacaagactggattaaaaagactggattctg

SEQ ID NO: 191778 - DNA, 901 bp, Homo sapiens
  Payload ID: 17890
  Gene Name: TP53 target 3B
  ENST ID: ENST00000563564
  CDS Start-End: 1-22
cccgtccctagggctgggttaagggccgcggatgtggcagttctcaggcctcttgggatcgcctcaagaagccccctcacgagtgtctcgatttcctgtcagccaacaaagggccgttcgcctttcatggcctccacagcagcgttgccgtgtttttcaggttaagtactgcacgactactcgcttctgaaactgatagacactgcctcagctccgtgcagggcagacgcacaagagcagaatctccgtgggacatctctctggagcatcaatattactgcagtatttggaagaaacaaatttaaataagttctaaggtgaagaatggaacatttaagacaagtctggaaagtcatctgcctttaataactgtcgtttgtccttaacgtcagactttctccaagaccaaaactctaagaacttatttccattcttacaaatagtaaaaatgataaatcatatcaagtcaattgaaagtcctgcctgctgctttcctaaattgcaatatggccttggtatggttttatttgtacttttgtgggggattcgtggatctttagattaaaaaaaaaaaaataggtttttgaacaatttttgcaagtttgcagctgttagttattgatttatttttccaacccatctaattcttctgtctctctcctctcctcaggctcaataattccatgggtctctaaggctgtgtttattttctttaaattttgttgatttacttttatactccatttgattttttctatctctcaccttttctcagactcagtcatcccacaggtctgtaaggctctgttcattttctttaaacttcttttttttttcctctcctcagattggataaattatattgctatgtctctgtttctgaactatagaaaagctcaaa

SEQ ID NO: 191779 - DNA, 1116 bp, Homo sapiens; identical to SEQ ID NO: 191769
  Payload ID: 17891
  Gene Name: TP53 target 3C
  Uniprot ID: Q9ULZ0
  ENST ID: ENST00000360260
  CDS Start-End: 31-339

SEQ ID NO: 191780 - DNA, 1806 bp, Homo sapiens; identical to SEQ ID NO: 103612
  Payload ID: 17891
  Gene Name: TP53 target 3C
  Uniprot ID: Q9ULZ0
  ENST ID: ENST00000398667
  CDS Start-End: 31-339

SEQ ID NO: 191781 - DNA, 582 bp, Homo sapiens
  Payload ID: 17891
  Gene Name: TP53 target 3C
  Uniprot ID: Q9ULZ0
  ENST ID: ENST00000567137
  CDS Start-End: 11-319
atgcaccgcgatgcgcgcctcaccctgcatctcccagcccgcagccagctggcatcctagaccctctgccctgcgaccaacagccgggagcggaccagacaccagaactcccggaacggttgaagacggttccgctccctgtcccgcctttcgcagcccagcagtttcgccctgcggagaggagccttgctgtttccaaatctctcctgctgaagagacattggagctagggcggctagtttcacctggctgtcacaaatcctctgcaccccaggagcgccgcttggacccccgggctcgctgcgtggtccatatctaggtcgggcctctcacggagactttcccaccagtgtaataaagaggagaaaacgtcacagcggaagggcctgaccctgctgcatccactaaggaaacagctacggggatgggaccctgggagctgctgtggagcctcatccaccgcttctctgaccccacccaggctgcttcccaggcctcagggtcttagtgtggacctccgggccgtgattaatgcagtttttcaggttaagtactgcacgactactcgcttctgaaactgat

SEQ ID NO: 191782 - DNA, 2029 bp, Homo sapiens
  Payload ID: 17891
  Gene Name: TP53 target 3C
  Uniprot ID: Q9ULZ0
  ENST ID: ENST00000561509
  CDS Start-End: 636-1010
ggctccacggccacatccgcaaaaagggtactggtgaacgtgacattttcacgaagccacagcccatggtcactccctgcaaagctctgaacttgcgcattcccaggccaggccgtggttgtctttccaaggcggctcagcttgtgctttgcttggagagagcggagggcagcagcacagtgacagcgtctgggacctcagaccagtttccacagccacttatgaaagcagacggctccatgggctggaggaggtgggacgctctggaaagaactcgggtgcgagtgggaaagaaaatcgagctgagcagctggaagtcgaagtcgcgtgagtgaggaccagacactctcgatttaggcaaaggcggggtgcacttcccaacaacacatcctcctcactggcgagaccaggcctgcccttcaagttcctctcctgatttaatccccttggcgagggtttggcatgaaatcaatggccagcaagcttggtaaacgaagccgcctacaccgccctccccctccctgcacggccgcgccccgcctccgctcctgtctcaatctgggattgtcctcctgtagccccaccatccaccgtggggaacggtggagagactacaactcccagtatgcaccgcgatgcgcgcctcaccctgcatctcccagcccgcagccagctggcatcctagaccctctgccctgcgaccaacagccgggagcggaccagacaccagaactcccggaacggttgaagacggttccgctccctgtcccgcctttcgcagcccagcagtttcgccctgcggagaggagccttgctgtttccaaatctctcctgctgaagagacattggagctagggcggctagtttcacctggtaattgtgacaccctgtctcctcgagctgcaggcttttatgcttgtcatgttcgaagtttgataccttgcagatcaacaaagggccggtggcctctcactgcctccgcggcagggttgtcaagtttttcaggttaagtactgcacgactactcgcttctgaaactgatagacactgcctcagctccgtgcagggcagacgcacaagagcagaatctccgtgggacatctctctggagcatcaatattactgcagtatttggaagaaacaaatttaaataagttctaaggtgaagaatggaacatttaagacaagtctggaaagtcatctgcctttaataactgtcgtttgtccttaacgtcagactttctccaagaccaaaactctaagaacttatttccattcttacaaatagtaaaaatgataaatcatatcaagtcaattgaaagtcctgcctgctgctttcctaaattgcaatatggccttggtatggttttatttgtacttttgtgggggattcgtggatctttagattaaaaaaaaaaaaataggtttttgaacaatttttgcaagtttgcagctgttagttattgatttatttttccaacccatctaattcttctgtctctctcctcaggctcaataattccatgggtctctaaggctgtgtttattttctttaaattttgttgatttacttttatactccatttgattttttctatctctcaccttttctcagactcagtcatcccacaggtctgtaaggctctgttcattttctttaaacttcttttttttttcctctcctcagattggataaattatattgctatgtctctgtttctgaactatagaaaagctcaaaattattatttttatttctcattttttatatggctattttttctctgctgatgtttcacatctattcatttatgagaatattttcctttgccctcatgagcgtgtttataatagctgccttcaaattcttgtctgccgtttacatcttggacatcttggagatggctactgcctgctttttatcttgtgtatttattacattttcacgtgtcttcacgcatcccttgaattggaaattgtgccctggagactgtatacaagactggattaaaaagactggattctgttt

SEQ ID NO: 191783 - DNA, 1879 bp, Homo sapiens
  Payload ID: 17891
  Gene Name: TP53 target 3C
  Uniprot ID: Q9ULZ0
  ENST ID: ENST00000569719
  CDS Start-End: 33-431
tggagagactacaactcccagtatgcaccgcgatgcgcgcctcaccctgcatctcccagcccgcagccagctggcatcctagaccctctgccctgcgaccaacagccgggagcggaccagacaccagaactcccggaacggttgaagacggttccgctccctgtcccgcctttcgcagcccagcagtttcgccctgcggagaggagccttgctgtttccaaatctctcctgctgaagagacattggagctagggcggctagtttcacctggtaattgtgacaccctgtctcctcgagctgcaggcttttatgcttgtcatgttcgaagtttgataccttgcagatcaacaaagggccggtggcctctcactgcctccgcggcagggttgtcaagacatgcgcagtgcggcccgtccctagggctgggttaagggccgcggatgtggcagttctcaggcctcttgggatcgcctcaagaagccccctcacgagtgtctcgatttcctgtcagccaacaaagggccgttcgcctttcatggcctccacagcagcgttgccgtggctgtcacaaatcctctgcaccccaggagcgccgcttggacccccgggctcgctgcgtggtccatatctaggtcgggcctctcacggagactttcccaccagtgtaataaagaggagaaaacgtcacagcggaagggcctgaccctgctgcatccactaaggaaacagctacggggatgggaccctgggagctgctgtggagcctcatccaccgcttctctgaccccacccaggctgcttcccaggcctcagggtcttagtgtggacctccgggccgtgattaatgcagtttttcaggttaagtactgcacgactactcgcttctgaaactgatagacactgcctcagctccgtgcagggcagacgcacaagagcagaatctccgtgggacatctctctggagcatcaatattactgcagtatttggaagaaacaaatttaaataagttctaaggtgaagaatggaacatttaagacaagtctggaaagtcatctgcctttaataactgtcgtttgtccttaacgtcagactttctccaagaccaaaactctaagaacttatttccattcttacaaatagtaaaaatgataaatcatatcaagtcaattgaaagtcctgcctgctgctttcctaaattgcaatatggccttggtatggttttatttgtacttttgtgggggattcgtggatctttagattaaaaaaaaaaaaataggtttttgaacaatttttgcaagtttgcagctgttagttattgatttatttttccaacccatctaattcttctgtctctctcctcaggctcaataattccatgggtctctaaggctgtgtttattttctttaaattttgttgatttacttttatactccatttgattttttctatctctcaccttttctcagactcagtcatcccacaggtctgtaaggctctgttcattttctttaaacttcttttttttttcctctcctcagattggataaattatattgctatgtctctgtttctgaactatagaaaagctcaaaattattatttttatttctcattttttatatggctattttttctctgctgatgtttcacatctattcatttatgagaatattttcctttgccctcatgagcgtgtttataatagctgccttcaaattcttgtctgccgtttacatcttggacatcttggagatggctactgcctgctttttatcttgtgtatttattacattttcacgtgtcttcacgcatcccttgaattggaaattgtgccctggagactgtatacaagactggattaaaaagactggattctg

SEQ ID NO: 191784 - DNA, 1880 bp, Homo sapiens
  Payload ID: 17892
  Gene Name: TP53 target 3D
  Uniprot ID: Q9ULZ0
  ENST ID: ENST00000380148
  CDS Start-End: 33-431
tggagagactacaactcccagtatgcaccgcgatgcgcgcctcaccctgcatctcccagcccgcagccagctggcatcctagaccctctgccctgcgaccaacagccgggagcggaccagacaccagaactcccggaacggttgaagacggttccgctccctgtcccgcctttcgcagcccagcagtttcgccctgcggagaggagccttgctgtttccaaatctctcctgctgaagagacattggagctagggcggctagtttcacctggtaattgtgacaccctgtctcctcgagctgcaggcttttatgcttgtcatgttcgaagtttgataccttgcagatcaacaaagggtcggtggcctctcactgcctccgcggcagggttgtcaagacatgcgcagtgcggcccgtccctagggctgggttaagggccgcggatgtggcagttctcaggcctcttgggatcgcctcaagaagccccctcacgagtgtctcgatttcctgtcagccaacaaagggccgttcgcctttcatggcctccacagcagcgttgccgtggctgtcacaaattctctgcaccccaggagtgccgcttggacccccgggctcgctgcgtggtccatatctaggtcgggcctctcacggagactttcccaccagtgtaataaagaggagaaaacgtcacagcggaagggcctgaccctgctgcatccactaaggaaacagctacggggatgggaccctggaagctgctgtgggagcctcatccaccgcttctctgaccccacccaggctgcttcccaggcctcagggtcttagtgtggacctccgggccgtgattaatgcagtttttcaggttaagtactgcacgactactcgcttctgaaactgatagacactgcctcagctccgtgcagggcagacgcacaagagcagaatctccgtgggacatctctctggagcatcaatattactgcagtatttggaagaaacaaatttaaataagttctaaggtaaagaatggaacatttaagacaagtctggaaagtcatctgcctttaataactgtcgtttgtccttaacgtcagactttctccaagacaaaaactctaagaacttatttccattcttacaaatagtaaaaatgataaatcatatcaagtcaattgaaagtcctgcctgctgctttcctaaatcacaatatggccttggtatggttttatttgtacttttgtgggggattcgtggatctttagattaaaaaaaaaaataggtttttgaacaatttttgcaagtttgcagctgttagttattgatttatttttgcaacccatctaattcttctgtctctctcctctcctcaggctcaataattccatgggtctctaaggctgtgtttattttctttaaattttgttgatttacttttatactccatttgattttttctatctctcaccttttctcagactcagtcatcccacaggtctgtaaggctctgttcattttctttaaacttttttttttcctctcctcagattggataaattatattgctatgtctctgtttctgaactatagaaaagctcaaaattactatttttatttctcattttttatatggctattttttctctgctgatgtttcacatctattcatttatgagaatattttcctttgccctcatgagcgtgtttataatagctgccttcaaattcttgtctgccgtttacatcttggacatcttggagatggctactgcctgctttttatcttgtgtatttattacattttcacgtgtcttcacgcatctcttgaattggaaattgtgccctggagactgtatacaagactggattaaaaagactggattctg

SEQ ID NO: 191785 - DNA, 2029 bp, Homo sapiens
  Payload ID: 17892
  Gene Name: TP53 target 3D
  Uniprot ID: Q9ULZ0
  ENST ID: ENST00000398664
  CDS Start-End: 636-1010
ggctccacggccacatccgcaaaaagggtactggtgaacgtgacattttcacgaagccacagcccatggtcactccctgcaaagctctgaacttgcgcattcccaggccaggccgtggttgtctttccaaggcggctcagcttgtgctttgcttggagagagcggagggcagcagcacagtgacagcgtctgggacctcagaccagtttccacagccacttatgaaagcagacggctccatgggctggaggaggtgggacgctctggaaagaactcgggtgcgagtgggaaagaaaatcgagctgagcagcgggaagtcgaagtcgcgtgagtgaggaccagacactctcgatttaggcaaaggcggggtgcacttcccaacaacacatcctcctcactggcgagaccaggcctgcccttcaagttcctctcctgatttaatccccttggcgagggtttggcatgaaatcaatggccagcaagcttggtaaacgaagccgcctacaccgccctccccctccctgcacggccgcgccccgcctccgctcctgtctcaatctgggattgtcctcctgtagccccaccatccaccgtggggaacggtggagagactacaactcccagtatgcaccgcgatgcgcgcctcaccctgcatctcccagcccgcagccagctggcatcctagaccctctgccctgcgaccaacagccgggagcggaccagacaccagaactcccggaacggttgaagacggttccgctccctgtcccgcctttcgcagcccagcagtttcgccctgcggagaggagccttgctgtttccaaatctctcctgctgaagagacattggagctagggcggctagtttcacctggtaattgtgacaccctgtctcctcgagctgcaggcttttatgcttgtcatgttcgaagtttgataccttgcagatcaacaaagggtcggtggcctctcactgcctccgcggcagggttgtcaagtttttcaggttaagtactgcacgactactcgcttctgaaactgatagacactgcctcagctccgtgcagggcagacgcacaagagcagaatctccgtgggacatctctctggagcatcaatattactgcagtatttggaagaaacaaatttaaataagttctaaggtaaagaatggaacatttaagacaagtctggaaagtcatctgcctttaataactgtcgtttgtccttaacgtcagactttctccaagacaaaaactctaagaacttatttccattcttacaaatagtaaaaatgataaatcatatcaagtcaattgaaagtcctgcctgctgctttcctaaatcacaatatggccttggtatggttttatttgtacttttgtgggggattcgtggatctttagattaaaaaaaaaaataggtttttgaacaatttttgcaagtttgcagctgttagttattgatttatttttgcaacccatctaattcttctgtctctctcctctcctcaggctcaataattccatgggtctctaaggctgtgtttattttctttaaattttgttgatttacttttatactccatttgattttttctatctctcaccttttctcagactcagtcatcccacaggtctgtaaggctctgttcattttctttaaacttttttttttcctctcctcagattggataaattatattgctatgtctctgtttctgaactatagaaaagctcaaaattactatttttatttctcattttttatatggctattttttctctgctgatgtttcacatctattcatttatgagaatattttcctttgccctcatgagcgtgtttataatagctgccttcaaattcttgtctgccgtttacatcttggacatcttggagatggctactgcctgctttttatcttgtgtatttattacattttcacgtgtcttcacgcatctcttgaattggaaattgtgccctggagactgtatacaagactggattaaaaagactggattctgttt

SEQ ID NO: 191786 - DNA, 1112 bp, Homo sapiens
  Payload ID: 17892
  Gene Name: TP53 target 3D
  ENST ID: ENST00000569631
  CDS Start-End: 31-339
gagagactacaactcccagtatgcaccgcgatgcgcgcctcaccctgcatctcccagcccgcagccagctggcatcctagaccctctgccctgcgaccaacagccgggagcggaccagacaccagaactcccggaacggttgaagacggttccgctccctgtcccgcctttcgcagcccagcagtttcgccctgcggagaggagccttgctgtttccaaatctctcctgctgaagagacattggagctagggcggctagtttcacctggctgtcacaaattctctgcaccccaggagtgccgcttggacccccgggctcgctgcgtggtccatatctaggtcgggcctctcacggagactttcccaccagtgtaataaagaggagaaaacgtcacagcggaagggcctgaccctgctgcatccactaaggaaacagctacggggatgggaccctggaagctgctgtgggagcctcatccaccgcttctctgaccccacccaggctgcttcccaggcctcagggtcttagtgtggacctccgggccgtgattaatgcaggtcagcaggaccagagcgccccttggtccctcccaacacatgagggtagtttgtgtggtgaggtcagggatagtgtctgcgcttctaccctgaatagggctcccttggaaaataatatctctttttaaatacccccttggaccacttttaatagttttctgatagaactaaacagtgatcattctcttaattcatgtttccattaagtttttcaggttaagtactgcacgactactcgcttctgaaactgatagacactgcctcagctccgtgcagggcagacgcacaagagcagaatctccgtgggacatctctctggagcatcaatattactgcagtatttggaagaaacaaatttaaataagttctaaggtaaagaatggaacatttaagacaagtctggaaagtcatctgcctttaataactgtcgtttgtccttaacgtcagactttctccaagacaaaaactctaagaacttatttccattcttacaaatagtaaaaatgataaatcatatcaagtcaattgaaagtcctgcctgctgctttcctaaa

SEQ ID NO: 191787 - DNA, 583 bp, Homo sapiens
  Payload ID: 17892
  Gene Name: TP53 target 3D
  ENST ID: ENST00000563025
  CDS Start-End: 11-319
atgcaccgcgatgcgcgcctcaccctgcatctcccagcccgcagccagctggcatcctagaccctctgccctgcgaccaacagccgggagcggaccagacaccagaactcccggaacggttgaagacggttccgctccctgtcccgcctttcgcagcccagcagtttcgccctgcggagaggagccttgctgtttccaaatctctcctgctgaagagacattggagctagggcggctagtttcacctggctgtcacaaattctctgcaccccaggagtgccgcttggacccccgggctcgctgcgtggtccatatctaggtcgggcctctcacggagactttcccaccagtgtaataaagaggagaaaacgtcacagcggaagggcctgaccctgctgcatccactaaggaaacagctacggggatgggaccctggaagctgctgtgggagcctcatccaccgcttctctgaccccacccaggctgcttcccaggcctcagggtcttagtgtggacctccgggccgtgattaatgcagtttttcaggttaagtactgcacgactactcgcttctgaaactgat

SEQ ID NO: 191788 - DNA, 896 bp, Homo sapiens
  Payload ID: 17892
  Gene Name: TP53 target 3D
  ENST ID: ENST00000568044
  CDS Start-End: 1-22
cccgtccctagggctgggttaagggccgcggatgtggcagttctcaggcctcttgggatcgcctcaagaagccccctcacgagtgtctcgatttcctgtcagccaacaaagggccgttcgcctttcatggcctccacagcagcgttgccgtgtttttcaggttaagtactgcacgactactcgcttctgaaactgatagacactgcctcagctccgtgcagggcagacgcacaagagcagaatctccgtgggacatctctctggagcatcaatattactgcagtatttggaagaaacaaatttaaataagttctaaggtaaagaatggaacatttaagacaagtctggaaagtcatctgcctttaataactgtcgtttgtccttaacgtcagactttctccaagacaaaaactctaagaacttatttccattcttacaaatagtaaaaatgataaatcatatcaagtcaattgaaagtcctgcctgctgctttcctaaatcacaatatggccttggtatggttttatttgtacttttgtgggggattcgtggatctttagattaaaaaaaaaaataggtttttgaacaatttttgcaagtttgcagctgttagttattgatttatttttgcaacccatctaattcttctgtctctctcctctcctcaggctcaataattccatgggtctctaaggctgtgtttattttctttaaattttgttgatttacttttatactccatttgattttttctatctctcaccttttctcagactcagtcatcccacaggtctgtaaggctctgttcattttctttaaacttttttttttcctctcctcagattggataaattatattgctatgtctctgtttctgaactatagaaaagctcaaa

SEQ ID NO: 191789 - DNA, 2374 bp, Homo sapiens
  Payload ID: 17893
  Gene Name: TP53 target 5
  Uniprot ID: Q9Y2B4
  ENST ID: ENST00000372726
  CDS Start-End: 158-1030
gctactgtcacatttcagtgatgtcacagctgcaggtggtacagagccagcaccaccatctgatgcccagcctgagtgctggctgaactgagaggaacagggttggtgcctggcactggtgttgctccattcatctctgaggtctcacagccccagcatgagtccatcagcaaagaagaggcccaagaacagcagggtttccaagatgcaagatgagaaactgcgggacgagacagagcagcctgtgagcaaagtaattgagcggaaccgtctgagaacggtgttaaaaaacttgtcgctcttgaagctactcaagagctcaaaccgccggatccaagaactgcataagctggccaaaaggtgttggcattcactgctcagtgttccaaagattctccgcatctcctctggggaaaacagtgcctgcaataaaacaaaacaaaataatgaagagttccaggagatcgggtgctccgagaaggaactcaagtccaagaaattagagtccacaggggaccctaagaaaaaagagtacaaggagtggaagtcccaggtgcagtcagggatgaggaacaaggagaaaacgtcattggcggcaatgccacggaaagaaaagcatatagagcctgaggttccaaggacatcgagggatgatagcttgaaccctggagtccaggggaggcaaccactcaccgagggcccccgagtcatcttcattaagccctaccgcaatagaactcccatggggcacatgaagcagctggatgtagccgaccagtggatctggtttgaggggctgcccacacgaatccacctcccggcgcccagggtgatgtgcagatcctccaccctgcgttgggtcaagcgccgctgcacccgcttctgctccgcatcacttgaaatgcctatgtggcatccatacaaggttgatgtgacctggacgagagccagaggtgcgagcagagggtggagatcgcgccatcagctgaaggggaggaatgggtggcgaaattcacgagtctacaaataagatcttccatatggcacctaagacgaatactgcttactctgcctgtttgtctggggctgggaaggatgaaggaaagaggccttcggtagagggagcctgtgtcgcgacttcaggcttcccccacccccaccccgaggcccctaaggtcagtctagaaccaaagaagccagcgagcagcacccctcccccacctccgcgagctagtctcctgagtggcgcgctctgtgaagtcagggcgctcgtgtgcttcctgggtgcaaagtgcctcacaatcgccccgcgagctcgcaagaggaaaccgcggcgcggaggcagcaagtaacttgcccaggctcactcagctagaaagtggcaggagcaagggctcctggttgctccccattccattttcccaagaaagggaaaaggcgaaatgagagcctgctcagaagtcacgaggcaggcggaatagccccagcaccctgtaggtcatgcgcgtgcattgcgacctgattgtcaaaaattgattgtcaaaaactgattgcactgtggctggtgtcaaaaagtggatgtcagctgggcctccaaatgtgtcctgccttggtcacagatcacagaaggcaccggatcaggagggggagctggtactgcatctctactgctccagggtgacatggcaggtccaccctcaatctgaagacctcaaccccaagccctggtcgaccccatctggccggggtcaccctctgtcggtaggagtcacagggtcctaaccatgccgttggggagaggaaagccaagggagcccgagttttctccggacgaagacctccatattccccagaggcaggctgcatggagtgggcgccctcgggagagcagtggagccatcgaggggcacagagctctccgggattgggggtcagggcagcgatgcagatagatctccagtttgggacagagggagaacgattggatggactctccccccctcccaccccgcccactcacacactcctccccaccattactgggcaccaagactgggcatcagctgccgcgcggaccagcctgggcggagccacagcgcggggactgcttagcacctcatagtggctgctgcgtgctcccgagctcctgctcccagcgcaatcttcctggagctcccctacggtcggtgcctacctccgcccccaccaccccgctaattcccgtgcaaattccaccccagtaaccactttcagcggtcttcccacccagcttgcactccagcccatttcctgaacagtctcccttgcagttcccttgctgggtattttcaatcccatcaactttcgaaaataatctctactcactcttccattc

SEQ ID NO: 191790 - DNA, 748 bp, Homo sapiens
  Payload ID: 17894
  Gene Name: TP53RK binding protein
  Uniprot ID: Q9Y3C4
  ENST ID: ENST00000272424
  CDS Start-End: 108-635
aagacggggattggccatcgcttccggaagttgtgagctttgtttcggagcgggagctcttccgagacgcactgggggccggatgtagaatcctgcttatctgtgaaatgcagttaacacatcagctggacctatttcccgaatgcagggtaacccttctgttatttaaagatgtaaaaaatgcgggagacttgagaagaaaggccatggaaggcaccatcgatggatcactgataaatcctacagtgattgttgatccatttcagatacttgtggcagcaaacaaagcagttcacctctacaaactgggaaaaatgaagacaagaactctatctactgaaattattttcaacctttccccaaataacaatatttcagaggctttgaaaaaatttggtatctcagcaaatgacacttcaattctaattgtttacattgaagagggagaaaaacaaataaatcaagaatacctaatatctcaagtagaaggtcatcaggtttctctgaaaaatcttcctgaaataatgaatattacagaagtcaaaaagatatataaactctcttcacaagaagaaagtattgggacattattggatgctatcatttgtagaatgtcaacaaaagatgttttatgaaatgtcagaaatattaacaaaaattctcagcattaaagaaaacattgattttcctttcctgactataaaactaattgtgcattatagaaaagtttaaatcacagaatggtatt

SEQ ID NO: 191791 - DNA, 819 bp, Homo sapiens
  Payload ID: 17894
  Gene Name: TP53RK binding protein
  Uniprot ID: Q9Y3C4
  ENST ID: ENST00000318190
  CDS Start-End: 122-766
aaactggctcgaagaagacggggattggccatcgcttccggaagttgtgagctttgtttcggagcgggagctcttccgagacgcactgggggccggatgtagaatcctgcttatctgtgaaatgcagttaacacatcagctggacctatttcccgaatgcagggtaacccttctgttatttaaagatgtaaaaaatgcgggagacttgagaagaaaggccatggaaggcaccatcgatggatcactgataaatcctacagtgtttcactcttgttgcccaggctggagtgcaatggcgcgatcttggctcacggcaacctctgcctcccgggttcaagcaattgtcctgcctcagcctcctgagttgctgggattacagattgttgatccatttcagatacttgtggcagcaaacaaagcagttcacctctacaaactgggaaaaatgaagacaagaactctatctactgaaattattttcaacctttccccaaataacaatatttcagaggctttgaaaaaatttggtatctcagcaaatgacacttcaattctaattgtttacattgaagagggagaaaaacaaataaatcaagaatacctaatatctcaagtagaaggtcatcaggtttctctgaaaaatcttcctgaaataatgaatattacagaagtcaaaaagatatataaactctcttcacaagaagaaagtattgggacattattggatgctatcatttgtagaatgtcaacaaaagatgttttatgaaatgtcagaaatattaacaaaaattctcagcattaaagaaaacattgattttc

SEQ ID NO: 191792 - DNA, 816 bp, Homo sapiens
  Payload ID: 17894
  Gene Name: TP53RK binding protein
  Uniprot ID: Q9Y3C4
  ENST ID: ENST00000409716
  CDS Start-End: 119-763
aaactggctcgaagaagacggggattggccatcgcttccggaagttgtgagctttgtttcggagcgggagctcttccgagacgcactgggggccggatgaatcctgcttatctgtgaaatgcagttaacacatcagctggacctatttcccgaatgcagggtaacccttctgttatttaaagatgtaaaaaatgcgggagacttgagaagaaaggccatggaaggcaccatcgatggatcactgataaatcctacagtgtttcactcttgttgcccaggctggagtgcaatggcgcgatcttggctcacggcaacctctgcctcccgggttcaagcaattgtcctgcctcagcctcctgagttgctgggattacagattgttgatccatttcagatacttgtggcagcaaacaaagcagttcacctctacaaactgggaaaaatgaagacaagaactctatctactgaaattattttcaacctttccccaaataacaatatttcagaggctttgaaaaaatttggtatctcagcaaatgacacttcaattctaattgtttacattgaagagggagaaaaacaaataaatcaagaatacctaatatctcaagtagaaggtcatcaggtttctctgaaaaatcttcctgaaataatgaatattacagaagtcaaaaagatatataaactctcttcacaagaagaaagtattgggacattattggatgctatcatttgtagaatgtcaacaaaagatgttttatgaaatgtcagaaatattaacaaaaattctcagcattaaagaaaacattgattttc

SEQ ID NO: 191793 - DNA, 3497 bp, Homo sapiens
  Payload ID: 17895
  Gene Name: TPX2, microtubule-associated
  Uniprot ID: Q9ULW0
  ENST ID: ENST00000300403
  CDS Start-End: 529-2772
tcaaaatttcaacgatactgaatgagtcccgcggcgggttggctcgcgcttcgttgtcagatctgaggcgaggctaggtgagccgtgggaagaaaagagggagcagctagggcgcgggtctccctcctcccggagtttggaacggctgaagttcaccttccagcccctagcgccgttcgcgccgctaggcctggcttctgaggcggttgcggtgctcggtcgccgcctaggcggggcagggtgcgagcaggggcttcgggccacgcttctcttggcgacaggattttgctgtgaagtccgtccgggaaacggaggaaaaaaagagttgcgggaggctgtcggctaataacggttcttgatacatatttgccagacttcaagatttcagaaaaggggtgaaagagaagattgcaactttgagtcagacctgtaggcctgatagactgattaaaccacagaaggtgacctgctgagaaaagtggtacaaatactgggaaaaacctgctcttctgcgttaagtgggagacaatgtcacaagttaaaagctcttattcctatgatgccccctcggatttcatcaatttttcatccttggatgatgaaggagatactcaaaacatagattcatggtttgaggagaaggccaatttggagaataagttactggggaagaatggaactggagggctttttcagggcaaaactcctttgagaaaggctaatcttcagcaagctattgtcacacctttgaaaccagttgacaacacttactacaaagaggcagaaaaagaaaatcttgtggaacaatccattccgtcaaatgcttgttcttccctggaagttgaggcagccatatcaagaaaaactccagcccagcctcagagaagatctcttaggctttctgctcagaaggatttggaacagaaagaaaagcatcatgtaaaaatgaaagccaagagatgtgccactcctgtaatcatcgatgaaattctaccctctaagaaaatgaaagtttctaacaacaaaaagaagccagaggaagaaggcagtgctcatcaagatactgctgaaaagaatgcatcttccccagagaaagccaagggtagacatactgtgccttgtatgccacctgcaaagcagaagtttctaaaaagtactgaggagcaagagctggagaagagtatgaaaatgcagcaagaggtggtggagatgcggaaaaagaatgaagaattcaagaaacttgctctggctggaatagggcaacctgtgaagaaatcagtgagccaggtcaccaaatcagttgacttccacttccgcacagatgagcgaatcaaacaacatcctaagaaccaggaggaatataaggaagtgaactttacatctgaactacgaaagcatccttcatctcctgcccgagtgactaagggatgtaccattgttaagcctttcaacctgtcccaaggaaagaaaagaacatttgatgaaacagtttctacatatgtgccccttgcacagcaagttgaagacttccataaacgaacccctaacagatatcatttgaggagcaagaaggatgatattaacctgttaccctccaaatcttctgtgaccaagatttgcagagacccacagactcctgtactgcaaaccaaacaccgtgcacgggctgtgacctgcaaaagtacagcagagctggaggctgaggagctcgagaaattgcaacaatacaaattcaaagcacgtgaacttgatcccagaatacttgaaggtgggcccatcttgcccaagaaaccacctgtgaaaccacccaccgagcctattggctttgatttggaaattgagaaaagaatccaggagcgagaatcaaagaagaaaacagaggatgaacactttgaatttcattccagaccttgccctactaagattttggaagatgttgtgggtgttcctgaaaagaaggtacttccaatcaccgtccccaagtcaccagcctttgcattgaagaacagaattcgaatgcccaccaaagaagatgaggaagaggacgaaccggtagtgataaaagctcaacctgtgccacattatggggtgccttttaagccccaaatcccagaggcaagaactgtggaaatatgccctttctcgtttgattctcgagacaaagaacgtcagttacagaaggagaagaaaataaaagaactgcagaaaggggaggtgcccaagttcaaggcacttcccttgcctcattttgacaccattaacctgccagagaagaaggtaaagaatgtgacccagattgaacctttctgcttggagactgacagaagaggtgctctgaaggcacagacttggaagcaccagctggaagaagaactgagacagcagaaagaagcagcttgtttcaaggctcgtccaaacaccgtcatctctcaggagccctttgttcccaagaaagagaagaaatcagttgctgagggcctttctggttctctagttcaggaaccttttcagctggctactgagaagagagccaaagagcggcaggagctggagaagagaatggctgaggtagaagcccagaaagcccagcagttggaggaggccagactacaggaggaagagcagaaaaaagaggagctggccaggctacggagagaactggtgcataaggcaaatccaatacgcaagtaccagggtctggagataaagtcaagtgaccagcctctgactgtgcctgtatctcccaaattctccactcgattccactgctaaactcagctgtgagctgcggataccgcccggcaatgggacctgctcttaacctcaaacctaggaccgtcttgctttgtcattgggcatggagagaacccatttctccagacttttacctacccgtgcctgagaaagcatacttgacaactgtggactccagttttgttgagaattgttttcttacattactaaggctaataatgagatgtaactcatgaatgtctcgattagactccatgtagttacttcctttaaaccatcagccggccttttatatgggtcttcactctgactagaatttagtctctgtgtcagcacagtgtaatctctattgctattgccccttacgactctcaccctctccccactttttttaaaaattttaaccagaaaataaagatagttaaatcctaagatagagattaagtcatggtttaaatgaggaacaatcagtaaatcagattctgtcctcttctctgcataccgtgaatttatagttaaggatccctttgctgtgagggtagaaaacctcaccaactgcaccagtgaggaagaagactgcgtggattcatggggagcctcacagcagccacgcagcaggctctgggtggggctgccgttaaggcacgttctttccttactggtgctgataacaacagggaaccgtgcagtgtgcattttaagacctggcctggaataaatacgttttgtctttccctccctga

SEQ ID NO: 191794 - DNA, 3605 bp, Homo sapiens
  Payload ID: 17895
  Gene Name: TPX2, microtubule-associated
  Uniprot ID: Q9ULW0
  ENST ID: ENST00000340513
  CDS Start-End: 529-2880
tcaaaatttcaacgatactgaatgagtcccgcggcgggttggctcgcgcttcgttgtcagatctgaggcgaggctaggtgagccgtgggaagaaaagagggagcagctagggcgcgggtctccctcctcccggagtttggaacggctgaagttcaccttccagcccctagcgccgttcgcgccgctaggcctggcttctgaggcggttgcggtgctcggtcgccgcctaggcggggcagggtgcgagcaggggcttcgggccacgcttctcttggcgacaggattttgctgtgaagtccgtccgggaaacggaggaaaaaaagagttgcgggaggctgtcggctaataacggttcttgatacatatttgccagacttcaagatttcagaaaaggggtgaaagagaagattgcaactttgagtcagacctgtaggcctgatagactgattaaaccacagaaggtgacctgctgagaaaagtggtacaaatactgggaaaaacctgctcttctgcgttaagtgggagacaatgtcacaagttaaaagctcttattcctatgatgccccctcggatttcatcaatttttcatccttggatgatgaaggagatactcaaaacatagattcatggtttgaggagaaggccaatttggagaataagttactggggaagaatggaactggagggctttttcagggcaaaactcctttgagaaaggctaatcttcagcaagctattgtcacacctttgaaaccagttgacaacacttactacaaagaggcagaaaaagaaaatcttgtggaacaatccattccgtcaaatgcttgttcttccctggaagttgaggcagccatatcaagaaaaactccagcccagcctcagagaagatctcttaggctttctgctcagaaggatttggaacagaaagaaaagcatcatgtaaaaatgaaagccaagagatgtgccactcctgtaatcatcgatgaaattctaccctctaagaaaatgaaagtttctaacaacaaaaagaagccagaggaagaaggcagtgctcatcaagatactgctgaaaagaatgcatcttccccagagaaagccaagggtagacatactgtgccttgtatgccacctgcaaagcagaagtttctaaaaagtactgaggagcaagagctggagaagagtatgaaaatgcagcaagaggtggtggagatgcggaaaaagaatgaagaattcaagaaacttgctctggctggaatagggcaacctgtgaagaaatcagtgagccaggtcaccaaatcagttgacttccacttccgcacagatgagcgaatcaaacaacatcctaagaaccaggaggaatataaggaagtgaactttacatctgaactacgaaagcatccttcatctcctgcccgagtgactaagggatgtaccattgttaagcctttcaacctgtcccaaggaaagaaaagaacatttgatgaaacagtttctacatatgtgccccttgcacagcaagttgaagacttccataaacgaacccctaacagatatcatttgaggagcaagaaggatgatattaagacagggtcttgctccgtcacccaggctggagtgcagtggcgtgatcatggctcacttcagtgtccaactcctgggctcaagcaatcctcctgccttagccttccaaacctgttaccctccaaatcttctgtgaccaagatttgcagagacccacagactcctgtactgcaaaccaaacaccgtgcacgggctgtgacctgcaaaagtacagcagagctggaggctgaggagctcgagaaattgcaacaatacaaattcaaagcacgtgaacttgatcccagaatacttgaaggtgggcccatcttgcccaagaaaccacctgtgaaaccacccaccgagcctattggctttgatttggaaattgagaaaagaatccaggagcgagaatcaaagaagaaaacagaggatgaacactttgaatttcattccagaccttgccctactaagattttggaagatgttgtgggtgttcctgaaaagaaggtacttccaatcaccgtccccaagtcaccagcctttgcattgaagaacagaattcgaatgcccaccaaagaagatgaggaagaggacgaaccggtagtgataaaagctcaacctgtgccacattatggggtgccttttaagccccaaatcccagaggcaagaactgtggaaatatgccctttctcgtttgattctcgagacaaagaacgtcagttacagaaggagaagaaaataaaagaactgcagaaaggggaggtgcccaagttcaaggcacttcccttgcctcattttgacaccattaacctgccagagaagaaggtaaagaatgtgacccagattgaacctttctgcttggagactgacagaagaggtgctctgaaggcacagacttggaagcaccagctggaagaagaactgagacagcagaaagaagcagcttgtttcaaggctcgtccaaacaccgtcatctctcaggagccctttgttcccaagaaagagaagaaatcagttgctgagggcctttctggttctctagttcaggaaccttttcagctggctactgagaagagagccaaagagcggcaggagctggagaagagaatggctgaggtagaagcccagaaagcccagcagttggaggaggccagactacaggaggaagagcagaaaaaagaggagctggccaggctacggagagaactggtgcataaggcaaatccaatacgcaagtaccagggtctggagataaagtcaagtgaccagcctctgactgtgcctgtatctcccaaattctccactcgattccactgctaaactcagctgtgagctgcggataccgcccggcaatgggacctgctcttaacctcaaacctaggaccgtcttgctttgtcattgggcatggagagaacccatttctccagacttttacctacccgtgcctgagaaagcatacttgacaactgtggactccagttttgttgagaattgttttcttacattactaaggctaataatgagatgtaactcatgaatgtctcgattagactccatgtagttacttcctttaaaccatcagccggccttttatatgggtcttcactctgactagaatttagtctctgtgtcagcacagtgtaatctctattgctattgccccttacgactctcaccctctccccactttttttaaaaattttaaccagaaaataaagatagttaaatcctaagatagagattaagtcatggtttaaatgaggaacaatcagtaaatcagattctgtcctcttctctgcataccgtgaatttatagttaaggatccctttgctgtgagggtagaaaacctcaccaactgcaccagtgaggaagaagactgcgtggattcatggggagcctcacagcagccacgcagcaggctctgggtggggctgccgttaaggcacgttctttccttactggtgctgataacaacagggaaccgtgcagtgtgcattttaagacctggcctggaataaatacgttttgtctttccctccctga

SEQ ID NO: 191795 - DNA, 2329 bp, Homo sapiens
  Payload ID: 17896
  Gene Name: TraB domain containing
  Uniprot ID: Q9H4I3
  ENST ID: ENST00000303434
  CDS Start-End: 120-1250
cgtccgttgagggcccgcgccgcatggaggccggctgaggagcgccgctgcctcgcctcggtacgccgcgcggcgcggacggcgcgctccccacaggtgcaggaagccgccgcccagccatggacggggaggagcagcagccaccgcacgaggccaacgtggaacctgttgtgccgtcagaggcttcagagccggtgcccagggtgctttctggagacccccagaacctgtccgacgtggacgccttcaacctgctcctggagatgaagctgaagcggcggcgtcagcggcccaacctgccgcgcactgtgacccagttggtggctgaggacgggagcagggtgtacgtggtggggacagcccacttcagcgacgacagcaagagggacgttgtgaagaccatccgggaggtgcagcctgacgtggtggtcgtggagctctgccaatatcgtgtgtccatgctgaagatggacgagagcacgctgctgcgggaggcccaggagctcagcctggagaagctgcagcaggccgtgaggcagaacgggctcatgtcggggctgatgcagatgctgctgctgaaggtgtctgcacacatcaccgagcagctgggcatggccccaggtggcgagttcagggaggccttcaaggaggccagcaaggtgcctttctgcaagttccacctgggtgaccgacccatccccgtcaccttcaagagggccatcgcagcgctctccttctggcagaaggtcaggctggcttggggcctgtgcttcctgtcagaccccatcagcaaggatgacgtggaacgctgcaagcagaaggacctactggagcagatgatggccgagatgattggcgagttcccagacctgcaccgcaccatcgtctcggagcgcgacgtctacctaacctacatgctgcgccaggccgcgcggcgcctcgagctgcctcgggcctctgacgccgagcccaggaagtgcgtcccctccgtggtcgtgggcgtcgtgggcatgggccacgtgcctggcatcgagaagaactggagcaccgacctcaacatccaggagatcatgaccgtgcccccgccgtccgtctccggcagagtgtctcggttggccgtgaaggccgccttcttcggcctgctgggctacagcctgtactggatgggccgccgcaccgcgagcctggtcctgtcgctgcccgccgcgcagtactgcctgcagagggtgaccgaggcccggcacaagtaggagactgctccccgcccgctcgggcccctgaggagccagtgcccccgcggcacttctgggtgccaggtgcatcctagcccgcccgaggcccctgccaccccccatgggggtctgggcccggcctcgcctgccctcctgggccagtcacccctcccccagcccacccaaataaaggattatttaactgtctgagctcaggcctcccggcagcccctcccctcccacactgcaggggccgttccccagcttctggacaagacacccagctccgagggggcaggggcttataggaggggccgaggcgtgcgctgccctctcagccctggtggcaggcgggggacaatggccactgtccctacctcactgtgccttcctgtgctccggccacaggagcgtcggcccaggggcggctcctgggggctccagggcaggcgagactgggaaaggcccagccctggagctccagccgaccccaccgtgcccctggcatcctggccctggccgccacctccctggcaccgtctgcctgcagggattctgtgtttttggcttttttaatgtcttaaaatcttttactcaggtaattttaatttcagagagaaaaactgaagtaaatgtcaaaaaacaccagccttaaatccaaagggagagaattcgtgttcttgggtctgtcccgagtgggctcgcgtgcagccaaacatcagctctgggtccaggcgtggcctcagctgggagcctgtgtcctgagcccccggagcgaaggggtgcctggggcatcttggccctctctgggcagacaatgtgtgcacctatgtggaaggccaaggacatgggctgtggccaggcctgtcccgctcaggccccctgcccggcggccgtctgtgtgcggggcctccctcctggctgtccaggacacagcccgtgcagccccagcctggacccaggccatctctggttgtgtctgtgccgactcggtgttgaatcaaatcaggtgtgcgtcaggagccggctgtgtccttcctgccacactcggggattcattccttagaaactgaaataaattctaattttggaaactc

SEQ ID NO: 191796 - DNA, 2272 bp, Homo sapiens
  Payload ID: 17896
  Gene Name: TraB domain containing
  Uniprot ID: Q9H4I3
  ENST ID: ENST00000380909
  CDS Start-End: 97-1227
cccgtccgttgagggcccgcgccgcatggaggccggctgaggagcgccgctgcctcgcctcggctccccacaggtgcaggaagccgccgcccagccatggacggggaggagcagcagccaccgcacgaggccaacgtggaacctgttgtgccgtcagaggcttcagagccggtgcccagggtgctttctggagacccccagaacctgtccgacgtggacgccttcaacctgctcctggagatgaagctgaagcggcggcgtcagcggcccaacctgccgcgcactgtgacccagttggtggctgaggacgggagcagggtgtacgtggtggggacagcccacttcagcgacgacagcaagagggacgttgtgaagaccatccgggaggtgcagcctgacgtggtggtcgtggagctctgccaatatcgtgtgtccatgctgaagatggacgagagcacgctgctgcgggaggcccaggagctcagcctggagaagctgcagcaggccgtgaggcagaacgggctcatgtcggggctgatgcagatgctgctgctgaaggtgtctgcacacatcaccgagcagctgggcatggccccaggtggcgagttcagggaggccttcaaggaggccagcaaggtgcctttctgcaagttccacctgggtgaccgacccatccccgtcaccttcaagagggccatcgcagcgctctccttctggcagaaggtcaggctggcttggggcctgtgcttcctgtcagaccccatcagcaaggatgacgtggaacgctgcaagcagaaggacctactggagcagatgatggccgagatgattggcgagttcccagacctgcaccgcaccatcgtctcggagcgcgacgtctacctaacctacatgctgcgccaggccgcgcggcgcctcgagctgcctcgggcctctgacgccgagcccaggaagtgcgtcccctccgtggtcgtgggcgtcgtgggcatgggccacgtgcctggcatcgagaagaactggagcaccgacctcaacatccaggagatcatgaccgtgcccccgccgtccgtctccggcagagtgtctcggttggccgtgaaggccgccttcttcggcctgctgggctacagcctgtactggatgggccgccgcaccgcgagcctggtcctgtcgctgcccgccgcgcagtactgcctgcagagggtgaccgaggcccggcacaagtaggagactgctccccgcccgctcgggcccctgaggagccagtgcccccgcggcacttctgggtgccaggtgcatcctagcccgcccgaggcccctgccaccccccatgggggtctgggcccggcctcgcctgccctcctgggccagtcacccctcccccagcccacccaaataaaggattatttaactgtctgagctcaggcctcccggcagcccctcccctcccacactgcaggggccgttccccagcttctggacaagacacccagctccgagggggcaggggcttataggaggggccgaggcgtgcgctgccctctcagccctggtggcaggcgggggacaatggccactgtccctacctcactgtgccttcctgtgctccggccacaggagcgtcggcccaggggcggctcctgggggctccagggcaggcgagactgggaaaggcccagccctggagctccagccgaccccaccgtgcccctggcatcctggccctggccgccacctccctggcaccgtctgcctgcagggattctgtgtttttggcttttttaatgtcttaaaatcttttactcaggtaattttaatttcagagagaaaaactgaagtaaatgtcaaaaaacaccagccttaaatccaaagggagagaattcgtgttcttgggtctgtcccgagtgggctcgcgtgcagccaaacatcagctctgggtccaggcgtggcctcagctgggagcctgtgtcctgagcccccggagcgaaggggtgcctggggcatcttggccctctctgggcagacaatgtgtgcacctatgtggaaggccaaggacatgggctgtggccaggcctgtcccgctcaggccccctgcccggcggccgtctgtgtgcggggcctccctcctggctgtccaggacacagcccgtgcagccccagcctggacccaggccatctctggttgtgtctgtgccgactcggtgttgaatcaaatcaggtgtgcgtcaggagccggctgtgtccttcctgccacactcggggattcattcct

SEQ ID NO: 191797 - DNA, 2172 bp, Homo sapiens
  Payload ID: 17896
  Gene Name: TraB domain containing
  Uniprot ID: Q9H4I3
  ENST ID: ENST00000395827
  CDS Start-End: 86-1216
ccggtgtgcctcggcagccttgcgctgctctaatggtccggacttccgtgtgctccccacaggtgcaggaagccgccgcccagccatggacggggaggagcagcagccaccgcacgaggccaacgtggaacctgttgtgccgtcagaggcttcagagccggtgcccagggtgctttctggagacccccagaacctgtccgacgtggacgccttcaacctgctcctggagatgaagctgaagcggcggcgtcagcggcccaacctgccgcgcactgtgacccagttggtggctgaggacgggagcagggtgtacgtggtggggacagcccacttcagcgacgacagcaagagggacgttgtgaagaccatccgggaggtgcagcctgacgtggtggtcgtggagctctgccaatatcgtgtgtccatgctgaagatggacgagagcacgctgctgcgggaggcccaggagctcagcctggagaagctgcagcaggccgtgaggcagaacgggctcatgtcggggctgatgcagatgctgctgctgaaggtgtctgcacacatcaccgagcagctgggcatggccccaggtggcgagttcagggaggccttcaaggaggccagcaaggtgcctttctgcaagttccacctgggtgaccgacccatccccgtcaccttcaagagggccatcgcagcgctctccttctggcagaaggtcaggctggcttggggcctgtgcttcctgtcagaccccatcagcaaggatgacgtggaacgctgcaagcagaaggacctactggagcagatgatggccgagatgattggcgagttcccagacctgcaccgcaccatcgtctcggagcgcgacgtctacctaacctacatgctgcgccaggccgcgcggcgcctcgagctgcctcgggcctctgacgccgagcccaggaagtgcgtcccctccgtggtcgtgggcgtcgtgggcatgggccacgtgcctggcatcgagaagaactggagcaccgacctcaacatccaggagatcatgaccgtgcccccgccgtccgtctccggcagagtgtctcggttggccgtgaaggccgccttcttcggcctgctgggctacagcctgtactggatgggccgccgcaccgcgagcctggtcctgtcgctgcccgccgcgcagtactgcctgcagagggtgaccgaggcccggcacaagtaggagactgctccccgcccgctcgggcccctgaggagccagtgcccccgcggcacttctgggtgccaggtgcatcctagcccgcccgaggcccctgccaccccccatgggggtctgggcccggcctcgcctgccctcctgggccagtcacccctcccccagcccacccaaataaaggattatttaactgtctgagctcaggcctcccggcagcccctcccctcccacactgcaggggccgttccccagcttctggacaagacacccagctccgagggggcaggggcttataggaggggccgaggcgtgcgctgccctctcagccctggtggcaggcgggggacaatggccactgtccctacctcactgtgccttcctgtgctccggccacaggagcgtcggcccaggggcggctcctgggggctccagggcaggcgagactgggaaaggcccagccctggagctccagccgaccccaccgtgcccctggcatcctggccctggccgccacctccctggcaccgtctgcctgcagggattctgtgtttttggcttttttaatgtcttaaaatcttttactcaggtaattttaatttcagagagaaaaactgaagtaaatgtcaaaaaacaccagccttaaatccaaagggagagaattcgtgttcttgggtctgtcccgagtgggctcgcgtgcagccaaacatcagctctgggtccaggcgtggcctcagctgggagcctgtgtcctgagcccccggagcgaaggggtgcctggggcatcttggccctctctgggcagacaatgtgtgcacctatgtggaaggccaaggacatgggctgtggccaggcctgtcccgctcaggccccctgcccggcggccgtctgtgtgcggggcctccctcctggctgtccaggacacagcccgtgcagccccagcctggacccaggccatctctggt

SEQ ID NO: 191798 - DNA, 1628 bp, Homo sapiens
  Payload ID: 17896
  Gene Name: TraB domain containing
  ENST ID: ENST00000395829
  CDS Start-End: 48-1187
tgcctctcctcaggctccccacaggtgcaggaagccgccgcccagccatggacggggaggagcagcagccaccgcacgaggccaacgtggaacctgttgtgccgtcagaggcttcagagccggtgcccagggtgctttctggagacccccagaacctgtccgacgtggacgccttcaacctgctcctggagatgaagctgaagcggcggcgtcagcggcccaacctgccgcgcactgtgacccagttggtggctgaggacgggagcagggtgtacgtggtggggacagcccacttcagcgacgacagcaagagggacgttgtgaagaccatccgggaggtgcagcctgacgtggtggtcgtggagctctgccaatatcgtgtgtccatgctgaagatggacgagagcacgctgctgcgggaggcccaggagctcagcctggagaagctgcagcaggccgtgaggcagaacgggctcatgtcggggctgatgcagatgctgctgctgaaggtgtctgcacacatcaccgagcagctgggcatggccccaggtggcgagttcagggaggccttcaaggaggccagcaaggtgcctttctgcaagttccacctgggtgaccgacccatccccgtcaccttcaagagggccatcgcagcgctctccttctggcagaaggtcaggctggcttggggcctgtgcttcctgtcagaccccatcagcaaggatgacgtggaacgctgcaagcagaaggacctactggagcagatgatggccgagatgattggcgagttcccagacctgcaccgcaccatcgtctcggagcgcgacgtctacctaacctacatgctgcgccaggccgcgcggcgcctcgagctgcctcgggcctctgacgccgagcccaggaagtgcgtcccctccgtggtcgtgggcgtcgtgggcatgggccacgtgcctggcatcgagaagaactggagcaccgacctcaacatccaggagatcatgaccgtgcccccgccgtccgtctccggcagagtgtctcggttggccgtgaaggccgccttcttcggcctgctgggctacagcctgtactggatgggccgccgcaccgcgagcctggtcctgtcgctgcccgccgcgcagtactgcctgcagagggtgaccgaggcccggcacaaagagaaaaactgaagtaaatgtcaaaaaacaccagccttaaatccaaagggagagaattcgtgttcttgggtctgtcccgagtgggctcgcgtgcagccaaacatcagctctgggtccaggcgtggcctcagctgggagcctgtgtcctgagcccccggagcgaaggggtgcctggggcatcttggccctctctgggcagacaatgtgtgcacctatgtggaaggccaaggacatgggctgtggccaggcctgtcccgctcaggccccctgcccggcggccgtctgtgtgcggggcctccctcctggctgtccaggacacagcccgtgcagccccagcctggacccaggccatctctggttgtgtctgtgccgactcggtgttgaatcaaatcaggtgtgcgtcaggagccggctgtgtccttcctgccacactcggggattcattccttagaa

SEQ ID NO: 191799 - DNA, 1844 bp, Homo sapiens
  Payload ID: 17897
  Gene Name: TraB domain containing 2A
  Uniprot ID: Q86V40
  ENST ID: ENST00000335459
  CDS Start-End: 207-1577
ctccgctgccgcctaggcgcggggctgacctgcgggggtggggtggggggagggaggtcgaggcccggccccacgtggccgctgctgccgggctcaccccagccccgcccggaggcgccccgcggccccggctagccagggcgggcggccacctctgccctactccttccctccgcgttccgggcctcggagccgccttgaggaggatgagtccctggagctggttcctgctgcagaccctctgcctcctgcccacgggcgcagcttcgcggcgcggggcgcccggcaccgccaactgcgagctcaagccccaacaaagcgagctgaattccttcttgtggaccattaagcgagacccaccatcttacttctttggcacaatccatgtcccgtacacccgagtttgggacttcatccccgacaactctaaggaggctttcctgcagagcagcattgtgtactttgagttggatctcacagacccctataccatctcagctctcaccagctgtcagatgctgccacagggcgagaacctccaagatgtgctccccagggacatctactgccgcctcaagcgccacctggagtatgtcaagctcatgatgcccttgtggatgaccccagaccagcgcggcaaggggctctacgcagactacctcttcaatgctattgccggaaactgggagcgcaagaggcctgtctgggtgatgctcatggtcaactccctgactgaagtggacattaagtcccgtggagtgcctgtcttagacctgttccttgcccaggaggctgagcggctgaggaaacagactggggcagtggaaaaggtggaagagcagtgccatccattgaatgggttgaacttttcacaggttcccaattttattaatgccacgctaccacctcaggagcgcatcactgctcaggagattgacagctacttacgccgggagctgatctacaagcggaatgagagaatagggaagcgggtgaaggcccttttggaggagttccctgacaaaggcttcttctttgcctttggagctggtcatttcatgggcaacaacacagtgctggatgttttgcggcgtgaaggctatgaggtagaacacgcccctgctggacgacccatccacaaagggaagagtaaaaagacctccacacggcccactctgtccaccatctttgctccaaaagtccctaccctggaagtaccggcaccagaagccgtatcctcagggcactcaacgctgcctccccttgtgtcccggcctggaagtgccgacacgcccagtgaggccgaacagaggttccggaagaagcggaggcggtcacagcggaggccgcgactccggcaattcagcgatctgtgggtccgcctggaggagagtgacatagtcccgcaactccaggtccctgtcctggacaggcacatctccactgaactgcggctccctcgccgtgggcattcccaccacagccagatggtggccagcagtgcctgcctgtctctctggactcctgtgttctgggtgctggtgctggctttccaaacagagacacccctcctgtaacgactggaagcaccaggctaagaacctgacccctcggacttgaagaatggccattcctgtactccacattctggtctagccttgttgggcccaatccagaagagactgctcttgaaaaagcggcccagtgttgattcttctctttccaaggaatgtgactttgggttatccaactttgggggcaggtgtacagttttgtaacatagtgagttgtgtgaaaataaattataaatgagttgtatgaaaataaatacctttttttgtata

SEQ ID NO: 191800 - DNA, 1975 bp, Homo sapiens
  Payload ID: 17897
  Gene Name: TraB domain containing 2A
  Uniprot ID: Q86V40
  ENST ID: ENST00000409520
  CDS Start-End: 207-1724
ctccgctgccgcctaggcgcggggctgacctgcgggggtggggtggggggagggaggtcgaggcccggccccacgtggccgctgctgccgggctcaccccagccccgcccggaggcgccccgcggccccggctagccagggcgggcggccacctctgccctactccttccctccgcgttccgggcctcggagccgccttgaggaggatgagtccctggagctggttcctgctgcagaccctctgcctcctgcccacgggcgcagcttcgcggcgcggggcgcccggcaccgccaactgcgagctcaagccccaacaaagcgagctgaattccttcttgtggaccattaagcgagacccaccatcttacttctttggcacaatccatgtcccgtacacccgagtttgggacttcatccccgacaactctaaggaggctttcctgcagagcagcattgtgtactttgagttggatctcacagacccctataccatctcagctctcaccagctgtcagatgctgccacagggcgagaacctccaagatgtgctccccagggacatctactgccgcctcaagcgccacctggagtatgtcaagctcatgatgcccttgtggatgaccccagaccagcgcggcaaggggctctacgcagactacctcttcaatgctattgccggaaactgggagcgcaagaggcctgtctgggtgatgctcatggtcaactccctgactgaagtggacattaagtcccgtggagtgcctgtcttagacctgttccttgcccaggaggctgagcggctgaggaaacagactggggcagtggaaaaggtggaagagcagtgccatccattgaatgggttgaacttttcacaggtcatctttgctttgaaccagaccctcctgcagcaggaaagcctgcgagcaggcagtcttcagatcccctacacgacggaggatctcatcaaacactataactgcggggacctcagctccgtcatcctcagccatgacagctcccaggttcccaattttattaatgccacgctaccacctcaggagcgcatcactgctcaggagattgacagctacttacgccgggagctgatctacaagcggaatgagagaatagggaagcgggtgaaggcccttttggaggagttccctgacaaaggcttcttctttgcctttggagctggtcatttcatgggcaacaacacagtgctggatgttttgcggcgtgaaggctatgaggtagaacacgcccctgctggacgacccatccacaaagggaagagtaaaaagacctccacacggcccactctgtccaccatctttgctccaaaagtccctaccctggaagtaccggcaccagaagccgtatcctcagggcactcaacgctgcctccccttgtgtcccggcctggaagtgccgacacgcccagtgaggccgaacagaggttccggaagaagcggaggcggtcacagcggaggccgcgactccggcaattcagcgatctgtgggtccgcctggaggagagtgacatagtcccgcaactccaggtccctgtcctggacaggcacatctccactgaactgcggctccctcgccgtgggcattcccaccacagccagatggtggccagcagtgcctgcctgtctctctggactcctgtgttctgggtgctggtgctggctttccaaacagagacacccctcctgtaacgactggaagcaccaggctaagaacctgacccctcggacttgaagaatggccattcctgtactccacattctggtctagccttgttgggcccaatccagaagagactgctcttgaaaaagcggcccagtgttgattcttctctttccaaggaatgtgactttgggttatccaactttgggggcaggtgtacagttttgtaacatagtgagttgtgtgaaaataaattataaatgagttgtatgaaaataaa

SEQ ID NO: 191801 - DNA, 1554 bp, Homo sapiens
  Payload ID: 17897
  Gene Name: TraB domain containing 2A
  ENST ID: ENST00000409133
  CDS Start-End: 112-1113
accccagccccgcccggaggcgccccgcggccccggctagccagggcgggcggccacctctgccctactccttccctccgcgttccgggcctcggagccgccttgaggaggatgagtccctggagctggttcctgctgcagaccctctgcctcctgcccacgggcgcagcttcgcggcgcggggcgcccggcaccgccaactgcgagctcaagccccaacaaagcgagctgaattccttcttgtggaccattaagcgagacccaccatcttacttctttggcacaatccatgtcccgtacacccgagtttgggacttcatccccgacaactctaaggaggctttcctgcagagcagcattgtgtactttgagttggatctcacagacccctataccatctcagctctcaccagctgtcagatgctgccacagggcgagaacctccaagatgtgctccccagggacatctactgccgcctcaagcgccacctggagtatgtcaagctcatgatgcccttgtggatgaccccagaccagcgcggcaaggggctctacgcagactacctcttcaatgctattgccggaaactgggagcgcaagaggcctgtctgggtgatgctcatggtcaactccctgactgaagtggacattaagtcccgtggagtgcctgtcttagacctgttccttgcccaggaggctgagcggctgaggaaacagactggggcagtggaaaaggtggaagagcagtgccatccattgaatgggttgaacttttcacaggtcatctttgctttgaaccagaccctcctgcagcaggaaagcctgcgagcaggcagtcttcagatcccctacacgacggaggatctcatcaaacactataactgcggggacctcagctccgtcatcctcagccatgacagctcccaggttcccaattttattaatgccacgctaccacctcaggagcgcatcactgctcaggagattgacagctacttacgccgggagctgatctacaagcggaatgagagaatagggaagcgggtgaaggcccttttggaggagttccctgacaaaggcttcttctttgcctttggagctgcttcacagtagccttgaaaatcaggagccttgaactacagtagctgtgaaaactgtttgcctaatggttactggaggggacagaatgggttcaaagttcctccaaagctccatccttaaagaatcatcactatttgacatgtccaatagttccctgaaatttccattcccaagcttgtcttcatttgacctgactcagagcttgctctgtgtgaatagccctattcttagggtgtgtgttgaaaacaatcagtagcagctgtttaacatcatagttgctggaaatagcaatattaattgaagcttacaaggggctgcccaaaaaacttaaaagcaaaatcccatagggggtatagaaaagctctaaaatattcctagagagtcacatgcatgagaagagctgtgcacatgcccaggaaagacctgagaaggtcctaatctctcacctctggc

SEQ ID NO: 191802 - DNA, 7034 bp, Homo sapiens
  Payload ID: 17898
  Gene Name: TraB domain containing 2B
  Uniprot ID: A6NFA1
  ENST ID: ENST00000606738
  CDS Start-End: 107-1660
tggagccccgtgctccagaggaaactccgtgcccaactgggggctccccgccccgctgaggggcgccgcccaggagggtcccccgcgccccgcgggccctggcaggatgcacgccgccctggcggggccgctgctcgccgccctcctcgccaccgctcgcgcccgcccgcagcccccggacggaggacagtgccggccgcccggatcgcagagggacttgaactccttcctgtggacgattcggcgtgatcctccggcctacctgtttggcactattcacgtcccctacacccgcgtctgggacttcatcccggacaactccaaggcagccttccaggctagcacccgtgtctactttgagctggaccttacagacccctacaccatctcggccctggccagctgccagctgctgccgcacggggaaaacctgcaggacgtgctgccccacgagctttactggcgcttgaagcgccacctggactacgtgaagttgatgatgccctcctggatgacgcccgctcagcggggcaaggggctctatgctgactacctattcaatgccatcgcgggcaactgggagcgcaagaggcccgtctgggtgatgctcatggtaaactcgctcacagagagggacgtgcgcttccgtggtgtgcccgtgctcgacctctacctggcccagcaggctgagaagatgaagaagaccacaggggctgtggagcaggtggaggagcagtgccatcccctcaacaacgggctcaacttctcccaggtgctgtttgccctgaaccaaaccctgctgcagcaggagagtgtgcgggccgggagcctgcaggcctcctacaccacggaggacctcatcaagcactacaactgcggagacctcagcgcagtcatcttcaaccacgacacatcccagctgcccaactttatcaacaccaccctcccgccacacgagcaggtgacggcccaggagattgacagctacttccgccaggagctcatctacaagaggaatgagcgcatggggaagagggtcatggcgcttctacgggagaacgaggacaagatctgcttctttgccttcggagcaggtcactttctggggaacaacacagtcatcgacatcctgcggcaggcagggctggaggtggaccacacacccgccgggcaggccatacacagccctgccccccagagcccagcgccctctcctgaggggacctcgacgagcccggccccagtgaccccagctgccgctgtccccgaagcaccctctgtgacccccaccgccccaccagaggatgaggatccagccctgtccccacacctcctgctccccgacagcctcagccagctggaggagtttggccggcagaggaagtggcacaagaggcagagcacacaccagcggccgcggcagttcaatgacctctgggtccgcatcgaggacagcaccaccgcctcaccacccccgctgcccctgcagcccacccacagctcggggaccgccaagccccccttccagctttcagaccagctacaacagcaggacccgccagggcccgccagcagctcggcacccaccctgggccttctccccgccatcgccaccaccatcgctgtctgcttcctgctgcatagccttgggccctcctgacctcggccaccccaagtggagaagccagagaaatgacacaggggtcttcggccacacccaactgctcctgccaccacctccagggggtgcccaacacgtcgagggcagtccacatgggattggctagacactctagagctttactgtacccaagttacatcttcttttttgtagaaggatcttaatttcccatagtgctatggggctcttttgtaaaatacgtgtccatattaaaaaagaaaaatgtatttattctaccgataaaactattcttatgtggcctgtgttataaccccctagccctagtgctggcccgggaggggaacccgggacatcagtgacctcctgtggactgtggctctggactggcttgctcttggatcaccgaagcctcctgggtctgggtttggcttctccgactgtggggccctcagcaggaggggcaggcaggcaggcttagcctttgtgaagctggatttgggagccagaggtgtgaacgttggccatcctcccctctgctggatgcacccgcggcctgggaagataatttaggaaagagaatgctgctattgtgaaacccctgagtgtctatctggccctccagagctcttggtaagtgttttcaaccaaagcgctggggtggggtgggaggtgggatactggtgctgaggaaagcagtccccaccccacagaacaaatgaataaactgagatccagagagaaccaggtgggtagcccaaggtcacacggcaagtgggagagtgaggacataaatccagacctctctgttctggtgtcatgaatccagcttgggttaaaggagaggctgttgaagtcctggctaaatggattgagctgggccgagggactggagtgggcacaggagggcagttttagagacaggggcttaggcctcacatgatgttaatagtaatgagagctgccatttttccaaagcctgcagcgtggcaagcactttgcacacttgcttcactgattcttgcgctagttctgtgagatgtgactatccccatttcacagatgaggaaactgagccccccaaagaggcgaagggacttgctgaagatcccccagccaggatgtggccccagatcagtgtgatgcaaaacaattcctgcctcctgttccctgttctgccacgttctctctgcaagggagcagatctcacccaaactggggccagcacaagctttcactccaccaagaaaccttttggccggctgcttatgttgacccctctggccaaagggctctggcaactgcatgtgccatgtgtcgcatgtcctgacttgccagatcttggagcccacgagaagctttcctgccaaatcaaaggctgagaggtgggcacagctgtggggcacctggggaggcacagcagccaagtggggaggcaggtgacagggactccgagagactttagcccctcggctcctcaaggtggtggttgaggagacagaggacccaggtgggctaactcccacctgggaggcctgaaaccctatggggcaggtgcctcagtaattacagagtcctggaacctgacagcagaaaggacccttcacttgatggataatagtaacagtaggaggaataataaggcccacagagaggagacacttctccaaggctgcacagccgggtgggcctgctgactcccagcccagtgcaccccaactttatagcttcgtgggtttccctggcaggcttgatggcagctaattggccccagtgccatcttgcccagcttggcagctatctcccttctgagacggcaagttctgggcagctcatgggatggtcaggagtcccacgggcatcttggcaggcagctgaattctttacagctcagccctgatggacgtgtttgagcttgagacctggcaggagactggagctctgccttagagggcccagccagccctgtgggcaccatgctctaaactgaacttgacctcaatccaggctggagttggtttatccttggcaaaaatgtgacttcctatttctgagcgggaaggggcttagctgacttataaagcaggctcagaagttggacatcaaacggatcgtgcagtgcactatttggatgagataagtgtaaaggaattagaagcacacaggccagattcctctctgtttggggcagagtatggcgtgagacgtattgagatggagcttgaggttaattaaagatgaagcatttgggtaaacagtccaggcacctgaccgtgtgcccagatctgtgccaggcactgagccaagaaggtaaattaatgcagcttgtaattactgagcacatgcaatgccaggctctgtattagagctgaatctaaccactctccttggcccagaggaactcattatcaagatgggacaagcagtgcaatgctagattacgtcgtcctggcccctaacttcaggaagattcagccttagtctttcccagatccctcctctgggcatattaggggatcctaaactctcccttaccctaattcaagtgtttaaagaaagatggctagactaaccgatggagtagacatgtacctacaggagagcaagagccaatgtggtcagacatctgttgccaaagttcactgatctctgaggaccaccagctggccagggtctgaaatgaactcaacttgctgacttatgacccaaaagacttgaggcacatatgcaggaatctgcatgtctggggcacttgaattctctcatcctgggccagagaaccaccattccataagcagcaacccacacctttgacacgatctatccaccactaactgacatttcttccagaaacgttctttgtgcccagcctcataaaatgctcctgttgctctgagaaatttgtgtgcacttcttagacttttctgtttgactgtgaggcaggcaggaaagatgaaaggtctgagacccagcaggtaaagtgatctgcttaaggtcgggcagcatgttattgtggccctgggtcctctacctctcacgaaagctgactgtgtgatgaagggctctctggggcatgttggaatggccatgtccccaggtcttcctccagtggtgggtctgatgcaccagcagccagatgaagacagggagagccctgtcatccacagtggagggagaagaatcaggctgccagggagctgcaaagggctgctgaggatgcctccagtcctgagagtcaaagatctgggatctaggaagcatggaaccttgtgctggttatgaacaaatttgtccttgcattgaaagaccctaagcatattttcttcatgctaaataatgtgttatctacaacttcctggcctcggctagacctggacaagcctaggtgctcaggccccttgtcccacttgcctaatctccagcccagggccattgtcacagtggatcccaaagaggagggaaagtccttctaccaaaaggaaagtctattgaaaatgctgtgaaggacaagagaagttctccagggaattgcagctttgatggcatcctgtgtggcagacagcagaattggggctggtgatagtttttcagtgactgtgagataagaaccagagtcctcagcctcaccctgaagtgtccgctagacccttcgtgacccaaccctgctgaccagccacgtctctcatgtctcttaccctgtgcctggccagcgtgatgtgcagtcatctctagaatagacaggatgtttcacacatgctgctccctacccctggaaactcccttctctcccctgtaactgctcatccattgaggatcaacacagatagcacttcctccaggaagccccctcccattcctttgtgctttcttagcatctatcacaatacccactgcccagtgttgtgactatctagtgtgtatctgctcctctcggactgtgagcagcttaatggcaggggtcatgtaaatttgtttttgtaccctcatctgacacaaaggtggtgctcaacagatgtgtagagagagaaaggaagggaaggaagctgaaggaaggggaggaagaaaggaatgaaggcagaaaagaaggagagaggcagaccttagttccaccagtggcataatttccaccaagccaaagctgtctggggatggcccggagcccccaagggtggcaggtttcccatcgggagaggtgtttgagcaggggcagtgtgcccactggctgaagaagtggtaggagagttgacatcttgccaagggcctggtgtagatgacattgagggtccctcctggctctgcaatgatcaagttctatgaacattgttatttttccagaaattcatctgagcagccaaaaaaaatcaccccgctggctgtctaaaccagtaaggttcaggaataagtccagcctccccactccacccacaaccaccaccacccctcacagcgcccccttcaatgacccagctgggcttgactgctgcctttgggtgggggaacttctgaaaggtggaggaggagtgaactggaacccaggcctgcagcccagcccagagctccttcccgctctgccccactccctgaccccaggggaggaaagggttcacgagaactgattgaccccctacttggctctttccagggagcatcggctatcctcaccctttctccaagtgggagctgggctcttcctttccggagatactctggatactccttcactttgctggatgaccttgggcaagttcctgtccctctctgagccttcacttcctcatctgtcaaatgaagaccttgattcctgcctgggcagttctagggctggagggcaggggtgacatggacaatcttgggcctccatggagatgaggtgcttggctttcttcccaggacccacaggctgccatgggattgaaagcatgtggaggtgggaaaggtgacagagtagcatgcctccaaggcccccttcatcccagtcctgctgtggggaaagtgggctttgaacgggatccaagtctaagatgtttccggtgagctgccagggacaaagggctctcagacatcttgggtccccagtggctggggtgggcaggggctgattcagccaaaggaggctctagcccagaacagaggaagccagagcccctgccccattcttgagcctcacagagcttgtccccgagttgattcactgtgcaacacaggcttcagattcatgtatttgaaaggtattcatgatgttgttctcttatcacctctgcccctcacctctgtgaattatcatgaagagtcctttaagagtataaatagaagacaaagaaagatgctattaatgttattttgccaaaaatatttttgtagcataatatattaataaaagatattatgaattcaa

SEQ ID NO: 191803 - DNA, 1020 bp, Homo sapiens
  Payload ID: 17899
  Gene Name: trace amine associated receptor 1
  Uniprot ID: Q96RJ0
  ENST ID: ENST00000275216
  CDS Start-End: 1-1020
atgatgcccttttgccacaatataattaatatttcctgtgtgaaaaacaactggtcaaatgatgtccgtgcttccctgtacagtttaatggtgctcataattctgaccacactcgttggcaatctgatagttattgtttctatatcacacttcaaacaacttcataccccaacaaattggctcattcattccatggccactgtggactttcttctggggtgtctggtcatgccttacagtatggtgagatctgctgagcactgttggtattttggagaagtcttctgtaaaattcacacaagcaccgacattatgctgagctcagcctccattttccatttgtctttcatctccattgaccgctactatgctgtgtgtgatccactgagatataaagccaagatgaatatcttggttatttgtgtgatgatcttcattagttggagtgtccctgctgtttttgcatttggaatgatctttctggagctaaacttcaaaggcgctgaagagatatattacaaacatgttcactgcagaggaggttgctctgtcttctttagcaaaatatctggggtactgacctttatgacttctttttatatacctggatctattatgttatgtgtctattacagaatatatcttatcgctaaagaacaggcaagattaattagtgatgccaatcagaagctccaaattggattggaaatgaaaaatggaatttcacaaagcaaagaaaggaaagctgtgaagacattggggattgtgatgggagttttcctaatatgctggtgccctttctttatctgtacagtcatggacccttttcttcactacattattccacctactttgaatgatgtattgatttggtttggctacttgaactctacatttaatccaatggtttatgcatttttctatccttggtttagaaaagcactgaagatgatgctgtttggtaaaattttccaaaaagattcatccaggtgtaaattatttttggaattgagttcatag

SEQ ID NO: 191804 - DNA, 1157 bp, Homo sapiens
  Payload ID: 17900
  Gene Name: trace amine associated receptor 2
  Uniprot ID: Q9P1P5
  ENST ID: ENST00000275191
  CDS Start-End: 109-1029
tgacaaaattctatctgttcttgttttttgaaggaaaaattcaattgctctgaatatggaaatagatcttgcccagaaaatgaaagatctctgggtgtccgagtggctatgtattcatttatggcaggatccatattcatcacaatatttggcaatcttgccatgataatttccatttcctacttcaagcagcttcacacaccaaccaacttcctcatcctctccatggccatcactgatttcctcctgggattcaccatcatgccatatagtatgatcagatcggtggagaactgctggtattttgggcttacattttgcaagatttattatagttttgacctgatgcttagcataacatccatttttcatctttgctcagtggccattgatagattttatgctatatgttacccattactttattccaccaaaataactattccagtcattaaaagattgctacttctatgttggtcggtccctggagcatttgccttcggggtggtcttctcagaggcctatgcagatggaatagagggctatgacatcttggttgcttgttccagttcctgcccagtgatgttcaacaagctatgggggaccaccttgtttatggcaggtttcttcactcctgggtctatgatggtggggatttatggcaaaatttttgcagtatccagaaaacatgctcatgccatcaataacttgcgagaaaatcaaaataatcaagtgaagaaagacaaaaaagctgccaaaactttaggaatagtgataggagttttcttattatgttggtttccttgtttcttcacaattttattggatccctttttgaacttctctactcctgtagttttgtttgatgccttgacatggtttggctattttaactccacatgtaatccgttaatatatggtttcttctatccctggtttcgcagagcactgaagtacattttgctaggtaaaattttcagctcatgtttccataatactattttgtgtatgcaaaaagaaagtgagtaggctttttctgcatgaataaattgaagcaaaaaactagaatttagaagaatgaagttgtttaagatgtgtgtttttgtgcatgtgtgtattattttagctaccatagaaagctgttggtttctaagacg

SEQ ID NO: 191805 - DNA, 1056 bp, Homo sapiens
  Payload ID: 17900
  Gene Name: trace amine associated receptor 2
  Uniprot ID: Q9P1P5
  ENST ID: ENST00000367931
  CDS Start-End: 1-1056
atggctgtctcatcagagcaacatgaactttcacatttcaaaagaacacagacaaaaaaggaaaaattcaattgctctgaatatggaaatagatcttgcccagaaaatgaaagatctctgggtgtccgagtggctatgtattcatttatggcaggatccatattcatcacaatatttggcaatcttgccatgataatttccatttcctacttcaagcagcttcacacaccaaccaacttcctcatcctctccatggccatcactgatttcctcctgggattcaccatcatgccatatagtatgatcagatcggtggagaactgctggtattttgggcttacattttgcaagatttattatagttttgacctgatgcttagcataacatccatttttcatctttgctcagtggccattgatagattttatgctatatgttacccattactttattccaccaaaataactattccagtcattaaaagattgctacttctatgttggtcggtccctggagcatttgccttcggggtggtcttctcagaggcctatgcagatggaatagagggctatgacatcttggttgcttgttccagttcctgcccagtgatgttcaacaagctatgggggaccaccttgtttatggcaggtttcttcactcctgggtctatgatggtggggatttatggcaaaatttttgcagtatccagaaaacatgctcatgccatcaataacttgcgagaaaatcaaaataatcaagtgaagaaagacaaaaaagctgccaaaactttaggaatagtgataggagttttcttattatgttggtttccttgtttcttcacaattttattggatccctttttgaacttctctactcctgtagttttgtttgatgccttgacatggtttggctattttaactccacatgtaatccgttaatatatggtttcttctatccctggtttcgcagagcactgaagtacattttgctaggtaaaattttcagctcatgtttccataatactattttgtgtatgcaaaaagaaagtgagtag

SEQ ID NO: 191806 - DNA, 1014 bp, Homo sapiens
  Payload ID: 17901
  Gene Name: trace amine associated receptor 5
  Uniprot ID: O14804
  ENST ID: ENST00000258034
  CDS Start-End: 1-1014
atgagagctgtcttcatccaaggtgctgaagagcaccctgcggcattctgctaccaggtgaatgggtcttgccccaggacagtacatactctgggcatccagttggtcatctacctggcctgtgcagcaggcatgctgattatcgtgctagggaatgtatttgtggcatttgctgtgtcctacttcaaagcgcttcacacgcccaccaacttcctgctgctctccctggccctggctgacatgtttctgggtctgctggtgctgcccctcagcaccattcgctcagtggagagctgctggttcttcggggacttcctctgccgcctgcacacctacctggacaccctcttctgcctcacctccatcttccatctctgtttcatttccattgaccgccactgtgccatctgtgaccccctgctctatccctccaagttcacagtgagggtggctctcaggtacatcctggcaggatggggggtgcccgcagcatacacttcgttattcctctacacagatgtggtagagacaaggctcagccagtggctggaagagatgccttgtgtgggcagttgccagctgctgctcaataaattttggggctggttaaacttccctttgttctttgtcccctgcctcattatgatcagcttgtatgtgaagatctttgtggttgctaccagacaggctcagcagattaccacattgagcaaaagcctggctggggctgccaagcatgagagaaaagctgccaagaccctgggcattgctgtgggcatatacctcttgtgctggctgcccttcaccatagacacgatggtcgacagcctccttcactttatcacacccccactggtctttgacatctttatctggtttgcttacttcaactcagcctgcaaccccatcatctatgtcttttcctaccagtggtttcggaaggcactgaaactcacactgagccagaaggtcttctcaccgcagacacgcactgttgatttgtaccaagaatga

SEQ ID NO: 191807 - DNA, 1038 bp, Homo sapiens
  Payload ID: 17902
  Gene Name: trace amine associated receptor 6
  Uniprot ID: Q96RI8
  ENST ID: ENST00000275198
  CDS Start-End: 1-1038
atgagcagcaattcatccctgctggtggctgtgcagctgtgctacgcgaacgtgaatgggtcctgtgtgaaaatccccttctcgccgggatcccgggtgattctgtacatagtgtttggctttggggctgtgctggctgtgtttggaaacctcctggtgatgatttcaatcctccatttcaagcagctgcactctccgaccaattttctcgttgcctctctggcctgcgctgatttcttggtgggtgtgactgtgatgcccttcagcatggtcaggacggtggagagctgctggtattttgggaggagtttttgtactttccacacctgctgtgatgtggcattttgttactcttctctctttcacttgtgcttcatctccatcgacaggtacattgcggttactgaccccctggtctatcctaccaagttcaccgtatctgtgtcaggaatttgcatcagcgtgtcctggatcctgcccctcatgtacagcggtgctgtgttctacacaggtgtctatgacgatgggctggaggaattatctgatgccctaaactgtataggaggttgtcagaccgttgtaaatcaaaactgggtgttgacagattttctatccttctttatacctacctttattatgataattctgtatggtaacatatttcttgtggctagacgacaggcgaaaaagatagaaaatactggtagcaagacagaatcatcctcagagagttacaaagccagagtggccaggagagagagaaaagcagctaaaaccctgggggtcacagtggtagcatttatgatttcatggttaccatatagcattgattcattaattgatgcctttatgggctttataacccctgcctgtatttatgagatttgctgttggtgtgcttattataactcagccatgaatcctttgatttatgctttattttacccatggtttaggaaagcaataaaagttattgtaactggtcaggttttaaagaacagttcagcaaccatgaatttgttttctgaacatatataa

SEQ ID NO: 191808 - DNA, 1029 bp, Homo sapiens
  Payload ID: 17903
  Gene Name: trace amine associated receptor 8
  Uniprot ID: Q969N4
  ENST ID: ENST00000275200
  CDS Start-End: 1-1029
atgaccagcaatttttcccaacctgttgtgcagctttgctatgaggatgtgaatggatcttgtattgaaactccctattctcctgggtcccgggtaattctgtacacggcgtttagctttgggtctttgctggctgtatttggaaatctcttagtaatgacttctgttcttcattttaagcagctgcactctccaaccaattttctcattgcctctctggcctgtgctgacttcttggtaggtgtgactgtgatgcttttcagcatggtcaggacggtggagagctgctggtattttggagccaaattttgtactcttcacagttgctgtgatgtggcattttgttactcttctgtcctccacttgtgcttcatctgcatcgacaggtacattgtggttactgatcccctggtctatgctaccaagttcaccgtgtctgtgtcgggaatttgcatcagcgtgtcctggattctgcctctcacgtacagcggtgctgtgttctacacaggtgtcaatgatgatgggctggaggaattagtaagtgctctcaactgcgtaggtggctgtcaaattattgtaagtcaaggctgggtgttgatagattttctgttattcttcatacctacccttgttatgataattctttacagtaagatttttcttatagctaaacaacaagctataaaaattgaaactactagtagcaaagtagaatcatcctcagagagttataaaatcagagtggccaagagagagaggaaagcagctaaaaccctgggggtcacggtactagcatttgttatttcatggttaccgtatacagttgatatattaattgatgcctttatgggcttcctgacccctgcctatatctatgaaatttgctgttggagtgcttattataactcagccatgaatcctttgatttatgctctattttatccttggtttaggaaagccataaaacttattttaagtggagatgttttaaaggctagttcatcaaccattagtttatttttagaataa

SEQ ID NO: 191809 - DNA, 1047 bp, Homo sapiens
  Payload ID: 17904
  Gene Name: trace amine associated receptor 9 (gene/pseudogene)
  Uniprot ID: Q96RI9
  ENST ID: ENST00000434551
  CDS Start-End: 1-1047
atggtgaacaatttctcccaagctgaggctgtggagctgtgttacaagaacgtgaacgaatcctgcattaaaactccttactcgccaggtcctcgatctatcctctacgccgtccttggttttggggctgtgctggcagcgtttggaaacttactggtcatgattgctatccttcacttcaaacaactgcacacacctacaaactttctgattgcgtcgctggcctgtgctgacttcttggtgggagtcactgtgatgcccttcagcacagtgaggtctgtggagagctgttggtactttggggacagttactgtaaattccatacatgttttgacacatccttctgttttgcttctttatttcatttatgctgtatctctgttgatagatacattgctgttactgatcctctgacctatccaaccaagtttactgtgtcagtttcagggatatgcattgttctttcctggttcttttctgtcacatacagcttttcgatcttttacacgggagccaacgaagaaggaattgaggaattagtagttgctctaacctgtgtaggaggctgccaggctccactgaatcaaaactgggtcctactttgttttcttctattctttatacccaatgtcgccatggtgtttatatacagtaagatatttttggtggccaagcatcaggctaggaagatagaaagtacagccagccaagctcagtcctcctcagagagttacaaggaaagagtagcaaaaagagagagaaaggctgccaaaaccttgggaattgctatggcagcatttcttgtctcttggctaccatacctcgttgatgcagtgattgatgcttatatgaattttataactcctccttatgtttatgagattttagtttggtgtgtttattataattcagctatgaaccccttgatttatgctttcttttaccaatggtttgggaaggcaataaaacttattgtaagcggcaaggtcttaaggactgattcgtcaacaactaatttattttctgaagaagtagagacagattaa

SEQ ID NO: 191810 - DNA, 2152 bp, Homo sapiens
  Payload ID: 17905
  Gene Name: TRAF family member-associated NFKB activator
  Uniprot ID: Q92844
  ENST ID: ENST00000259075
  CDS Start-End: 206-1483
tttctcagtggaagttcccacttcaacataagggagagctctggacagtttgagcagcattgttagagcctgtggaaaacactttacaactgtgtaactgtcttcatctttacagaggaatagtctacaaaggaagacttgtaacctggagaagagacctgtcatttactccatcctttatagtgatgctacaggacgaagaggaatggataaaaacattggcgagcaactcaataaagcgtatgaagccttccggcaggcatgcatggatagagattctgcagtaaaagaattacagcaaaagactgagaactatgagcagagaatacgtgaacaacaggaacagctgtcacttcaacagactattattgacaagctaaaatctcagttacttcttgtgaattccactcaagataacaattatggctgtgttcctctgcttgaagacagtgaaacaagaaagaataatttgactcttgatcagccacaagataaagtgatttcaggaatagcaagagaaaaactaccaaaggtaagaagacaagaggtttcttctcctagaaaagaaacttcagcaaggagtcttggcagtcctttgctccatgaaaggggtaatatagagaagactttctgggatctgaaagaagaatttcataaaatatgcatgctagcaaaagcacagaaagaccacttaagcaaacttaatataccagacactgcaactgaaacacagtgctctgtgcctatacagtgtacggataaaacagataaacaagaagcgctgtttaagcctcaggctaaagatgatataaatagaggtgcaccatccatcacatctgtcacaccaagaggactgtgcagagatgaggaagacacctcttttgaatcactttctaaattcaatgtcaagtttccacctatggacaatgactcaactttcttacatagcactccagagagacccggcatccttagtcctgccacgtctgaggcagtgtgccaagagaaatttaatatggagttcagagacaacccagggaactttgttaaaacagaagaaactttatttgaaattcagggaattgaccccatagcttcagctatacaaaaccttaaaacaactgacaaaacaaagccctcaaatctcgtaaacacttgtatcaggacaactctggatagagctgcgtgtttgccacctggagaccataatgcattatatgtaaatagcttcccacttctggacccatctgatgcaccttttccctcactcgattccccgggaaaagcaatccgaggaccacagcagcccatttggaagccctttcctaatcaagacagtgactcggtggtactaagtggcacagactcagaactgcatatacctcgagtatgtgaattctgtcaagcagttttcccaccatccattacatccaggggggatttccttcggcatcttaattcacacttcaatggagagacttaagacacatttgaaaacagacatatcaagttctatgtgatgattttgggtttttaatactataaatacttgattgtaaactaaattcaagatcatttataggaaaatctagtttcacagctatttgaatttttttctggatttactatataactcttattttttaaaagatcattctgttctttcaaggagaaataagcctaaaagaagaaaaacaaaaaaaattctgtataaaactgtaatcctttgtattcatgtttacagtgctattactataattcaaaattatgtatgtgacttagagttatataatcataatttatgtttatttcaaatatctaagtttattgcttggatttctagtgagagctgttgaatttggtgatgtcaaatgtttctagggtttttttagtttgtttttattgaaaaatttaattatttatgctataggtgatattctctttgaataaacctataatagaaaatagcagacaacataaacatctttgtaaatatcaaacctaatacatttcttgtccagtgataaaacaactggtagaattatttaaacactttagatttttaaataatatacatggctttaatttttactgtgtgtatagctacatgatgaaattaattaaatattaagaggtacttatgttgtgatca

SEQ ID NO: 191811 - DNA, 2171 bp, Homo sapiens
  Payload ID: 17905
  Gene Name: TRAF family member-associated NFKB activator
  Uniprot ID: Q92844
  ENST ID: ENST00000392749
  CDS Start-End: 240-1517
agaagagccctgggctgggtggggcagggcggaagggccctggccttgttgggtggaggtgaagagttaatggctccgcgcgcaggcactgccctctgaactggaacaaaatgcaacttccggttggagtcactcggccaggcgccggcgacctgaggggagagggaacgcagctgaaagcgtgaactgtacctgtcatttactccatcctttatagtgatgctacaggacgaagaggaatggataaaaacattggcgagcaactcaataaagcgtatgaagccttccggcaggcatgcatggatagagattctgcagtaaaagaattacagcaaaagactgagaactatgagcagagaatacgtgaacaacaggaacagctgtcacttcaacagactattattgacaagctaaaatctcagttacttcttgtgaattccactcaagataacaattatggctgtgttcctctgcttgaagacagtgaaacaagaaagaataatttgactcttgatcagccacaagataaagtgatttcaggaatagcaagagaaaaactaccaaaggtaagaagacaagaggtttcttctcctagaaaagaaacttcagcaaggagtcttggcagtcctttgctccatgaaaggggtaatatagagaagactttctgggatctgaaagaagaatttcataaaatatgcatgctagcaaaagcacagaaagaccacttaagcaaacttaatataccagacactgcaactgaaacacagtgctctgtgcctatacagtgtacggataaaacagataaacaagaagcgctgtttaagcctcaggctaaagatgatataaatagaggtgcaccatccatcacatctgtcacaccaagaggactgtgcagagatgaggaagacacctcttttgaatcactttctaaattcaatgtcaagtttccacctatggacaatgactcaactttcttacatagcactccagagagacccggcatccttagtcctgccacgtctgaggcagtgtgccaagagaaatttaatatggagttcagagacaacccagggaactttgttaaaacagaagaaactttatttgaaattcagggaattgaccccatagcttcagctatacaaaaccttaaaacaactgacaaaacaaagccctcaaatctcgtaaacacttgtatcaggacaactctggatagagctgcgtgtttgccacctggagaccataatgcattatatgtaaatagcttcccacttctggacccatctgatgcaccttttccctcactcgattccccgggaaaagcaatccgaggaccacagcagcccatttggaagccctttcctaatcaagacagtgactcggtggtactaagtggcacagactcagaactgcatatacctcgagtatgtgaattctgtcaagcagttttcccaccatccattacatccaggggggatttccttcggcatcttaattcacacttcaatggagagacttaagacacatttgaaaacagacatatcaagttctatgtgatgattttgggtttttaatactataaatacttgattgtaaactaaattcaagatcatttataggaaaatctagtttcacagctatttgaatttttttctggatttactatataactcttattttttaaaagatcattctgttctttcaaggagaaataagcctaaaagaagaaaaacaaaaaaaattctgtataaaactgtaatcctttgtattcatgtttacagtgctattactataattcaaaattatgtatgtgacttagagttatataatcataatttatgtttatttcaaatatctaagtttattgcttggatttctagtgagagctgttgaatttggtgatgtcaaatgtttctagggtttttttagtttgtttttattgaaaaatttaattatttatgctataggtgatattctctttgaataaacctataatagaaaatagcagacaacataaacatctttgtaaatatcaaacctaatacatttcttgtccagtgataaaacaactggtagaattatttaaacactttagatttttaaataatatacatggctttaatttttactgtgtgtatagctacatgatgaaattaattaaatattaagaggta

SEQ ID NO: 191812 - DNA, 878 bp, Homo sapiens
  Payload ID: 17905
  Gene Name: TRAF family member-associated NFKB activator
  ENST ID: ENST00000402568
  CDS Start-End: 142-861
gtggaggtgaagagttaatggctccgcgcgcaggcactgccctctgaactggaacaaaatgcaacttccggttggagtcactcggccaggcgccggcgacctgaggggagagggaacgcagctgaaagcgtgaactgtgagatgcttttgacaagttataataagggagagatggtagtaaaggaagtgaagaagcgacgtgaaattgaaggaaaagaaaatgacctgccttcttaccgcggttggaatacacacccaaacgagagacctgtcatttactccatcctttatagtgatgctacaggacgaagaggaatggataaaaacattggcgagcaactcaataaagcgtatgaagccttccggcaggcatgcatggatagagattctgcagtaaaagaattacagcaaaagcagactgagaactatgagcagagaatacgtgaacaacaggaacagctgtcacttcaacagactattattgacaagctaaaatctcagttacttcttgtgaattccactcaagataacaattatggctgtgttcctctgcttgaagacagtgaaacaagaaagaataatttgactcttgatcagccacaagataaagtgatttcaggaatagcaagagaaaaactaccaaaggtaagaagacaagaggtttcttctcctagaaaagaaacttcagcaaggagtcttggcagtcctttgctccatgaaaggggtaatatagagaagactttctgggatctgaaagaagaatttcataaaatatgcatgctagcaaaagcacagaaagaccacttaagcaaacttaatataccagacactgcaactgcccatttggaagccctttcctaatcaagacagtgactcgg

SEQ ID NO: 191813 - DNA, 875 bp, Homo sapiens
  Payload ID: 17905
  Gene Name: TRAF family member-associated NFKB activator
  ENST ID: ENST00000406287
  CDS Start-End: 142-858
gtggaggtgaagagttaatggctccgcgcgcaggcactgccctctgaactggaacaaaatgcaacttccggttggagtcactcggccaggcgccggcgacctgaggggagagggaacgcagctgaaagcgtgaactgtgagatgcttttgacaagttataataagggagagatggtagtaaaggaagtgaagaagcgacgtgaaattgaaggaaaagaaaatgacctgccttcttaccgcggttggaatacacacccaaacgagagacctgtcatttactccatcctttatagtgatgctacaggacgaagaggaatggataaaaacattggcgagcaactcaataaagcgtatgaagccttccggcaggcatgcatggatagagattctgcagtaaaagaattacagcaaaagactgagaactatgagcagagaatacgtgaacaacaggaacagctgtcacttcaacagactattattgacaagctaaaatctcagttacttcttgtgaattccactcaagataacaattatggctgtgttcctctgcttgaagacagtgaaacaagaaagaataatttgactcttgatcagccacaagataaagtgatttcaggaatagcaagagaaaaactaccaaaggtaagaagacaagaggtttcttctcctagaaaagaaacttcagcaaggagtcttggcagtcctttgctccatgaaaggggtaatatagagaagactttctgggatctgaaagaagaatttcataaaatatgcatgctagcaaaagcacagaaagaccacttaagcaaacttaatataccagacactgcaactgcccatttggaagccctttcctaatcaagacagtgactcgg

SEQ ID NO: 191814 - DNA, 2155 bp, Homo sapiens
  Payload ID: 17905
  Gene Name: TRAF family member-associated NFKB activator
  ENST ID: ENST00000405852
  CDS Start-End: 98-1324
ggcgccggcgacctgaggggagagggaacgcagctgaaagcgtgaactacctgtcatttactccatcctttatagtgatgctacaggacgaagaggaatggataaaaacattggcgagcaactcaataaagcgtatgaagccttccggcaggcatgcatggatagagattctgcagtaaaagaattacagcaaaagactgagaactatgagcagagaatacgtgaacaacaggaacagctgtcacttcaacagactattattgacaagctaaaatctcagttacttcttgtgaattccactcaagataacaattatggctgtgttcctctgcttgaagacagtgaaacaagaaagaataatttgactcttgatcagccacaagataaagtgatttcaggaatagcaagagaaaaactaccaaaggtaagaagacaagaggtttcttctcctagaaaagaaacttcagcaaggagtcttggcagtcctttgctccatgaaaggggtaatatagagaagactttctgggatctgaaagaagaatttcataaaatatgcatgctagcaaaagcacagaaagaccacttaagcaaacttaatataccagacactgcaactgaaacacagtgctctgtgcctatacagtgtacggataaaacagataaacaagaagcgctgtttaagcctcaggctaaagatgatataaatagaggtgcaccatccatcacatctgtcacaccaagaggactgtgcagagatgaggaagacacctcttttgaatcactttctaaattcaatgtcaagtttccacctatggacaatgactcaactttcttacatagcactccagagagacccggcatccttagtcctgccacgtctgaggcagtgtgccaagagaaatttaatatggagttcagagacaacccagggaactttgttaaaacagaagaaactttatttgaaattcagggaattgaccccatagcttcagctatacaaaaccttaaaacaactgacaaaacaaagccctcaaatctcgtaaacacttgtatcaggacaactctggatagagctgcgtgtttgccacctggagaccataatgcattatatgtaaatagcttcccacttctggacccatctgatgcaccttttccctcactcgattccccgggaaaagcaatccgaggaccacagcagtctgtgcattcatgtttcagtagatggcaccctgcattgtacatttgctttctatactacagcaagggaaacagctgcccatttggaagccctttcctaatcaagacagtgactcggtggtactaagtggcacagactcagaactgcatatacctcgagtatgtgaattctgtcaagcagttttcccaccatccattacatccaggggggatttccttcggcatcttaattcacacttcaatggagagacttaagacacatttgaaaacagacatatcaagttctatgtgatgattttgggtttttaatactataaatacttgattgtaaactaaattcaagatcatttataggaaaatctagtttcacagctatttgaatttttttctggatttactatataactcttattttttaaaagatcattctgttctttcaaggagaaataagcctaaaagaagaaaaacaaaaaaaattctgtataaaactgtaatcctttgtattcatgtttacagtgctattactataattcaaaattatgtatgtgacttagagttatataatcataatttatgtttatttcaaatatctaagtttattgcttggatttctagtgagagctgttgaatttggtgatgtcaaatgtttctagggtttttttagtttgtttttattgaaaaatttaattatttatgctataggtgatattctctttgaataaacctataatagaaaatagcagacaacataaacatctttgtaaatatcaaacctaatacatttcttgtccagtgataaaacaactggtagaattatttaaacactttagatttttaaataatatacatggctttaatttttactgtgtgtatagctacatgatgaaattaattaaatattaagaggtacttatgttgtgatcatttgtatgtcctttgttcctgagtaaaaaaaaaa

SEQ ID NO: 191815 - DNA, 555 bp, Homo sapiens
  Payload ID: 17905
  Gene Name: TRAF family member-associated NFKB activator
  Uniprot ID: Q92844
  ENST ID: ENST00000403609
  CDS Start-End: 43-402
atttactccatcctttatagtgatgctacaggacgaagaggaatggataaaaacattggcgagcaactcaataaagcgtatgaagccttccggcaggcatgcatggatagagattctgcagtaaaagaattacagcaaaagactgagaactatgagcagagaatacgtgaacaacaggaacagctgtcacttcaacagactattattgacaagctaaaatctcagttacttcttgtgaattccactcaagataacaattatggctgtgttcctctgcttgaagacagtgaaacaagaaagaataatttgactcttgatcagccacaagataaagtgatttcaggaatagcaagagaaaaactaccaaaggtagacattgcttctgcagaaagcagcatttaaatgctgatgcgtgacatagcttcctcattttatttttctgaagtgatctgctggaattccaaacagaagttccatatatacaaatatgtggcttaaatatttctaaatagaagaactattttcaagtaaaataaaggctgaggttttgtattt

SEQ ID NO: 191816 - DNA, 727 bp, Homo sapiens
  Payload ID: 17905
  Gene Name: TRAF family member-associated NFKB activator
  ENST ID: ENST00000439442
  CDS Start-End: 1-597
ttacatagcactccagagagacccggcatccttagtcctgccacgtctgaggcagtgtgccaagagaaatttaatatggagttcagagacaacccagggaactttgttaaaacagaagaaactttatttgaaattcagggaattgaccccatagcttcagctatacaaaaccttaaaacaactgacaaaacaaagccctcaaatctcgtaaacacttgtatcaggacaactctggatagagctgcgtgtttgccacctggagaccataatgcattatatgtaaatagcttcccacttctggacccatctgatgcaccttttccctcactcgattccccgggaaaagcaatccgaggaccacagcagatggcaccctgcattgtacatttgctttctatactacagcaagggaaacagctgcccatttggaagccctttcctaatcaagacagtgactcggtggtactaagtggcacagactcagaactgcatatacctcgagtatgtgaattctgtcaagcagttttcccaccatccattacatccaggggggatttccttcggcatcttaattcacacttcaatggagagacttaagacacatttgaaaacagacatatcaagttctatgtgatgattttgggtttttaatactataaatacttgattgtaaactaaattcaagatcatttataggaaaatctagtttcacagctatttgaatttt

SEQ ID NO: 191817 - DNA, 762 bp, Homo sapiens
  Payload ID: 17905
  Gene Name: TRAF family member-associated NFKB activator
  ENST ID: ENST00000457887
  CDS Start-End: 129-515
aatgcaacttccggttggagtcactcggccaggcgccggcgacctgaggggagagggaacgcagctgaaagcgtgaactacctgtcatttactccatcctttatagtgatgctacaggacgaagaggaatggataaaaacattggcgagcaactcaataaagcgtatgaagccttccggcaggcatgcatggatagagattctgcagtaaaagaattacagcaaaagactgagaactatgagcagagaatacgtgaacaacaggaacagctgtcacttcaacagactattattgacaagctaaaatctcagttacttcttgtgaattccactcaagataacaattatggctgtgttcctctgcttgaagacagtgaaacaagaaagaataatttgactcttgatcagccacaagataaagtgatttcaggaatagcaagagaaaaactaccaaagctgtatccagtgcttgacttcactataacatcttttgtctcagtatatgtagactggtaaggaaatattcaacctcagttcctcctttaacatttcattcttagttctcaaaaatctaaaagacaagaggtttcttctcctagaaaagaaacttcagcaaggagtcttggcagtcctttgctccatgaaaggggtaatatagagaagactttctgggatctgaaagaagaatttcataaaatatgcatgctagcaaaagcacagaaagaccacttaagcaaacttaatataccagacactgcaactg

SEQ ID NO: 191818 - DNA, 564 bp, Homo sapiens
  Payload ID: 17905
  Gene Name: TRAF family member-associated NFKB activator
  ENST ID: ENST00000456358
  CDS Start-End: 69-564
atagcatcgtcggcctctgccccaacggcttcaagggagggactcgtcccggctgctttgcccgggaaatgggggtggaagggcctgcggtgtcgagacctgtcatttactccatcctttatagtgatgctacaggacgaagaggaatggataaaaacattggcgagcaactcaataaagcgtatgaagccttccggcaggcatgcatggatagagattctgcagtaaaagaattacagcaaaagactgagaactatgagcagagaatacgtgaacaacaggaacagctgtcacttcaacagactattattgacaagctaaaatctcagttacttcttgtgaattccactcaagataacaattatggctgtgttcctctgcttgaagacagtgaaacaagaaagaataatttgactcttgatcagccacaagataaagtgatttcaggaatagcaagagaaaaactaccaaaggtaagaagacaagaggtttcttctcctagaaaagaaacttcagcaaggagtcttggcagtcctttgctccatgaaaggggtaatatagaga

SEQ ID NO: 191819 - DNA, 600 bp, Homo sapiens
  Payload ID: 17905
  Gene Name: TRAF family member-associated NFKB activator
  ENST ID: ENST00000432002
  CDS Start-End: 187-600
acttcaacataagggagagctctggacagtttgagcagcattgttagagcctgtggaaaacactttacaactgtgtaactgtcttcatctttacagaggaatagtctacaaaggaagacttgtaacctggagaagagacctgtcatttactccatcctttatagtgatgctacaggacgaagaggaatggataaaaacattggcgagcaactcaataaagcgtatgaagccttccggcaggcatgcatggatagagattctgcagtaaaagaattacagcaaaagcagactgagaactatgagcagagaatacgtgaacaacaggaacagctgtcacttcaacagactattattgacaagctaaaatctcagttacttcttgtgaattccactcaagataacaattatggctgtgttcctctgcttgaagacagtgaaacaagaaagaataatttgactcttgatcagccacaagataaagtgatttcaggaatagcaagagaaaaactaccaaaggtaagaagacaagaggtttcttctcctagaaaagaaacttcagcaaggagtcttggcagtcctttgctccatgaaaggggtaat

SEQ ID NO: 191820 - DNA, 550 bp, Homo sapiens
  Payload ID: 17905
  Gene Name: TRAF family member-associated NFKB activator
  ENST ID: ENST00000440506
  CDS Start-End: 236-550
aagagccctgggctgggtggggcagggcggaagggccctggccttgttgggtggaggtgaagagttaatggctccgcgcgcaggcactgccctctgaactggaacaaaatgcaacttccggttggagtcactcggccaggcgccggcgacctgaggggagagggaacgcagctgaaagcgtgaactacctgtcatttactccatcctttatagtgatgctacaggacgaagaggaatggataaaaacattggcgagcaactcaataaagcgtatgaagccttccggcaggcatgcatggatagagattctgcagtaaaagaattacagcaaaagactgagaactatgagcagagaatacgtgaacaacaggaacagctgtcacttcaacagactattattgacaagctaaaatctcagttacttcttgtgaattccactcaagataacaattatggctgtgttcctctgcttgaagacagtgaaacaagaaagaataatttgactcttgatcagccacaagataaagtgatttcaggaatagcaagagaa

SEQ ID NO: 191821 - DNA, 533 bp, Homo sapiens
  Payload ID: 17905
  Gene Name: TRAF family member-associated NFKB activator
  ENST ID: ENST00000441987
  CDS Start-End: 109-219
actcggccaggcgccggcgacctgaggggagagggaacgcagctgaaagcgtgaactgtacctgtcatttactccatcctttatagtgatgctacaggacgaagaggaatggataaaaacattggcgagcaactcaataaagcgtatgaagccttccggcaggcatgcatggatagagattctgcagtaaaagaattacagcaaaagtcactgcaataacatagcaaaattaatggattaacaatataagggaaactggcatttaagacaccaaaggtcaactatattctcttaatttcttaaaacttagtggagaagtttctgactgagaactatgagcagagaatacgtgaacaacaggaacagctgtcacttcaacagactattattgacaagctaaaatctcagttacttcttgtgaattccactcaagataacaattatggctgtgttcctctgcttgaagacagtgaaacaagaaagaataatttgactcttgatcagccacaagataaagtgatttcaggaatagc

SEQ ID NO: 191822 - DNA, 762 bp, Homo sapiens
  Payload ID: 17905
  Gene Name: TRAF family member-associated NFKB activator
  ENST ID: ENST00000429217
  CDS Start-End: 193-762
gttgggtggaggtgaagagttaatggctccgcgcgcaggcactgccctctgaactggaacaaaatgcaacttccggttggagtcactcggccaggcgccggcgacctgaggggagagggaacgcagctgaaagcgtgaactgtacctgtcatttactccatcctttatagtgatgctacaggacgaagaggaatggataaaaacattggcgagcaactcaataaagcgtatgaagccttccggcaggcatgcatggatagagattctgcagtaaaagaattacagcaaaagcagactgagaactatgagcagagaatacgtgaacaacaggaacagctgtcacttcaacagactattattgacaagctaaaatctcagttacttcttgtgaattccactcaagataacaattatggctgtgttcctctgcttgaagacagtgaaacaagaaagaataatttgactcttgatcagccacaagataaagtgatttcaggaatagcaagagaaaaactaccaaaggtaagaagacaagaggtttcttctcctagaaaagaaacttcagcaaggagtcttggcagtcctttgctccatgaaaggggtaatatagagaagactttctgggatctgaaagaagaatttcataaaatatgcatgctagcaaaagcacagaaagaccacttaagcaaacttaatataccagacactgcaactgaaacacagtgctctgtgcctatacagtgtacggataaaacagataaa

SEQ ID NO: 191823 - DNA, 1702 bp, Homo sapiens
  Payload ID: 17905
  Gene Name: TRAF family member-associated NFKB activator
  ENST ID: ENST00000437623
  CDS Start-End: 1-828
gtaagaagacaagaggtttcttctcctagaaaagaaacttcagcaaggagtcttggcagtcctttgctccatgaaaggggtaatatagagaagactttctgggatctgaaagaagaatttcataaaatatgcatgctagcaaaagcacagaaagaccacttaagcaaacttaatataccagacactgcaactgaaacacagtgctctgtgcctatacagtgtacggataaaacagataaacaagaagcgctgtttaagcctcaggctaaagatgatataaatagaggtgcaccatccatcacatctgtcacaccaagaggactgtgcagagatgaggaagacacctcttttgaatcactttctaaattcaatgtcaagtttccacctatggacaatgactcaactttcttacatagcactccagagagacccggcatccttagtcctgccacgtctgaggcagtgtgccaagagaaatttaatatggagttcagagacaacccagggaactttgttaaaacagaagaaactttatttgaaattcagggaattgaccccatagcttcagctatacaaaaccttaaaacaactgacaaaacaaagccctcaaatctcgtaaacacttgtatcaggacaactctggatagagctgcgtgtttgccacctggagaccataatgcattatatgtaaatagcttcccacttctggacccatctgatgcaccttttccctcactcgattccccgggaaaagcaatccgaggaccacagcagcaagggaaacagctggtatgtgattacaacttgatggaaaagtattcagcttaaaaaattcaggagaattagtgttgagttgtcacaagacatggggcataagcccatttggaagccctttcctaatcaagacagtgactcggtggtactaagtggcacagactcagaactgcatatacctcgagtatgtgaattctgtcaagcagttttcccaccatccattacatccaggggggatttccttcggcatcttaattcacacttcaatggagagacttaagacacatttgaaaacagacatatcaagttctatgtgatgattttgggtttttaatactataaatacttgattgtaaactaaattcaagatcatttataggaaaatctagtttcacagctatttgaatttttttctggatttactatataactcttattttttaaaagatcattctgttctttcaaggagaaataagcctaaaagaagaaaaacaaaaaaaattctgtataaaactgtaatcctttgtattcatgtttacagtgctattactataattcaaaattatgtatgtgacttagagttatataatcataatttatgtttatttcaaatatctaagtttattgcttggatttctagtgagagctgttgaatttggtgatgtcaaatgtttctagggtttttttagtttgtttttattgaaaaatttaattatttatgctataggtgatattctctttgaataaacctataatagaaaatagcagacaacataaacatctttgtaaatatcaaacctaatacatttcttgtccagtgataaaacaactggtagaattatttaaacactttagatttttaaataatatacatggctttaatttttactgtgtgtatagctacatgatgaaattaattaaatattaa

SEQ ID NO: 191824 - DNA, 576 bp, Homo sapiens
  Payload ID: 17905
  Gene Name: TRAF family member-associated NFKB activator
  ENST ID: ENST00000432692
  CDS Start-End: 109-486
actcggccaggcgccggcgacctgaggggagagggaacgcagctgaaagcgtgaactgtacctgtcatttactccatcctttatagtgatgctacaggacgaagaggaatggataaaaacattggcgagcaactcaataaagcgtatgaagccttccggcaggcatgcatggatagagattctgcagtaaaagaattacagcaaaagactgagaactatgagcagagaatacgtgaacaacaggaacagctgtcacttcaacagactattattgacaagctaaaatctcagttacttcttgtgaattccactcaagataacaattatggctgtgttcctctgcttgaagacagtgaaacaagaaagaataatttgactcttgatcagccacaagataaagtgatttcaggaatagcaagagaaaaactaccaaagcctgagactcctcacttctgtcctcagctcttgcttctcatcttatcctgagccgtaagaagacaagaggtttcttctcctagaaaagaaacttcagcaaggagtcttggcagtcctttgctccatgaaaggggtaatata

SEQ ID NO: 191825 - DNA, 2028 bp, Homo sapiens
  Payload ID: 17906
  Gene Name: TRAF interacting protein
  Uniprot ID: Q9BWF2
  ENST ID: ENST00000331456
  CDS Start-End: 115-1524
aggaagtcgtgctgcggagccaaatttgaagcaagcggaggcgcgggggcgcgtctacgaagccggacctgtagcagtttctttggctgcctgggccccttgagtccagccatcatgcctatccgtgctctgtgcactatctgctccgacttcttcgatcactcccgcgacgtggccgccatccactgcggccacaccttccacttgcagtgcctaattcagtggtttgagacagcaccaagtcggacctgcccacagtgccgaatccaggttggcaaaagaaccattatcaataagctcttctttgatcttgcccaggaggaggagaatgtcttggatgcagaattcttaaagaatgaactggacaatgtcagagcccagctttcccagaaagacaaggagaaacgagacagccaggtcatcatcgacactctgcgggatacgctggaagaacgcaatgctactgtggtatctctgcagcaggccttgggcaaggccgagatgctgtgctccacactgaaaaagcagatgaagtacttagagcagcagcaggatgagaccaaacaagcacaagaggaggcccgccggctcaggagcaagatgaagaccatggagcagattgagcttctactccagagccagcgccctgaggtggaggagatgatccgagacatgggtgtgggacagtcagcggtggaacagctggctgtgtactgtgtgtctctcaagaaagagtacgagaatctaaaagaggcacggaaggcctcaggggaggtggctgacaagctgaggaaggatttgttttcctccagaagcaagttgcagacagtctactctgaattggatcaggccaagttagaactgaagtcagcccagaaggacttacagagtgctgacaaggaaatcatgagcctgaaaaagaagctaacgatgctgcaggaaaccttgaacctgccaccagtggccagtgagactgtcgaccgcctggttttagagagcccagcccctgtggaggtgaatctgaagctccgccggccatccttccgtgatgatattgatctcaatgctacctttgatgtggatactcccccagcccggccctccagctcccagcatggttactacgaaaaactttgcctagagaagtcacactccccaattcaggatgtccccaagaagatatgcaaaggccccaggaaggagtcccagctctcactgggtggccagagctgtgcaggagagccagatgaggaactggttggtgccttccctatttttgtccggaatgccatcctaggccagaaacagcccaagaggcccaggtcagagtcctcttgcagcaaagatgtggtaaggacaggcttcgatgggctcggtggccggacaaaattcatccagcctactgacacagtcatgatccgcccattgcctgttaagcccaagaccaaggttaagcagagggtgagggtgaagacagtgccttctctcttccaggccaagctggacaccttcctgtggtcgtgagaacagtgagtctgaccaatggccagacacatgcctgcaacttgtaggtcaaggactgtccaggcaggggttttgtggacagagccccactttcgggaccagcctgaggtgtaagggcagacaaacaggtgagggtgagtgtggcacccagagactgctcttcctgccctcaccctgccccactcctacgactgggagctgacatgaccagcccactgatcctgtcagcaggtcctgctcctgttgccaggctcctgtttatagccatgatcagatgtggtcagactctttctgggcctggagaccacggtcacttgttgactgtctctgtggaccagagtgcttgaggcatctcaggcagcctcagcccaagcttctacctgcctttgacttgcttctaggcatagcctgggccaagcagggtggggaatggaggatagcatgggatgtatggagaggatggaagattttcatgtaaaataaaattaaaaaaaaaaaacaatc

SEQ ID NO: 191826 - DNA, 820 bp, Homo sapiens
  Payload ID: 17906
  Gene Name: TRAF interacting protein
  ENST ID: ENST00000482582
  CDS Start-End: 22-820
ggccccttgagtccagccatcatgcctatccgtgctctgtgcactatctgctccgacttcttcgatcactcccgcgacgtggccgccatccactgcggccacaccttccacttgcagtgcctaattcagtggtttgagacagcaccaagtcggacctgcccacagtgccgaatccaggaggaggagaatgtcttggatgcagaattcttaaagaatgaactggacaatgtcagagcccagctttcccagaaagacaaggagaaacgagacagccaggtcatcatcgacactctgcgggatacgctggaagaacgcaatgctactgtggtatctctgcagcaggccttgggcaaggccgagatgctgtgctccacactgaaaaagcagatgaagtacttagagcagcagcaggatgagaccaaacaagcacaagaggaggcccgccggctcaggagcaagatgaagaccatggagcagattgagcttctactccagagccagcgccctgaggtggaggagatgatccgagacatgggtgtgggacagtcagcggtggaacagctggctgtgtactgtgtgtctctcaagaaagagtacgagaatctaaaagaggcacggaaggcctcaggggaggtggctgacaagctgaggaaggatttgttttcctccagaagcaagttgcagacagtctactctgaattggatcaggccaagttagaactgaagtcagcccagaaggacttacagagtgctgacaaggaaatcatgagcctgaaaaagaagctaacgatgctgcaggaaaccttgaacctgccaccag

SEQ ID NO: 191827 - DNA, 577 bp, Homo sapiens
  Payload ID: 17906
  Gene Name: TRAF interacting protein
  ENST ID: ENST00000482243
  CDS Start-End: 112-577
aagtcgtgctgcggagccaaatttgaagcaagcggaggcgcgggggcgcgtctacgaagccggacctgtagcagtttctttggctgcctgggccccttgagtccagccatcatgcctatccgtgctctgtgcactatctgctccgacttcttcgatcactcccgcgacgtggccgccatccactgcggccacaccttccacttgcagtgcctaattcagtggtttgagacagcaccaagtcggacctgcccacagtgccgaatccaggtgagagttggcaaaagaaccattatcaataagctcttctttgatcttgcccaggaggaggagaatgtcttggatgcagaattcttaaagaatgaactggacaatgtcagagcccagctttcccagaaagacaaggagaaacgagacagccaggtcatcatcgacactctgcgggatacgctggaagaacgcaatgctactgtggtatctctgcagcaggccttgggcaaggccgagatgctgtgctccacactgaaaaagcagatgaagtacttagagcagcagcaggatgagaccaaacaagcacaag

SEQ ID NO: 191828 - DNA, 994 bp, Homo sapiens
  Payload ID: 17906
  Gene Name: TRAF interacting protein
  ENST ID: ENST00000473195
  CDS Start-End: 97-396
gccaaatttgaagcaagcggaggcgcgggggcgcgtctacgaagccggacctgtagcagtttctttggctgcctgggccccttgagtccagccatcatgcctatccgtgctctgtgcactatctgctccgacttcttcgatcactcccgcgacgtggccgccatccactgcggccacaccttccacttgcagtgcctaattcagtggtttgagacagcaccaagtcggacctgcccacagtgccgaatccaggttggcaaaagaaccattatcaataagctcttctttgatcttgcccaggaggaggagaatgtcttggatgcagaattcttaaagaatgaactggacaatgtcagagcccagctttcccagaaagttgcagacagtctactctgaattggatcaggccaagttagaactgaagtcagcccagaaggacttacagagtgctgacaaggaaatcatgagcctgaaaaagaagctaacgatgctgcaggaaaccttgaacctgccaccagtggccagtgagactgtcgaccgcctggttttagagaggtttgttgagccttgggcggtacaggggtcacaaggtgggagagctttctgctccccaattcaggatgtccccaagaagatatgcaaaggccccaggaaggagtcccagctctcactgggtggccagagctgtgcaggagagccagatgaggaactggttggtgccttccctatttttgtccggaatgccatcctaggccagaaacagcccaagaggcccaggtcagagtcctcttgcagcaaagatgtggtaaggacaggcttcgatgggctcggtggccggacaaaattcatccagcctactgacacagtcatgatccgcccattgcctgttaagcccaagaccaaggttaagcagagggtgagggtgaagacagtgccttctctcttccaggccaagctggacaccttcctgtggtcgtgagaacagtgagtctga

SEQ ID NO: 191829 - DNA, 1145 bp, Homo sapiens
  Payload ID: 17906
  Gene Name: TRAF interacting protein
  ENST ID: ENST00000469027
  CDS Start-End: 122-976
ccgctccaggaagtcgtgctgcggagccaaatttgaagcaagcggaggcgcgggggcgcgtctacgaagccggacctgtagcagtttctttggctgcctgggccccttgagtccagccatcatgcctatccgtgctctgtgcactatctgctccgacttcttcgatcactcccgcgacgtggccgccatccactgcggccacaccttccacttgcagtgcctaattcagtggtttgagacagcaccaagtcggacctgcccacagtgccgaatccaggttggcaaaagaaccattatcaataagctcttctttgatcttgcccaggaggaggagaatgtcttggatgcagaattcttaaagttgcagacagtctactctgaattggatcaggccaagttagaactgaagtcagcccagaaggacttacagagtgctgacaaggaaatcatgagcctgaaaaagaagctaacgatgctgcaggaaaccttgaacctgccaccagtggccagtgagactgtcgaccgcctggttttagagagcccagcccctgtggaggtgaatctgaagctccgccggccatccttccgtgatgatattgatctcaatgctacctttgatgtggatactcccccagcccggccctccagctcccagcatggttactacgaaaaactttgcctagagaagtcacactccccaattcaggatgtccccaagaagatatgcaaaggccccaggaaggagtcccagctctcactgggtggccagagctgtgcaggagagccagatgaggaactggttggtgccttccctatttttgtccggaatgccatcctaggccagaaacagcccaagaggcccaggtcagagtcctcttgcagcaaagatgtggtaaggacaggcttcgatgggctcggtggccggacaaaattcatccagcctgtatccttttcctgtgatgttgagctgagctgaactgtggagcccatactatgcctcacctatacccccagcctgccagtgccaacagcctcaggtgtgcagtgctgggcctcattctgtgtatcagcgccgcccacccccggctctgagcctttcttgccctgcattgcagtcctttctcgccctgcattgcagtcctttc

SEQ ID NO: 191830 - DNA, 4059 bp, Homo sapiens
  Payload ID: 17907
  Gene Name: TRAF2 and NCK interacting kinase
  Uniprot ID: Q9UKE5
  ENST ID: ENST00000284483
  CDS Start-End: 1-4059
atggcgagcgactccccggctcgaagcctggatgaaatagatctctcggctctgagggaccccgcagggatctttgaattggtggaacttgttggaaatggaacatacgggcaagtttataagggtcgtcatgtcaaaacgggccagcttgcagccatcaaggttatggatgtcacaggggatgaagaggaagaaatcaaacaagaaattaacatgttgaagaaatattctcatcaccggaatattgctacatactatggtgcttttatcaaaaagaacccaccaggcatggatgaccaactttggttggtgatggagttttgtggtgctggctctgtcaccgacctgatcaagaacacaaaaggtaacacgttgaaagaggagtggattgcatacatctgcagggaaatcttacgggggctgagtcacctgcaccagcataaagtgattcatcgagatattaaagggcaaaatgtcttgctgactgaaaatgcagaagttaaactagtggactttggagtcagtgctcagcttgatcgaacagtgggcaggaggaatactttcattggaactccctactggatggcaccagaagttattgcctgtgatgaaaacccagatgccacatatgatttcaagagtgacttgtggtctttgggtatcaccgccattgaaatggcagaaggtgctccccctctctgtgacatgcaccccatgagagctctcttcctcatcccccggaacccagcgcctcggctgaagtctaagaagtggtcaaaaaaattccagtcatttattgagagctgcttggtaaagaatcacagccagcgaccagcaacagaacaattgatgaagcatccatttatacgagaccaacctaatgagcgacaggtccgcattcaactcaaggaccatattgatagaacaaagaagaagcgaggagaaaaagatgagacagagtatgagtacagtggaagtgaggaagaagaggaggagaatgactcaggagagcccagctccatcctgaatctgccaggggagtcgacgctgcggagggactttctgaggctgcagctggccaacaaggagcgttctgaggccctacggaggcagcagctggagcagcagcagcgggagaatgaggagcacaagcggcagctgctggccgagcgtcagaagcgcatcgaggagcagaaagagcagaggcggcggctggaggagcaacaaaggcgagagaaggagctgcggaagcagcaggagagggagcagcgccggcactatgaggagcagatgcgccgggaggaggagaggaggcgtgcggagcatgaacaggaatacatcaggcgacagttagaggaggagcagagacagttagagatcttgcagcagcagctactgcatgaacaagctctacttctggaatataagcgcaaacaattggaagaacagagacaagcagaaagactgcagaggcagctaaagcaagaaagagactacttagtttcccttcagcatcagcggcaggagcagaggcctgtggagaagaagccactgtaccattacaaagaaggaatgagtcctagtgagaagccagcatgggccaaggaggtagaagaacggtcaaggctcaaccggcaaagttcccctgccatgcctcacaaggttgccaacaggatatctgaccccaacctgcccccaaggtcggagtccttcagcattagtggagttcagcctgctcgaacaccccccatgctcagaccagtcgatccccagatcccacatctggtagctgtaaaatcccagggacctgccttgaccgcctcccagtcagtgcacgagcagcccacaaagggcctctctgggtttcaggaggctctgaacgtgacctcccaccgcgtggagatgccacgccagaactcagatcccacctcggaaaatcctcctctccccactcgcattgaaaagtttgaccgaagctcttggttacgacaggaagaagacattccaccaaaggtgcctcaaagaacaacttctatatccccagcattagccagaaagaattctcctgggaatggtagtgctctgggacccagactaggatctcaacccatcagagcaagcaaccctgatctccggagaactgagcccatcttggagagccccttgcagaggaccagcagtggcagttcctccagctccagcacccctagctcccagcccagctcccaaggaggctcccagcctggatcacaagcaggatccagtgaacgcaccagagttcgagccaacagtaagtcagaaggatcacctgtgctcccccatgagcctgcgaaggtgaaaccagaagaatccagggacattacccggcccagtcgaccagctgatctgacggcattagccaaagaactaagagaactccggattgaagaaacaaaccgcccaatgaagaaggtgactgattactcctcctccagtgaggagtcagaaagtagcgaggaagaggaggaagatggagagagcgagacccatgatgggacagtggctgtcagcgacatacccagactgataccaacaggagctccaggcagcaacgagcagtacaatgtgggaatggtggggacgcatgggctggagacctctcatgcggacagtttcagcggcagtatttcaagagaaggaaccttgatgattagagagacgtctggagagaagaagcgatctggccacagtgacagcaatggctttgctggccacatcaacctccctgacctggtgcagcagagccattctccagctggaaccccgactgagggactggggcgcgtctcaacccattcccaggagatggactctgggactgaatatggcatggggagcagcaccaaagcctccttcaccccctttgtggaccccagagtataccagacgtctcccactgatgaagatgaagaggatgaggaatcatcagccgcagctctgtttactagcgaacttcttaggcaagaacaggccaaactcaatgaagcaagaaagatttcggtggtaaatgtaaacccaaccaacattcggcctcatagcgacacaccagaaatcagaaaatacaagaaacgattcaactcagaaatactttgtgcagctctgtggggtgtaaaccttctggtggggactgaaaatggcctgatgcttttggaccgaagtgggcaaggcaaagtctataatctgatcaaccggaggcgatttcagcagatggatgtgctagagggactgaatgtccttgtgacaatttcaggaaagaagaataagctacgagtttactatctttcatggttaagaaacagaatactacataatgacccagaagtagaaaagaaacaaggctggatcactgttggggacttggaaggctgtatacattataaagttgttaaatatgaaaggatcaaatttttggtgattgccttaaagaatgctgtggaaatatatgcttgggctcctaaaccgtatcataaattcatggcatttaagtcttttgcagatctccagcacaagcctctgctagttgatctcacggtagaagaaggtcaaagattaaaggttatttttggttcacacactggtttccatgtaattgatgttgattcaggaaactcttatgatatctacataccatctcatattcagggcaatatcactcctcatgctattgtcatcttgcctaaaacagatggaatggaaatgcttgtttgctatgaggatgagggggtgtatgtaaacacctatggccggataactaaggatgtggtgctccaatggggagaaatgcccacgtctgtggcctacattcattccaatcagataatgggctggggcgagaaagctattgagatccggtcagtggaaacaggacatttggatggagtatttatgcataagcgagctcaaaggttaaagtttctatgtgaaagaaatgataaggtattttttgcatccgtgcgatctggaggaagtagccaagtgtttttcatgaccctcaacagaaattccatgatgaactggtaa

SEQ ID NO: 191831 - DNA, 4727 bp, Homo sapiens
  Payload ID: 17907
  Gene Name: TRAF2 and NCK interacting kinase
  Uniprot ID: Q9UKE5
  ENST ID: ENST00000341852
  CDS Start-End: 346-4176
attataacagccaatgcagccgccatccacgcacaagcaaagaagcatgtcccatttaaatacacccacgcagccccagcgcccttagccgatcggggcgctcagcccacacgcaccgctgctcggggcttggagatccgcgcaggctgggctcccggacccggcggaccgacgcgcggaggatcgggatccggcgctgtggggctggggtgggcgggggaggctgggcccggggcctctggcgcgacacccgcatgaggacgcgagtgaaatagaccaaggtggaatttccaagggaaaagcttcggggtggttttggtccatttctccagcgaagaagtagacatggcgagcgactccccggctcgaagcctggatgaaatagatctctcggctctgagggaccccgcagggatctttgaattggtggaacttgttggaaatggaacatacgggcaagtttataagggtcgtcatgtcaaaacgggccagcttgcagccatcaaggttatggatgtcacaggggatgaagaggaagaaatcaaacaagaaattaacatgttgaagaaatattctcatcaccggaatattgctacatactatggtgcttttatcaaaaagaacccaccaggcatggatgaccaactttggttggtgatggagttttgtggtgctggctctgtcaccgacctgatcaagaacacaaaaggtaacacgttgaaagaggagtggattgcatacatctgcagggaaatcttacgggggctgagtcacctgcaccagcataaagtgattcatcgagatattaaagggcaaaatgtcttgctgactgaaaatgcagaagttaaactagtggactttggagtcagtgctcagcttgatcgaacagtgggcaggaggaatactttcattggaactccctactggatggcaccagaagttattgcctgtgatgaaaacccagatgccacatatgatttcaagagtgacttgtggtctttgggtatcaccgccattgaaatggcagaaggtgctccccctctctgtgacatgcaccccatgagagctctcttcctcatcccccggaacccagcgcctcggctgaagtctaagaagtggtcaaaaaaattccagtcatttattgagagctgcttggtaaagaatcacagccagcgaccagcaacagaacaattgatgaagcatccatttatacgagaccaacctaatgagcgacaggtccgcattcaactcaaggaccatattgatagaacaaagaagaagcgaggagaaaaagatgagacagagtatgagtacagtggaagtgaggaagaagaggaggagaatgactcaggagagcccagctccatcctgaatctgccaggggagtcgacgctgcggagggactttctgaggctgcagctggccaacaaggagcgttctgaggccctacggaggcagcagctggagcagcagcagcgggagaatgaggagcacaagcggcagctgctggccgagcgtcagaagcgcatcgaggagcagaaagagcagaggcggcggctggaggagcaacaaaggcgagagaaggagctgcggaagcagcaggagagggagcagcgccggcactatgaggagcagatgcgccgggaggaggagaggaggcgtgcggagcatgaacaggaatataagcgcaaacaattggaagaacagagacaagcagaaagactgcagaggcagctaaagcaagaaagagactacttagtttcccttcagcatcagcggcaggagcagaggcctgtggagaagaagccactgtaccattacaaagaaggaatgagtcctagtgagaagccagcatgggccaaggagatcccacatctggtagctgtaaaatcccagggacctgccttgaccgcctcccagtcagtgcacgagcagcccacaaagggcctctctgggtttcaggaggctctgaacgtgacctcccaccgcgtggagatgccacgccagaactcagatcccacctcggaaaatcctcctctccccactcgcattgaaaagtttgaccgaagctcttggttacgacaggaagaagacattccaccaaaggtgcctcaaagaacaacttctatatccccagcattagccagaaagaattctcctgggaatggtagtgctctgggacccagactaggatctcaacccatcagagcaagcaaccctgatctccggagaactgagcccatcttggagagccccttgcagaggaccagcagtggcagttcctccagctccagcacccctagctcccagcccagctcccaaggaggctcccagcctggatcacaagcaggatccagtgaacgcaccagagttcgagccaacagtaagtcagaaggatcacctgtgctcccccatgagcctgcgaaggtgaaaccagaagaatccagggacattacccggcccagtcgaccagctagctacaaaaaagctatagatgaggatctgacggcattagccaaagaactaagagaactccggattgaagaaacaaaccgcccaatgaagaaggtgactgattactcctcctccagtgaggagtcagaaagtagcgaggaagaggaggaagatggagagagcgagacccatgatgggacagtggctgtcagcgacatacccagactgataccaacaggagctccaggcagcaacgagcagtacaatgtgggaatggtggggacgcatgggctggagacctctcatgcggacagtttcagcggcagtatttcaagagaaggaaccttgatgattagagagacgtctggagagaagaagcgatctggccacagtgacagcaatggctttgctggccacatcaacctccctgacctggtgcagcagagccattctccagctggaaccccgactgagggactggggcgcgtctcaacccattcccaggagatggactctgggactgaatatggcatggggagcagcaccaaagcctccttcaccccctttgtggaccccagagtataccagacgtctcccactgatgaagatgaagaggatgaggaatcatcagccgcagctctgtttactagcgaacttcttaggcaagaacaggccaaactcaatgaagcaagaaagatttcggtggtaaatgtaaacccaaccaacattcggcctcatagcgacacaccagaaatcagaaaatacaagaaacgattcaactcagaaatactttgtgcagctctgtggggtgtaaaccttctggtggggactgaaaatggcctgatgcttttggaccgaagtgggcaaggcaaagtctataatctgatcaaccggaggcgatttcagcagatggatgtgctagagggactgaatgtccttgtgacaatttcaggaaagaagaataagctacgagtttactatctttcatggttaagaaacagaatactacataatgacccagaagtagaaaagaaacaaggctggatcactgttggggacttggaaggctgtatacattataaagttgttaaatatgaaaggatcaaatttttggtgattgccttaaagaatgctgtggaaatatatgcttgggctcctaaaccgtatcataaattcatggcatttaagtcttttgcagatctccagcacaagcctctgctagttgatctcacggtagaagaaggtcaaagattaaaggttatttttggttcacacactggtttccatgtaattgatgttgattcaggaaactcttatgatatctacataccatctcatattcagggcaatatcactcctcatgctattgtcatcttgcctaaaacagatggaatggaaatgcttgtttgctatgaggatgagggggtgtatgtaaacacctatggccggataactaaggatgtggtgctccaatggggagaaatgcccacgtctgtggcctacattcattccaatcagataatgggctggggcgagaaagctattgagatccggtcagtggaaacaggacatttggatggagtatttatgcataagcgagctcaaaggttaaagtttctatgtgaaagaaatgataaggtattttttgcatccgtgcgatctggaggaagtagccaagtgtttttcatgaccctcaacagaaattccatgatgaactggtaacagaagagcacttggcacttatcttcatggcgttatttctaatttaaaagaacataactcatgtggacttatgccagtctagaggcagaatcagaaggcttggttgaacatatcgctttccctttttcctctccctccgcccctcccagtacagtccatctttcaatgttgcagcctggttgagaaggagagaaaaaggtggcaggaatttccaggagatccccaagaatgctgccttgtctgtggacaaagatggaccatgtgcccttcggaattagggatagaaacaaatattgtgtgctcttaacgattaagctgtgttatggtgggttttcaggtttttaccttttttctttacccctttactctgcaagaatggggaaagaatgcatactgcgaaaatgagtcttttaaattctgtctgcctactagttttaagtatatggtatgttgtaaaatttccaatgatgagagacagcacaataaatgtaccttatctccttaggctgaaggccataactacatagtggagtaatttaagaactctcttg

SEQ ID NO: 191832 - DNA, 3996 bp, Homo sapiens
  Payload ID: 17907
  Gene Name: TRAF2 and NCK interacting kinase
  Uniprot ID: Q9UKE5
  ENST ID: ENST00000357327
  CDS Start-End: 1-3996
atggcgagcgactccccggctcgaagcctggatgaaatagatctctcggctctgagggaccccgcagggatctttgaattggtggaacttgttggaaatggaacatacgggcaagtttataagggtcgtcatgtcaaaacgggccagcttgcagccatcaaggttatggatgtcacaggggatgaagaggaagaaatcaaacaagaaattaacatgttgaagaaatattctcatcaccggaatattgctacatactatggtgcttttatcaaaaagaacccaccaggcatggatgaccaactttggttggtgatggagttttgtggtgctggctctgtcaccgacctgatcaagaacacaaaaggtaacacgttgaaagaggagtggattgcatacatctgcagggaaatcttacgggggctgagtcacctgcaccagcataaagtgattcatcgagatattaaagggcaaaatgtcttgctgactgaaaatgcagaagttaaactagtggactttggagtcagtgctcagcttgatcgaacagtgggcaggaggaatactttcattggaactccctactggatggcaccagaagttattgcctgtgatgaaaacccagatgccacatatgatttcaagagtgacttgtggtctttgggtatcaccgccattgaaatggcagaaggtgctccccctctctgtgacatgcaccccatgagagctctcttcctcatcccccggaacccagcgcctcggctgaagtctaagaagtggtcaaaaaaattccagtcatttattgagagctgcttggtaaagaatcacagccagcgaccagcaacagaacaattgatgaagcatccatttatacgagaccaacctaatgagcgacaggtccgcattcaactcaaggaccatattgatagaacaaagaagaagcgaggagaaaaagatgagacagagtatgagtacagtggaagtgaggaagaagaggaggagaatgactcaggagagcccagctccatcctgaatctgccaggggagtcgacgctgcggagggactttctgaggctgcagctggccaacaaggagcgttctgaggccctacggaggcagcagctggagcagcagcagcgggagaatgaggagcacaagcggcagctgctggccgagcgtcagaagcgcatcgaggagcagaaagagcagaggcggcggctggaggagcaacaaaggcgagagaaggagctgcggaagcagcaggagagggagcagcgccggcactatgaggagcagatgcgccgggaggaggagaggaggcgtgcggagcatgaacaggaatataagcgcaaacaattggaagaacagagacaagcagaaagactgcagaggcagctaaagcaagaaagagactacttagtttcccttcagcatcagcggcaggagcagaggcctgtggagaagaagccactgtaccattacaaagaaggaatgagtcctagtgagaagccagcatgggccaaggaggtagaagaacggtcaaggctcaaccggcaaagttcccctgccatgcctcacaaggttgccaacaggatatctgaccccaacctgcccccaaggtcggagtccttcagcattagtggagttcagcctgctcgaacaccccccatgctcagaccagtcgatccccagatcccacatctggtagctgtaaaatcccagggacctgccttgaccgcctcccagtcagtgcacgagcagcccacaaagggcctctctgggtttcaggaggctctgaacgtgacctcccaccgcgtggagatgccacgccagaactcagatcccacctcggaaaatcctcctctccccactcgcattgaaaagtttgaccgaagctcttggttacgacaggaagaagacattccaccaaaggtgcctcaaagaacaacttctatatccccagcattagccagaaagaattctcctgggaatggtagtgctctgggacccagactaggatctcaacccatcagagcaagcaaccctgatctccggagaactgagcccatcttggagagccccttgcagaggaccagcagtggcagttcctccagctccagcacccctagctcccagcccagctcccaaggaggctcccagcctggatcacaagcaggatccagtgaacgcaccagagttcgagccaacagtaagtcagaaggatcacctgtgctcccccatgagcctgcgaaggtgaaaccagaagaatccagggacattacccggcccagtcgaccagctagctacaaaaaagctatagatgaggatctgacggcattagccaaagaactaagagaactccggattgaagaaacaaaccgcccaatgaagaaggtgactgattactcctcctccagtgaggagtcagaaagtagcgaggaagaggaggaagatggagagagcgagacccatgatgggacagtggctgtcagcgacatacccagactgataccaacaggagctccaggcagcaacgagcagtacaatgtgggaatggtggggacgcatgggctggagacctctcatgcggacagtttcagcggcagtatttcaagagaaggaaccttgatgattagagagacgtctggagagaagaagcgatctggccacagtgacagcaatggctttgctggccacatcaacctccctgacctggtgcagcagagccattctccagctggaaccccgactgagggactggggcgcgtctcaacccattcccaggagatggactctgggactgaatatggcatggggagcagcaccaaagcctccttcaccccctttgtggaccccagagtataccagacgtctcccactgatgaagatgaagaggatgaggaatcatcagccgcagctctgtttactagcgaacttcttaggcaagaacaggccaaactcaatgaagcaagaaagatttcggtggtaaatgtaaacccaaccaacattcggcctcatagcgacacaccagaaatcagaaaatacaagaaacgattcaactcagaaatactttgtgcagctctgtggggtgtaaaccttctggtggggactgaaaatggcctgatgcttttggaccgaagtgggcaaggcaaagtctataatctgatcaaccggaggcgatttcagcagatggatgtgctagagggactgaatgtccttgtgacaatttcaggaaagaagaataagctacgagtttactatctttcatggttaagaaacagaatactacataatgacccagaagtagaaaagaaacaaggctggatcactgttggggacttggaaggctgtatacattataaagttgttaaatatgaaaggatcaaatttttggtgattgccttaaagaatgctgtggaaatatatgcttgggctcctaaaccgtatcataaattcatggcatttaagtcttttgcagatctccagcacaagcctctgctagttgatctcacggtagaagaaggtcaaagattaaaggttatttttggttcacacactggtttccatgtaattgatgttgattcaggaaactcttatgatatctacataccatctcatattcagggcaatatcactcctcatgctattgtcatcttgcctaaaacagatggaatggaaatgcttgtttgctatgaggatgagggggtgtatgtaaacacctatggccggataactaaggatgtggtgctccaatggggagaaatgcccacgtctgtggcctacattcattccaatcagataatgggctggggcgagaaagctattgagatccggtcagtggaaacaggacatttggatggagtatttatgcataagcgagctcaaaggttaaagtttctatgtgaaagaaatgataaggtattttttgcatccgtgcgatctggaggaagtagccaagtgtttttcatgaccctcaacagaaattccatgatgaactggtaa

SEQ ID NO: 191833 - DNA, 6970 bp, Homo sapiens
  Payload ID: 17907
  Gene Name: TRAF2 and NCK interacting kinase
  Uniprot ID: Q9UKE5
  ENST ID: ENST00000436636
  CDS Start-End: 346-4428
attataacagccaatgcagccgccatccacgcacaagcaaagaagcatgtcccatttaaatacacccacgcagccccagcgcccttagccgatcggggcgctcagcccacacgcaccgctgctcggggcttggagatccgcgcaggctgggctcccggacccggcggaccgacgcgcggaggatcgggatccggcgctgtggggctggggtgggcgggggaggctgggcccggggcctctggcgcgacacccgcatgaggacgcgagtgaaatagaccaaggtggaatttccaagggaaaagcttcggggtggttttggtccatttctccagcgaagaagtagacatggcgagcgactccccggctcgaagcctggatgaaatagatctctcggctctgagggaccccgcagggatctttgaattggtggaacttgttggaaatggaacatacgggcaagtttataagggtcgtcatgtcaaaacgggccagcttgcagccatcaaggttatggatgtcacaggggatgaagaggaagaaatcaaacaagaaattaacatgttgaagaaatattctcatcaccggaatattgctacatactatggtgcttttatcaaaaagaacccaccaggcatggatgaccaactttggttggtgatggagttttgtggtgctggctctgtcaccgacctgatcaagaacacaaaaggtaacacgttgaaagaggagtggattgcatacatctgcagggaaatcttacgggggctgagtcacctgcaccagcataaagtgattcatcgagatattaaagggcaaaatgtcttgctgactgaaaatgcagaagttaaactagtggactttggagtcagtgctcagcttgatcgaacagtgggcaggaggaatactttcattggaactccctactggatggcaccagaagttattgcctgtgatgaaaacccagatgccacatatgatttcaagagtgacttgtggtctttgggtatcaccgccattgaaatggcagaaggtgctccccctctctgtgacatgcaccccatgagagctctcttcctcatcccccggaacccagcgcctcggctgaagtctaagaagtggtcaaaaaaattccagtcatttattgagagctgcttggtaaagaatcacagccagcgaccagcaacagaacaattgatgaagcatccatttatacgagaccaacctaatgagcgacaggtccgcattcaactcaaggaccatattgatagaacaaagaagaagcgaggagaaaaagatgagacagagtatgagtacagtggaagtgaggaagaagaggaggagaatgactcaggagagcccagctccatcctgaatctgccaggggagtcgacgctgcggagggactttctgaggctgcagctggccaacaaggagcgttctgaggccctacggaggcagcagctggagcagcagcagcgggagaatgaggagcacaagcggcagctgctggccgagcgtcagaagcgcatcgaggagcagaaagagcagaggcggcggctggaggagcaacaaaggcgagagaaggagctgcggaagcagcaggagagggagcagcgccggcactatgaggagcagatgcgccgggaggaggagaggaggcgtgcggagcatgaacaggaatacatcaggcgacagttagaggaggagcagagacagttagagatcttgcagcagcagctactgcatgaacaagctctacttctggaatataagcgcaaacaattggaagaacagagacaagcagaaagactgcagaggcagctaaagcaagaaagagactacttagtttcccttcagcatcagcggcaggagcagaggcctgtggagaagaagccactgtaccattacaaagaaggaatgagtcctagtgagaagccagcatgggccaaggaggtagaagaacggtcaaggctcaaccggcaaagttcccctgccatgcctcacaaggttgccaacaggatatctgaccccaacctgcccccaaggtcggagtccttcagcattagtggagttcagcctgctcgaacaccccccatgctcagaccagtcgatccccagatcccacatctggtagctgtaaaatcccagggacctgccttgaccgcctcccagtcagtgcacgagcagcccacaaagggcctctctgggtttcaggaggctctgaacgtgacctcccaccgcgtggagatgccacgccagaactcagatcccacctcggaaaatcctcctctccccactcgcattgaaaagtttgaccgaagctcttggttacgacaggaagaagacattccaccaaaggtgcctcaaagaacaacttctatatccccagcattagccagaaagaattctcctgggaatggtagtgctctgggacccagactaggatctcaacccatcagagcaagcaaccctgatctccggagaactgagcccatcttggagagccccttgcagaggaccagcagtggcagttcctccagctccagcacccctagctcccagcccagctcccaaggaggctcccagcctggatcacaagcaggatccagtgaacgcaccagagttcgagccaacagtaagtcagaaggatcacctgtgctcccccatgagcctgcgaaggtgaaaccagaagaatccagggacattacccggcccagtcgaccagctagctacaaaaaagctatagatgaggatctgacggcattagccaaagaactaagagaactccggattgaagaaacaaaccgcccaatgaagaaggtgactgattactcctcctccagtgaggagtcagaaagtagcgaggaagaggaggaagatggagagagcgagacccatgatgggacagtggctgtcagcgacatacccagactgataccaacaggagctccaggcagcaacgagcagtacaatgtgggaatggtggggacgcatgggctggagacctctcatgcggacagtttcagcggcagtatttcaagagaaggaaccttgatgattagagagacgtctggagagaagaagcgatctggccacagtgacagcaatggctttgctggccacatcaacctccctgacctggtgcagcagagccattctccagctggaaccccgactgagggactggggcgcgtctcaacccattcccaggagatggactctgggactgaatatggcatggggagcagcaccaaagcctccttcaccccctttgtggaccccagagtataccagacgtctcccactgatgaagatgaagaggatgaggaatcatcagccgcagctctgtttactagcgaacttcttaggcaagaacaggccaaactcaatgaagcaagaaagatttcggtggtaaatgtaaacccaaccaacattcggcctcatagcgacacaccagaaatcagaaaatacaagaaacgattcaactcagaaatactttgtgcagctctgtggggtgtaaaccttctggtggggactgaaaatggcctgatgcttttggaccgaagtgggcaaggcaaagtctataatctgatcaaccggaggcgatttcagcagatggatgtgctagagggactgaatgtccttgtgacaatttcaggaaagaagaataagctacgagtttactatctttcatggttaagaaacagaatactacataatgacccagaagtagaaaagaaacaaggctggatcactgttggggacttggaaggctgtatacattataaagttgttaaatatgaaaggatcaaatttttggtgattgccttaaagaatgctgtggaaatatatgcttgggctcctaaaccgtatcataaattcatggcatttaagtcttttgcagatctccagcacaagcctctgctagttgatctcacggtagaagaaggtcaaagattaaaggttatttttggttcacacactggtttccatgtaattgatgttgattcaggaaactcttatgatatctacataccatctcatattcagggcaatatcactcctcatgctattgtcatcttgcctaaaacagatggaatggaaatgcttgtttgctatgaggatgagggggtgtatgtaaacacctatggccggataactaaggatgtggtgctccaatggggagaaatgcccacgtctgtggcctacattcattccaatcagataatgggctggggcgagaaagctattgagatccggtcagtggaaacaggacatttggatggagtatttatgcataagcgagctcaaaggttaaagtttctatgtgaaagaaatgataaggtattttttgcatccgtgcgatctggaggaagtagccaagtgtttttcatgaccctcaacagaaattccatgatgaactggtaacagaagagcacttggcacttatcttcatggcgttatttctaatttaaaagaacataactcatgtggacttatgccagtctagaggcagaatcagaaggcttggttgaacatatcgctttccctttttcctctccctccgcccctcccagtacagtccatctttcaatgttgcagcctggttgagaaggagagaaaaaggtggcaggaatttccaggagatccccaagaatgctgccttgtctgtggacaaagatggaccatgtgcccttcggaattagggatagaaacaaatattgtgtgctcttaacgattaagctgtgttatggtgggttttcaggtttttaccttttttctttacccctttactctgcaagaatggggaaagaatgcatactgcgaaaatgagtcttttaaattctgtctgcctactagttttaagtatatggtatgttgtaaaatttccaatgatgagagacagcacaataaatgtaccttatctccttaggctgaaggccataactacatagtggagtaatttaagaactctcttgccttcaccaacccaaaaggttgctttttgatagcaactggctaatgaatttttaaaaagagaagaaaaatactagttttcccctcttttgggaaatagattttaaatggctaaactactagccttaaaactactagtctaataaaatcaactaccacttttgtgaatctgacaggccacatttttatatggccctttacagaatggagtgtgttgaacaggatactaacgccattgagttgagctggcctagcgatggagggacactctaacacaactttccctcagctattatgcaacagatcagggaaaaagatgggatgacagatggggtcagacagaaagagcttctgggaaacaagcttacatagtcttttttaaaatgcacaaagcctcccagctaagaggtcacttggtttgggcttcattaggactgagactttgttgagttctttctgggacttggagagtggatgatattcaggctctgaacattcccagcgctctcccgagggtgccactttctcaagatgaaaactgtgactgaaaaaattaataataaatgtttctgagctgcctgtgttctccctgtgtgggtgagagaagggactagactcctaagcctgcctcagatacaagaggcatcattggctccaattttagagaacttgaaagcaaggctttggacaaaattttgagaccctaatcactttaccttcctccaaattacccaacatacggtaaacaacatttgtgcagaagtatgtatgtatttagttcaggttgacttgtgtccttataaactcttactcaaatgatttgaacttttatgcgactgggattttttttttccaaagctacaagcatggccgcctgtggtatcgaggtgttgcaaacaatatctgtgttgcgcttcctgttttaacctacctcgttttgtttgtttttgtttcactgttcatcacagcagtgttatctccaggagacatatagagagctcaaccggcaatctcaggtgcatttaacatttttaaaacgaaacagtagttgaccaaatttttcttcttaaaaaattggaagtggggggaatccaatgacaaaaactaatgtggcttgtttctggagaaaataattactgtaaatggaacaacaacaacaaaaaaaactacgatcttactgactttgcctaaatacacaagcagctgatgtactattaatgagaacgaaatacacattaggaaaatggagccatttcaatctagtggtttgggcaagatggggaagagaaggggaaacattctagtttctggattacattattatgcccctcctgaaaaggtggttgtcatttgcatttatttaaagcaggtaatatgcaggaatgtaactgaggattatcttcaggcaatcagcaagatatcctcctcatggtccctttagctctcaaaagcaatgaaatcctcctgttctcatttttactgctgtggttgtgctgctgaacaatactatcttctcaaattccatgccacaaattcagcaataactttttggattgaatttaacaactactgtaattggatgctgatgtggacaaaatatattgatttcgatttcactcccgaatgtgattgccaccagctctttatattgctgctgtggtattttaaaccagaagcttctttaaattatgttgcaaactgatctttgtttttatgttttgttttgtttttatttctaagtgataagtttgaaacacacagctttaaatgatttttttattgtgggattttgggtacagttaagaaataaaagggaatcattgtgtttaaacataaggtagtttgtgaatgtattttttaaaatctagagtcattgaaacaaatcataagaaaacaatattaatgcagtcttgtttacagtatgtacagtgacataacatagaacatgagcttttctggtgccaacaacaataaaacacacgttaaacatcaa

SEQ ID NO: 191834 - DNA, 1128 bp, Homo sapiens
  Payload ID: 17907
  Gene Name: TRAF2 and NCK interacting kinase
  ENST ID: ENST00000468757
  CDS Start-End: 77-1128
tattgctagaccaccttgcttggaattaaaagttacacagttatttttcccagaacatgtattttcagcttaaggaatgtcagttagtctttctaaactgggtttcattaagcatctaagctctacagaagatgatttgagagactgccttctcagttcttccaaggagggtacagaggatgaagaggaagaaatcaaacaagaaattaacatgttgaagaaatattctcatcaccggaatattgctacatactatggtgcttttatcaaaaagaacccaccaggcatggatgaccaactttggttggtgatggagttttgtggtgctggctctgtcaccgacctgatcaagaacacaaaaggtaacacgttgaaagaggagtggattgcatacatctgcagggaaatcttacgggggctgagtcacctgcaccagcataaagtgattcatcgagatattaaagggcaaaatgtcttgctgactgaaaatgcagaagttaaactagtggactttggagtcagtgctcagcttgatcgaacagtgggcaggaggaatactttcattggaactccctactggatggcaccagaagttattgcctgtgatgaaaacccagatgccacatatgatttcaagagtgacttgtggtctttgggtatcaccgccattgaaatggcagaaggtgctccccctctctgtgacatgcaccccatgagagctctcttcctcatcccccggaacccagcgcctcggctgaagtctaagaagtggtcaaaaaaattccagtcatttattgagagctgcttggtaaagaatcacagccagcgaccagcaacagaacaattgatgaagcatccatttatacgagaccaacctaatgagcgacaggtccgcattcaactcaaggaccatattgatagaacaaagaagaagcgaggagaaaaagatgagacagagtatgagtacagtggaagtgaggaagaagaggaggagaatgactcaggagagcccagctccatcctgaatctgccaggggagtcgacgctgcggagggactttctgaggctgcagctggccaacaaggagcgttctgaggccctacggaggcagcagctggagcagcagca

SEQ ID NO: 191835 - DNA, 3807 bp, Homo sapiens
  Payload ID: 17907
  Gene Name: TRAF2 and NCK interacting kinase
  Uniprot ID: Q9UKE5
  ENST ID: ENST00000475336
  CDS Start-End: 1-3807
atggcgagcgactccccggctcgaagcctggatgaaatagatctctcggctctgagggaccccgcagggatctttgaattggtggaacttgttggaaatggaacatacgggcaagtttataagggtcgtcatgtcaaaacgggccagcttgcagccatcaaggttatggatgtcacaggggatgaagaggaagaaatcaaacaagaaattaacatgttgaagaaatattctcatcaccggaatattgctacatactatggtgcttttatcaaaaagaacccaccaggcatggatgaccaactttggttggtgatggagttttgtggtgctggctctgtcaccgacctgatcaagaacacaaaaggtaacacgttgaaagaggagtggattgcatacatctgcagggaaatcttacgggggctgagtcacctgcaccagcataaagtgattcatcgagatattaaagggcaaaatgtcttgctgactgaaaatgcagaagttaaactagtggactttggagtcagtgctcagcttgatcgaacagtgggcaggaggaatactttcattggaactccctactggatggcaccagaagttattgcctgtgatgaaaacccagatgccacatatgatttcaagagtgacttgtggtctttgggtatcaccgccattgaaatggcagaaggtgctccccctctctgtgacatgcaccccatgagagctctcttcctcatcccccggaacccagcgcctcggctgaagtctaagaagtggtcaaaaaaattccagtcatttattgagagctgcttggtaaagaatcacagccagcgaccagcaacagaacaattgatgaagcatccatttatacgagaccaacctaatgagcgacaggtccgcattcaactcaaggaccatattgatagaacaaagaagaagcgaggagaaaaagatgagacagagtatgagtacagtggaagtgaggaagaagaggaggagaatgactcaggagagcccagctccatcctgaatctgccaggggagtcgacgctgcggagggactttctgaggctgcagctggccaacaaggagcgttctgaggccctacggaggcagcagctggagcagcagcagcgggagaatgaggagcacaagcggcagctgctggccgagcgtcagaagcgcatcgaggagcagaaagagcagaggcggcggctggaggagcaacaaaggcgagagaaggagctgcggaagcagcaggagagggagcagcgccggcactatgaggagcagatgcgccgggaggaggagaggaggcgtgcggagcatgaacaggaatataagcgcaaacaattggaagaacagagacaagcagaaagactgcagaggcagctaaagcaagaaagagactacttagtttcccttcagcatcagcggcaggagcagaggcctgtggagaagaagccactgtaccattacaaagaaggaatgagtcctagtgagaagccagcatgggccaaggagatcccacatctggtagctgtaaaatcccagggacctgccttgaccgcctcccagtcagtgcacgagcagcccacaaagggcctctctgggtttcaggaggctctgaacgtgacctcccaccgcgtggagatgccacgccagaactcagatcccacctcggaaaatcctcctctccccactcgcattgaaaagtttgaccgaagctcttggttacgacaggaagaagacattccaccaaaggtgcctcaaagaacaacttctatatccccagcattagccagaaagaattctcctgggaatggtagtgctctgggacccagactaggatctcaacccatcagagcaagcaaccctgatctccggagaactgagcccatcttggagagccccttgcagaggaccagcagtggcagttcctccagctccagcacccctagctcccagcccagctcccaaggaggctcccagcctggatcacaagcaggatccagtgaacgcaccagagttcgagccaacagtaagtcagaaggatcacctgtgctcccccatgagcctgcgaaggtgaaaccagaagaatccagggacattacccggcccagtcgaccagctgatctgacggcattagccaaagaactaagagaactccggattgaagaaacaaaccgcccaatgaagaaggtgactgattactcctcctccagtgaggagtcagaaagtagcgaggaagaggaggaagatggagagagcgagacccatgatgggacagtggctgtcagcgacatacccagactgataccaacaggagctccaggcagcaacgagcagtacaatgtgggaatggtggggacgcatgggctggagacctctcatgcggacagtttcagcggcagtatttcaagagaaggaaccttgatgattagagagacgtctggagagaagaagcgatctggccacagtgacagcaatggctttgctggccacatcaacctccctgacctggtgcagcagagccattctccagctggaaccccgactgagggactggggcgcgtctcaacccattcccaggagatggactctgggactgaatatggcatggggagcagcaccaaagcctccttcaccccctttgtggaccccagagtataccagacgtctcccactgatgaagatgaagaggatgaggaatcatcagccgcagctctgtttactagcgaacttcttaggcaagaacaggccaaactcaatgaagcaagaaagatttcggtggtaaatgtaaacccaaccaacattcggcctcatagcgacacaccagaaatcagaaaatacaagaaacgattcaactcagaaatactttgtgcagctctgtggggtgtaaaccttctggtggggactgaaaatggcctgatgcttttggaccgaagtgggcaaggcaaagtctataatctgatcaaccggaggcgatttcagcagatggatgtgctagagggactgaatgtccttgtgacaatttcaggaaagaagaataagctacgagtttactatctttcatggttaagaaacagaatactacataatgacccagaagtagaaaagaaacaaggctggatcactgttggggacttggaaggctgtatacattataaagttgttaaatatgaaaggatcaaatttttggtgattgccttaaagaatgctgtggaaatatatgcttgggctcctaaaccgtatcataaattcatggcatttaagtcttttgcagatctccagcacaagcctctgctagttgatctcacggtagaagaaggtcaaagattaaaggttatttttggttcacacactggtttccatgtaattgatgttgattcaggaaactcttatgatatctacataccatctcatattcagggcaatatcactcctcatgctattgtcatcttgcctaaaacagatggaatggaaatgcttgtttgctatgaggatgagggggtgtatgtaaacacctatggccggataactaaggatgtggtgctccaatggggagaaatgcccacgtctgtggcctacattcattccaatcagataatgggctggggcgagaaagctattgagatccggtcagtggaaacaggacatttggatggagtatttatgcataagcgagctcaaaggttaaagtttctatgtgaaagaaatgataaggtattttttgcatccgtgcgatctggaggaagtagccaagtgtttttcatgaccctcaacagaaattccatgatgaactggtaa

SEQ ID NO: 191836 - DNA, 3918 bp, Homo sapiens
  Payload ID: 17907
  Gene Name: TRAF2 and NCK interacting kinase
  Uniprot ID: Q9UKE5
  ENST ID: ENST00000488470
  CDS Start-End: 1-3918
atggcgagcgactccccggctcgaagcctggatgaaatagatctctcggctctgagggaccccgcagggatctttgaattggtggaacttgttggaaatggaacatacgggcaagtttataagggtcgtcatgtcaaaacgggccagcttgcagccatcaaggttatggatgtcacaggggatgaagaggaagaaatcaaacaagaaattaacatgttgaagaaatattctcatcaccggaatattgctacatactatggtgcttttatcaaaaagaacccaccaggcatggatgaccaactttggttggtgatggagttttgtggtgctggctctgtcaccgacctgatcaagaacacaaaaggtaacacgttgaaagaggagtggattgcatacatctgcagggaaatcttacgggggctgagtcacctgcaccagcataaagtgattcatcgagatattaaagggcaaaatgtcttgctgactgaaaatgcagaagttaaactagtggactttggagtcagtgctcagcttgatcgaacagtgggcaggaggaatactttcattggaactccctactggatggcaccagaagttattgcctgtgatgaaaacccagatgccacatatgatttcaagagtgacttgtggtctttgggtatcaccgccattgaaatggcagaaggtgctccccctctctgtgacatgcaccccatgagagctctcttcctcatcccccggaacccagcgcctcggctgaagtctaagaagtggtcaaaaaaattccagtcatttattgagagctgcttggtaaagaatcacagccagcgaccagcaacagaacaattgatgaagcatccatttatacgagaccaacctaatgagcgacaggtccgcattcaactcaaggaccatattgatagaacaaagaagaagcgaggagaaaaagatgagacagagtatgagtacagtggaagtgaggaagaagaggaggagaatgactcaggagagcccagctccatcctgaatctgccaggggagtcgacgctgcggagggactttctgaggctgcagctggccaacaaggagcgttctgaggccctacggaggcagcagctggagcagcagcagcgggagaatgaggagcacaagcggcagctgctggccgagcgtcagaagcgcatcgaggagcagaaagagcagaggcggcggctggaggagcaacaaaggcgagagaaggagctgcggaagcagcaggagagggagcagcgccggcactatgaggagcagatgcgccgggaggaggagaggaggcgtgcggagcatgaacaggaatacatcaggcgacagttagaggaggagcagagacagttagagatcttgcagcagcagctactgcatgaacaagctctacttctggaatataagcgcaaacaattggaagaacagagacaagcagaaagactgcagaggcagctaaagcaagaaagagactacttagtttcccttcagcatcagcggcaggagcagaggcctgtggagaagaagccactgtaccattacaaagaaggaatgagtcctagtgagaagccagcatgggccaaggagatcccacatctggtagctgtaaaatcccagggacctgccttgaccgcctcccagtcagtgcacgagcagcccacaaagggcctctctgggtttcaggaggctctgaacgtgacctcccaccgcgtggagatgccacgccagaactcagatcccacctcggaaaatcctcctctccccactcgcattgaaaagtttgaccgaagctcttggttacgacaggaagaagacattccaccaaaggtgcctcaaagaacaacttctatatccccagcattagccagaaagaattctcctgggaatggtagtgctctgggacccagactaggatctcaacccatcagagcaagcaaccctgatctccggagaactgagcccatcttggagagccccttgcagaggaccagcagtggcagttcctccagctccagcacccctagctcccagcccagctcccaaggaggctcccagcctggatcacaagcaggatccagtgaacgcaccagagttcgagccaacagtaagtcagaaggatcacctgtgctcccccatgagcctgcgaaggtgaaaccagaagaatccagggacattacccggcccagtcgaccagctagctacaaaaaagctatagatgaggatctgacggcattagccaaagaactaagagaactccggattgaagaaacaaaccgcccaatgaagaaggtgactgattactcctcctccagtgaggagtcagaaagtagcgaggaagaggaggaagatggagagagcgagacccatgatgggacagtggctgtcagcgacatacccagactgataccaacaggagctccaggcagcaacgagcagtacaatgtgggaatggtggggacgcatgggctggagacctctcatgcggacagtttcagcggcagtatttcaagagaaggaaccttgatgattagagagacgtctggagagaagaagcgatctggccacagtgacagcaatggctttgctggccacatcaacctccctgacctggtgcagcagagccattctccagctggaaccccgactgagggactggggcgcgtctcaacccattcccaggagatggactctgggactgaatatggcatggggagcagcaccaaagcctccttcaccccctttgtggaccccagagtataccagacgtctcccactgatgaagatgaagaggatgaggaatcatcagccgcagctctgtttactagcgaacttcttaggcaagaacaggccaaactcaatgaagcaagaaagatttcggtggtaaatgtaaacccaaccaacattcggcctcatagcgacacaccagaaatcagaaaatacaagaaacgattcaactcagaaatactttgtgcagctctgtggggtgtaaaccttctggtggggactgaaaatggcctgatgcttttggaccgaagtgggcaaggcaaagtctataatctgatcaaccggaggcgatttcagcagatggatgtgctagagggactgaatgtccttgtgacaatttcaggaaagaagaataagctacgagtttactatctttcatggttaagaaacagaatactacataatgacccagaagtagaaaagaaacaaggctggatcactgttggggacttggaaggctgtatacattataaagttgttaaatatgaaaggatcaaatttttggtgattgccttaaagaatgctgtggaaatatatgcttgggctcctaaaccgtatcataaattcatggcatttaagtcttttgcagatctccagcacaagcctctgctagttgatctcacggtagaagaaggtcaaagattaaaggttatttttggttcacacactggtttccatgtaattgatgttgattcaggaaactcttatgatatctacataccatctcatattcagggcaatatcactcctcatgctattgtcatcttgcctaaaacagatggaatggaaatgcttgtttgctatgaggatgagggggtgtatgtaaacacctatggccggataactaaggatgtggtgctccaatggggagaaatgcccacgtctgtggcctacattcattccaatcagataatgggctggggcgagaaagctattgagatccggtcagtggaaacaggacatttggatggagtatttatgcataagcgagctcaaaggttaaagtttctatgtgaaagaaatgataaggtattttttgcatccgtgcgatctggaggaagtagccaagtgtttttcatgaccctcaacagaaattccatgatgaactggtaa

SEQ ID NO: 191837 - DNA, 3894 bp, Homo sapiens
  Payload ID: 17907
  Gene Name: TRAF2 and NCK interacting kinase
  Uniprot ID: Q9UKE5
  ENST ID: ENST00000460047
  CDS Start-End: 1-3894
atggcgagcgactccccggctcgaagcctggatgaaatagatctctcggctctgagggaccccgcagggatctttgaattggtggaacttgttggaaatggaacatacgggcaagtttataagggtcgtcatgtcaaaacgggccagcttgcagccatcaaggttatggatgtcacaggggatgaagaggaagaaatcaaacaagaaattaacatgttgaagaaatattctcatcaccggaatattgctacatactatggtgcttttatcaaaaagaacccaccaggcatggatgaccaactttggttggtgatggagttttgtggtgctggctctgtcaccgacctgatcaagaacacaaaaggtaacacgttgaaagaggagtggattgcatacatctgcagggaaatcttacgggggctgagtcacctgcaccagcataaagtgattcatcgagatattaaagggcaaaatgtcttgctgactgaaaatgcagaagttaaactagtggactttggagtcagtgctcagcttgatcgaacagtgggcaggaggaatactttcattggaactccctactggatggcaccagaagttattgcctgtgatgaaaacccagatgccacatatgatttcaagagtgacttgtggtctttgggtatcaccgccattgaaatggcagaaggtgctccccctctctgtgacatgcaccccatgagagctctcttcctcatcccccggaacccagcgcctcggctgaagtctaagaagtggtcaaaaaaattccagtcatttattgagagctgcttggtaaagaatcacagccagcgaccagcaacagaacaattgatgaagcatccatttatacgagaccaacctaatgagcgacaggtccgcattcaactcaaggaccatattgatagaacaaagaagaagcgaggagaaaaagatgagacagagtatgagtacagtggaagtgaggaagaagaggaggagaatgactcaggagagcccagctccatcctgaatctgccaggggagtcgacgctgcggagggactttctgaggctgcagctggccaacaaggagcgttctgaggccctacggaggcagcagctggagcagcagcagcgggagaatgaggagcacaagcggcagctgctggccgagcgtcagaagcgcatcgaggagcagaaagagcagaggcggcggctggaggagcaacaaaggcgagagaaggagctgcggaagcagcaggagagggagcagcgccggcactatgaggagcagatgcgccgggaggaggagaggaggcgtgcggagcatgaacaggaatacatcaggcgacagttagaggaggagcagagacagttagagatcttgcagcagcagctactgcatgaacaagctctacttctggaatataagcgcaaacaattggaagaacagagacaagcagaaagactgcagaggcagctaaagcaagaaagagactacttagtttcccttcagcatcagcggcaggagcagaggcctgtggagaagaagccactgtaccattacaaagaaggaatgagtcctagtgagaagccagcatgggccaaggagatcccacatctggtagctgtaaaatcccagggacctgccttgaccgcctcccagtcagtgcacgagcagcccacaaagggcctctctgggtttcaggaggctctgaacgtgacctcccaccgcgtggagatgccacgccagaactcagatcccacctcggaaaatcctcctctccccactcgcattgaaaagtttgaccgaagctcttggttacgacaggaagaagacattccaccaaaggtgcctcaaagaacaacttctatatccccagcattagccagaaagaattctcctgggaatggtagtgctctgggacccagactaggatctcaacccatcagagcaagcaaccctgatctccggagaactgagcccatcttggagagccccttgcagaggaccagcagtggcagttcctccagctccagcacccctagctcccagcccagctcccaaggaggctcccagcctggatcacaagcaggatccagtgaacgcaccagagttcgagccaacagtaagtcagaaggatcacctgtgctcccccatgagcctgcgaaggtgaaaccagaagaatccagggacattacccggcccagtcgaccagctgatctgacggcattagccaaagaactaagagaactccggattgaagaaacaaaccgcccaatgaagaaggtgactgattactcctcctccagtgaggagtcagaaagtagcgaggaagaggaggaagatggagagagcgagacccatgatgggacagtggctgtcagcgacatacccagactgataccaacaggagctccaggcagcaacgagcagtacaatgtgggaatggtggggacgcatgggctggagacctctcatgcggacagtttcagcggcagtatttcaagagaaggaaccttgatgattagagagacgtctggagagaagaagcgatctggccacagtgacagcaatggctttgctggccacatcaacctccctgacctggtgcagcagagccattctccagctggaaccccgactgagggactggggcgcgtctcaacccattcccaggagatggactctgggactgaatatggcatggggagcagcaccaaagcctccttcaccccctttgtggaccccagagtataccagacgtctcccactgatgaagatgaagaggatgaggaatcatcagccgcagctctgtttactagcgaacttcttaggcaagaacaggccaaactcaatgaagcaagaaagatttcggtggtaaatgtaaacccaaccaacattcggcctcatagcgacacaccagaaatcagaaaatacaagaaacgattcaactcagaaatactttgtgcagctctgtggggtgtaaaccttctggtggggactgaaaatggcctgatgcttttggaccgaagtgggcaaggcaaagtctataatctgatcaaccggaggcgatttcagcagatggatgtgctagagggactgaatgtccttgtgacaatttcaggaaagaagaataagctacgagtttactatctttcatggttaagaaacagaatactacataatgacccagaagtagaaaagaaacaaggctggatcactgttggggacttggaaggctgtatacattataaagttgttaaatatgaaaggatcaaatttttggtgattgccttaaagaatgctgtggaaatatatgcttgggctcctaaaccgtatcataaattcatggcatttaagtcttttgcagatctccagcacaagcctctgctagttgatctcacggtagaagaaggtcaaagattaaaggttatttttggttcacacactggtttccatgtaattgatgttgattcaggaaactcttatgatatctacataccatctcatattcagggcaatatcactcctcatgctattgtcatcttgcctaaaacagatggaatggaaatgcttgtttgctatgaggatgagggggtgtatgtaaacacctatggccggataactaaggatgtggtgctccaatggggagaaatgcccacgtctgtggcctacattcattccaatcagataatgggctggggcgagaaagctattgagatccggtcagtggaaacaggacatttggatggagtatttatgcataagcgagctcaaaggttaaagtttctatgtgaaagaaatgataaggtattttttgcatccgtgcgatctggaggaagtagccaagtgtttttcatgaccctcaacagaaattccatgatgaactggtaa

SEQ ID NO: 191838 - DNA, 750 bp, Homo sapiens
  Payload ID: 17907
  Gene Name: TRAF2 and NCK interacting kinase
  ENST ID: ENST00000465393
  CDS Start-End: 343-480
ataacagccaatgcagccgccatccacgcacaagcaaagaagcatgtcccatttaaatacacccacgcagccccagcgcccttagccgatcggggcgctcagcccacacgcaccgctgctcggggcttggagatccgcgcaggctgggctcccggacccggcggaccgacgcgcggaggatcgggatccggcgctgtggggctggggtgggcgggggaggctgggcccggggcctctggcgcgacacccgcatgaggacgcgagtgaaatagaccaaggtggaatttccaagggaaaagcttcggggtggttttggtccatttctccagcgaagaagtagacatggcgagcgactccccggctcgaagcctggatgaaatagatctctcggctctgagggaccccgcagggatctttgaattggtggaacttgttggaaatggaacatacgggcaagtttataagcaaatgaaccagtgagtgaagggcattatcacaactccaagaaccaactaggagtcacccatgacatcatctcctgaatttcatcaccaagcccagctgatcctatttcctaaatggttcctgatttctctcttctgttttctgtctctgccaccactgtcctagcacaggcattgcacatctctcatatgaacgcctgcaggactgtcccttgatgttatccttgcagcccctacattcctactgtgcagccagtaaagtcatattaaaatgcttatttgatca

SEQ ID NO: 191839 - DNA, 3972 bp, Homo sapiens
  Payload ID: 17907
  Gene Name: TRAF2 and NCK interacting kinase
  Uniprot ID: Q9UKE5
  ENST ID: ENST00000470834
  CDS Start-End: 1-3972
atggcgagcgactccccggctcgaagcctggatgaaatagatctctcggctctgagggaccccgcagggatctttgaattggtggaacttgttggaaatggaacatacgggcaagtttataagggtcgtcatgtcaaaacgggccagcttgcagccatcaaggttatggatgtcacaggggatgaagaggaagaaatcaaacaagaaattaacatgttgaagaaatattctcatcaccggaatattgctacatactatggtgcttttatcaaaaagaacccaccaggcatggatgaccaactttggttggtgatggagttttgtggtgctggctctgtcaccgacctgatcaagaacacaaaaggtaacacgttgaaagaggagtggattgcatacatctgcagggaaatcttacgggggctgagtcacctgcaccagcataaagtgattcatcgagatattaaagggcaaaatgtcttgctgactgaaaatgcagaagttaaactagtggactttggagtcagtgctcagcttgatcgaacagtgggcaggaggaatactttcattggaactccctactggatggcaccagaagttattgcctgtgatgaaaacccagatgccacatatgatttcaagagtgacttgtggtctttgggtatcaccgccattgaaatggcagaaggtgctccccctctctgtgacatgcaccccatgagagctctcttcctcatcccccggaacccagcgcctcggctgaagtctaagaagtggtcaaaaaaattccagtcatttattgagagctgcttggtaaagaatcacagccagcgaccagcaacagaacaattgatgaagcatccatttatacgagaccaacctaatgagcgacaggtccgcattcaactcaaggaccatattgatagaacaaagaagaagcgaggagaaaaagatgagacagagtatgagtacagtggaagtgaggaagaagaggaggagaatgactcaggagagcccagctccatcctgaatctgccaggggagtcgacgctgcggagggactttctgaggctgcagctggccaacaaggagcgttctgaggccctacggaggcagcagctggagcagcagcagcgggagaatgaggagcacaagcggcagctgctggccgagcgtcagaagcgcatcgaggagcagaaagagcagaggcggcggctggaggagcaacaaaggcgagagaaggagctgcggaagcagcaggagagggagcagcgccggcactatgaggagcagatgcgccgggaggaggagaggaggcgtgcggagcatgaacaggaatataagcgcaaacaattggaagaacagagacaagcagaaagactgcagaggcagctaaagcaagaaagagactacttagtttcccttcagcatcagcggcaggagcagaggcctgtggagaagaagccactgtaccattacaaagaaggaatgagtcctagtgagaagccagcatgggccaaggaggtagaagaacggtcaaggctcaaccggcaaagttcccctgccatgcctcacaaggttgccaacaggatatctgaccccaacctgcccccaaggtcggagtccttcagcattagtggagttcagcctgctcgaacaccccccatgctcagaccagtcgatccccagatcccacatctggtagctgtaaaatcccagggacctgccttgaccgcctcccagtcagtgcacgagcagcccacaaagggcctctctgggtttcaggaggctctgaacgtgacctcccaccgcgtggagatgccacgccagaactcagatcccacctcggaaaatcctcctctccccactcgcattgaaaagtttgaccgaagctcttggttacgacaggaagaagacattccaccaaaggtgcctcaaagaacaacttctatatccccagcattagccagaaagaattctcctgggaatggtagtgctctgggacccagactaggatctcaacccatcagagcaagcaaccctgatctccggagaactgagcccatcttggagagccccttgcagaggaccagcagtggcagttcctccagctccagcacccctagctcccagcccagctcccaaggaggctcccagcctggatcacaagcaggatccagtgaacgcaccagagttcgagccaacagtaagtcagaaggatcacctgtgctcccccatgagcctgcgaaggtgaaaccagaagaatccagggacattacccggcccagtcgaccagctgatctgacggcattagccaaagaactaagagaactccggattgaagaaacaaaccgcccaatgaagaaggtgactgattactcctcctccagtgaggagtcagaaagtagcgaggaagaggaggaagatggagagagcgagacccatgatgggacagtggctgtcagcgacatacccagactgataccaacaggagctccaggcagcaacgagcagtacaatgtgggaatggtggggacgcatgggctggagacctctcatgcggacagtttcagcggcagtatttcaagagaaggaaccttgatgattagagagacgtctggagagaagaagcgatctggccacagtgacagcaatggctttgctggccacatcaacctccctgacctggtgcagcagagccattctccagctggaaccccgactgagggactggggcgcgtctcaacccattcccaggagatggactctgggactgaatatggcatggggagcagcaccaaagcctccttcaccccctttgtggaccccagagtataccagacgtctcccactgatgaagatgaagaggatgaggaatcatcagccgcagctctgtttactagcgaacttcttaggcaagaacaggccaaactcaatgaagcaagaaagatttcggtggtaaatgtaaacccaaccaacattcggcctcatagcgacacaccagaaatcagaaaatacaagaaacgattcaactcagaaatactttgtgcagctctgtggggtgtaaaccttctggtggggactgaaaatggcctgatgcttttggaccgaagtgggcaaggcaaagtctataatctgatcaaccggaggcgatttcagcagatggatgtgctagagggactgaatgtccttgtgacaatttcaggaaagaagaataagctacgagtttactatctttcatggttaagaaacagaatactacataatgacccagaagtagaaaagaaacaaggctggatcactgttggggacttggaaggctgtatacattataaagttgttaaatatgaaaggatcaaatttttggtgattgccttaaagaatgctgtggaaatatatgcttgggctcctaaaccgtatcataaattcatggcatttaagtcttttgcagatctccagcacaagcctctgctagttgatctcacggtagaagaaggtcaaagattaaaggttatttttggttcacacactggtttccatgtaattgatgttgattcaggaaactcttatgatatctacataccatctcatattcagggcaatatcactcctcatgctattgtcatcttgcctaaaacagatggaatggaaatgcttgtttgctatgaggatgagggggtgtatgtaaacacctatggccggataactaaggatgtggtgctccaatggggagaaatgcccacgtctgtggcctacattcattccaatcagataatgggctggggcgagaaagctattgagatccggtcagtggaaacaggacatttggatggagtatttatgcataagcgagctcaaaggttaaagtttctatgtgaaagaaatgataaggtattttttgcatccgtgcgatctggaggaagtagccaagtgtttttcatgaccctcaacagaaattccatgatgaactggtaa

SEQ ID NO: 191840 - DNA, 2785 bp, Homo sapiens
  Payload ID: 17908
  Gene Name: TRAF3 interacting protein 2
  Uniprot ID: O43734
  ENST ID: ENST00000340026
  CDS Start-End: 596-2320
cggcaatgctgatgttttaagcagttagaggaggtggaagaagctcgactccctcttcttccccattatctgcccacaatcccctcctttggagctgctaatgattactaattcttaacattcgagttcaatctcctcccggagacaccctcccaggcgagggcactgcgactacactgaggttctgcccactcctgggcagcttcttagctgggtggcgaaaacaaaaatgccgcctaattggtcactggccctttctcatgaatgaaggaggtttctgttttaagaaataaagtgactcctcagccgttgattcactgcccacagggagattttgagcagaggcttcctaggctccgtagaaatttgcatacagcttccacttcctgcttcagagcctgttcttctacttacctgggcccggagaaggtggagggagacgagaagccgccgagagccgactaccctccgggcccagtctgtctgtccgtggtggatctaagcctcatctgtatcctcttgtgatggcgtgaaggaaagccatggcagatttccagcctggtgatgctgtacagaacacaggtggcctgcttccatgcctcctcagcttcaagaaactagaatgaaccgaagcattcctgtggaggttgatgaatcagaaccatacccaagtcagttgctgaaaccaatcccagaatattccccggaagaggaatcagaaccacctgctccaaatataaggaacatggcacccaacagcttgtctgcacccacaatgcttcacaattcctccggagacttttctcaagctcactcaaccctgaaacttgcaaatcaccagcggcctgtatcccggcaggtcacctgcctgcgcactcaagttctggaggacagtgaagacagtttctgcaggagacacccaggcctgggcaaagctttcccttctgggtgctctgcagtcagcgagcctgcgtctgagtctgtggttggagccctccctgcagagcatcagttttcatttatggaaaaacgtaatcaatggctggtatctcagctttcagcggcttctcctgacactggccatgactcagacaaatcagaccaaagtttacctaatgcctcagcagactccttgggcggtagccaggagatggtgcaacggccccagcctcacaggaaccgagcaggcctggatctgccaaccatagacacgggatatgattcccagccccaggatgtcctgggcatcaggcagctggaaaggcccctgcccctcacctccgtgtgttacccccaggacctccccagacctctcaggtccagggagttccctcagtttgaacctcagaggtatccagcatgtgcacagatgctgcctcccaatctttccccacatgctccatggaactatcattaccattgtcctggaagtcccgatcaccaggtgccatatggccatgactaccctcgagcagcctaccagcaagtgatccagccggctctgcctgggcagcccctgcctggagccagtgtgagaggcctgcaccctgtgcagaaggttatcctgaattatcccagcccctgggaccacgaagagaggcccgcacagagagactgctcctttccggggcttccaaggcaccaggaccagccacatcaccagccacctaatagagctggtgctcctggggagtccttggagtgccctgcagagctgagaccacaggttccccagcctccgtccccagctgctgtgcctagaccccctagcaaccctccagccagaggaactctaaaaacaagcaatttgccagaagaattgcggaaagtctttatcacttattcgatggacacagctatggaggtggtgaaattcgtgaactttttgttggtaaatggcttccaaactgcaattgacatatttgaggatagaatccgaggcattgatatcattaaatggatggagcgctaccttagggataagaccgtgatgataatcgtagcaatcagccccaaatacaaacaggacgtggaaggcgctgagtcgcagctggacgaggatgagcatggcttacatactaagtacattcatcgaatgatgcagattgagttcataaaacaaggaagcatgaatttcagattcatccctgtgctcttcccaaatgctaagaaggagcatgtgcccacctggcttcagaacactcatgtctacagctggcccaagaataaaaaaaacatcctgctgcggctgctgagagaggaagagtatgtggctcctccacgggggcctctgcccacccttcaggtggttcccttgtgacaccgttcatccccagatcactgaggccaggccatgtttggggccttgttctgacagcattctggctgaggctggtcggtagcactcctggctggtttttttctgttcctccccgagaggccctctggcccccaggaaacctgttgtgcagagctcttccccggagacctccacacaccctggctttgaagtggagtctgtgactgctctgcattctctgcttttaaaaaaaccattgcaggtgccagtgtcccatatgttcctcctgacagtttgatgtgtccattctgggcctctcagtgcttagcaagtagataatgtaagggatgtggcagcaaatggaaatgactacaaacactctcctatcaatcacttcaggctacttttatgagttagccagatgcttgtgtatcctcagaccaaactgattcatgtacaaataataaaatgtttactcttttgtaa

SEQ ID NO: 191841 - DNA, 2264 bp, Homo sapiens
  Payload ID: 17908
  Gene Name: TRAF3 interacting protein 2
  Uniprot ID: O43734
  ENST ID: ENST00000359831
  CDS Start-End: 105-1799
tacttacctgggcccggagaaggtggagggagacgagaagccgccgagagccgactaccctccgggcccagtctgtctgtccgtggtggatctaagaaactagaatgaaccgaagcattcctgtggaggttgatgaatcagaaccatacccaagtcagttgctgaaaccaatcccagaatattccccggaagaggaatcagaaccacctgctccaaatataaggaacatggcacccaacagcttgtctgcacccacaatgcttcacaattcctccggagacttttctcaagctcactcaaccctgaaacttgcaaatcaccagcggcctgtatcccggcaggtcacctgcctgcgcactcaagttctggaggacagtgaagacagtttctgcaggagacacccaggcctgggcaaagctttcccttctgggtgctctgcagtcagcgagcctgcgtctgagtctgtggttggagccctccctgcagagcatcagttttcatttatggaaaaacgtaatcaatggctggtatctcagctttcagcggcttctcctgacactggccatgactcagacaaatcagaccaaagtttacctaatgcctcagcagactccttgggcggtagccaggagatggtgcaacggccccagcctcacaggaaccgagcaggcctggatctgccaaccatagacacgggatatgattcccagccccaggatgtcctgggcatcaggcagctggaaaggcccctgcccctcacctccgtgtgttacccccaggacctccccagacctctcaggtccagggagttccctcagtttgaacctcagaggtatccagcatgtgcacagatgctgcctcccaatctttccccacatgctccatggaactatcattaccattgtcctggaagtcccgatcaccaggtgccatatggccatgactaccctcgagcagcctaccagcaagtgatccagccggctctgcctgggcagcccctgcctggagccagtgtgagaggcctgcaccctgtgcagaaggttatcctgaattatcccagcccctgggaccacgaagagaggcccgcacagagagactgctcctttccggggcttccaaggcaccaggaccagccacatcaccagccacctaatagagctggtgctcctggggagtccttggagtgccctgcagagctgagaccacaggttccccagcctccgtccccagctgctgtgcctagaccccctagcaaccctccagccagaggaactctaaaaacaagcaatttgccagaagaattgcggaaagtctttatcacttattcgatggacacagctatggaggtggtgaaattcgtgaactttttgttggtaaatggcttccaaactgcaattgacatatttgaggatagaatccgaggcattgatatcattaaatggatggagcgctaccttagggataccgtgatgataatcgtagcaatcagccccaaatacaaacaggacgtggaaggcgctgagtcgcagctggacgaggatgagcatggcttacatactaagtacattcatcgaatgatgcagattgagttcataaaacaaggaagcatgaatttcagattcatccctgtgctcttcccaaatgctaagaaggagcatgtgcccacctggcttcagaacactcatgtctacagctggcccaagaataaaaaaaacatcctgctgcggctgctgagagaggaagagtatgtggctcctccacgggggcctctgcccacccttcaggtggttcccttgtgacaccgttcatccccagatcactgaggccaggccatgtttggggccttgttctgacagcattctggctgaggctggtcggtagcactcctggctggtttttttctgttcctccccgagaggccctctggcccccaggaaacctgttgtgcagagctcttccccggagacctccacacaccctggctttgaagtggagtctgtgactgctctgcattctctgcttttaaaaaaaccattgcaggtgccagtgtcccatatgttcctcctgacagtttgatgtgtccattctgggcctctcagtgcttagcaagtagataatgtaagggatgtggcagcaaatggaaatgactacaaacactctcctatcaatcacttcaggctacttttatgagttagccagatgcttgtgtatcctcagaccaaactgattcatgtacaaataataaaatgtttactcttttgtaa

SEQ ID NO: 191842 - DNA, 903 bp, Homo sapiens
  Payload ID: 17908
  Gene Name: TRAF3 interacting protein 2
  Uniprot ID: O43734
  ENST ID: ENST00000368735
  CDS Start-End: 155-484
ataggaaagaaggaaatgaaggcggagagtggggagagagcagcagaattcaatttaatctgaggccaccccaagtgttttgtagaattgggctgaagaggtttcctaggcagcctcgcaggctgcacagcacaccacccccgagaagaccgtgatgataatcgtagcaatcagccccaaatacaaacaggacgtggaaggcgctgagtcgcagctggacgaggatgagcatggcttacatactaagtacattcatcgaatgatgcagattgagttcataaaacaaggaagcatgaatttcagattcatccctgtgctcttcccaaatgctaagaaggagcatgtgcccacctggcttcagaacactcatgtctacagctggcccaagaataaaaaaaacatcctgctgcggctgctgagagaggaagagtatgtggctcctccacgggggcctctgcccacccttcaggtggttcccttgtgacaccgttcatccccagatcactgaggccaggccatgtttggggccttgttctgacagcattctggctgaggctggtcggtagcactcctggctggtttttttctgttcctccccgagaggccctctggcccccaggaaacctgttgtgcagagctcttccccggagacctccacacaccctggctttgaagtggagtctgtgactgctctgcattctctgcttttaaaaaaaccattgcaggtgccagtgtcccatatgttcctcctgacagtttgatgtgtccattctgggcctctcagtgcttagcaagtagataatgtaagggatgtggcagcaaatggaaatgactacaaacactctcctatcaatcacttcaggctacttttatgagttagccagatgcttgtgtatcctcaga

SEQ ID NO: 191843 - DNA, 5128 bp, Homo sapiens
  Payload ID: 17908
  Gene Name: TRAF3 interacting protein 2
  Uniprot ID: O43734
  ENST ID: ENST00000368761
  CDS Start-End: 480-2177
ggtggaagaagctcgactccctcttcttccccattatctgcccacaatcccctcctttggagctgctaatgattactaattcttaacattcgagttcaatctcctcccggagacaccctcccaggcgagggcactgcgactacactgaggttctgcccactcctgggcagcttcttagctgggtggcgaaaacaaaaatgccgcctaattggtcactggccctttctcatgaatgaaggaggtttctgttttaagaaataaagtgactcctcagccgttgattcactgcccacagggagattttgagcagaggcttcctaggctccgtagaaatttgcatacagcttccacttcctgcttcagagcctgttcttctacttacctgggcccggagaaggtggagggagacgagaagccgccgagagccgactaccctccgggcccagtctgtctgtccgtggtggatctaagaaactagaatgaaccgaagcattcctgtggaggttgatgaatcagaaccatacccaagtcagttgctgaaaccaatcccagaatattccccggaagaggaatcagaaccacctgctccaaatataaggaacatggcacccaacagcttgtctgcacccacaatgcttcacaattcctccggagacttttctcaagctcactcaaccctgaaacttgcaaatcaccagcggcctgtatcccggcaggtcacctgcctgcgcactcaagttctggaggacagtgaagacagtttctgcaggagacacccaggcctgggcaaagctttcccttctgggtgctctgcagtcagcgagcctgcgtctgagtctgtggttggagccctccctgcagagcatcagttttcatttatggaaaaacgtaatcaatggctggtatctcagctttcagcggcttctcctgacactggccatgactcagacaaatcagaccaaagtttacctaatgcctcagcagactccttgggcggtagccaggagatggtgcaacggccccagcctcacaggaaccgagcaggcctggatctgccaaccatagacacgggatatgattcccagccccaggatgtcctgggcatcaggcagctggaaaggcccctgcccctcacctccgtgtgttacccccaggacctccccagacctctcaggtccagggagttccctcagtttgaacctcagaggtatccagcatgtgcacagatgctgcctcccaatctttccccacatgctccatggaactatcattaccattgtcctggaagtcccgatcaccaggtgccatatggccatgactaccctcgagcagcctaccagcaagtgatccagccggctctgcctgggcagcccctgcctggagccagtgtgagaggcctgcaccctgtgcagaaggttatcctgaattatcccagcccctgggaccacgaagagaggcccgcacagagagactgctcctttccggggcttccaaggcaccaggaccagccacatcaccagccacctaatagagctggtgctcctggggagtccttggagtgccctgcagagctgagaccacaggttccccagcctccgtccccagctgctgtgcctagaccccctagcaaccctccagccagaggaactctaaaaacaagcaatttgccagaagaattgcggaaagtctttatcacttattcgatggacacagctatggaggtggtgaaattcgtgaactttttgttggtaaatggcttccaaactgcaattgacatatttgaggatagaatccgaggcattgatatcattaaatggatggagcgctaccttagggataagaccgtgatgataatcgtagcaatcagccccaaatacaaacaggacgtggaaggcgctgagtcgcagctggacgaggatgagcatggcttacatactaagtacattcatcgaatgatgcagattgagttcataaaacaaggaagcatgaatttcagattcatccctgtgctcttcccaaatgctaagaaggagcatgtgcccacctggcttcagaacactcatgtctacagctggcccaagaataaaaaaaacatcctgctgcggctgctgagagaggaagagtatgtggctcctccacgggggcctctgcccacccttcaggtggttcccttgtgacaccgttcatccccagatcactgaggccaggccatgtttggggccttgttctgacagcattctggctgaggctggtcggtagcactcctggctggtttttttctgttcctccccgagaggccctctggcccccaggaaacctgttgtgcagagctcttccccggagacctccacacaccctggctttgaagtggagtctgtgactgctctgcattctctgcttttaaaaaaaccattgcaggtgccagtgtcccatatgttcctcctgacagtttgatgtgtccattctgggcctctcagtgcttagcaagtagataatgtaagggatgtggcagcaaatggaaatgactacaaacactctcctatcaatcacttcaggctacttttatgagttagccagatgcttgtgtatcctcagaccaaactgattcatgtacaaataataaaatgtttactcttttgtaagattatgttttacttatctcaaaggagatacatataatttataatgatatgggcagttgcttccagggacatcaacaaagctgcttagatataatattagataaatataacagaccactctgtattaatggattaaagccagctagttaaacaaccctttttaaccataatcatggaagctttattcttgcaataaagatttttaggctgggcgcagtgactcacacctgtaatcccagcactttgggaagctaaggcaggcagatcatttgaggtcaggagtttgagaccagcctggccaacatggtgaaaccccatctctgctaaaattacaaaaaagttagccgggcatggtggtgtgcacctgtaatcccagctactcgggaggctgaggcaggagaatcacttgaacccgggaggcagaggttgcagtgagccgagatcatgtcactgcactctagcttgggagacagagcgagactccgtctcaaaaaacaaacaaacaaataaaaacacccatttttaacaaaacaactttatatagcatacagccatgattctaaatagtatgattatggttctcaggatctgactacataggtaaaaatatttgcatatgtgtatgaagtgttgggggatgtaggctagaattgtagtctgtgttctaattttggttctaccaccaattagctgtatgacctttagcaagtcctttaacttttcttagattccagggactcatttataaaatgacatggacaaaagcatctctaatcactctaaaagatttgaagtctaggacctaaattctaaatactcttttgaggagtgactgagttttcattttcataattatgtctctcagaggacaaatttacattttcttaacagagacattttcttcttctttttttttgtttgagacagagtctcgctctgtcgtccaggctggagtgcagtgctgcaatcttggctcactgcaacctgcgcctcctgggttcaagtgattcttctgcctcaacctcccaagtagctagacctataggcgcctgccaccatgcccagctaatttttgtatttttagtagagacagggtttcatattggccagactggtctcgaactcctgaccttgtgatccgcccacctcggcctcccaaagtgctgggattacaggtgtgagccaccacacccagccaacattttcctcttttaaaaaatatcttctcacgcctgtaatcccagcactttgggaggctgaggcaggcggatcatgaggtcaggagatcaagaccatcctggctaacacggtgaaactccatctctactaaaaatacaaaaaaaatagccgggcgtggtggcaggcgcctgtagtcccagctactggggaggctgaggcaggaaaatggtgtcaacccgggaggcggagcttgcagtgagccgagattgcgccactgcactccagcctgggcaatagagtgagactccgtctcaaaaaaaaaaaaaaaaaaaaaaacttcaacaataccctcaggttgataattttggatatctatctgtatctatatatcttgtttacctggtctccagaaaaagaacacatacacatatccatatataaaatatgtatacatgtatcaaatctacgtaaactataaaggtgggatggctttaattatggcccaagctactaagacaatgaagactttttggggctgcaagctactgcttcccttctttatctactagcctcttaaacaaggctcacttgtgctacaagacagtccaccgttttgttttttttttcttttttttgagacagggtctcactctttcccaggctgcagtacagtgacacagtctcagctcactgcagctttgaccttgccgggctcaggtgacccttacacttcagcctcccaagtagcagggactataggtgtgcaccaacatgcttggttaatttttgtattttttgtagagacagggttttgccatgttgtccaggctagtctcgaattcctgggctcaagtgattcacctgccttggcctcccaaagtgctaggattacagatgggagccaccacgcccagcccagtccagctcttatatgtagcacagggaaaggacaaatacttgtcaactataaataagaaacattgctaatgcattgcaaagaacactagtttcatttactttataacttagatgtctactgggtgagacgaatgtctttgttctttaaaaaataggaaaagagaagaaaaactagcataacataagtactcatttgtaagactttctgacatgtaacattagttccgtagttttgagacctggtagaactgactttcatatttggataacctggaaaacacccaaacacaaacttcaagtcttctttctcttttttcattatcttttttagtctgaggtgacaccatcattaaggattcgacacccgtttgtaaataaaatgacatcag

SEQ ID NO: 191844 - DNA, 2188 bp, Homo sapiens
  Payload ID: 17908
  Gene Name: TRAF3 interacting protein 2
  Uniprot ID: O43734
  ENST ID: ENST00000392556
  CDS Start-End: 1-1725
atgcctcctcagcttcaagaaactagaatgaaccgaagcattcctgtggaggttgatgaatcagaaccatacccaagtcagttgctgaaaccaatcccagaatattccccggaagaggaatcagaaccacctgctccaaatataaggaacatggcacccaacagcttgtctgcacccacaatgcttcacaattcctccggagacttttctcaagctcactcaaccctgaaacttgcaaatcaccagcggcctgtatcccggcaggtcacctgcctgcgcactcaagttctggaggacagtgaagacagtttctgcaggagacacccaggcctgggcaaagctttcccttctgggtgctctgcagtcagcgagcctgcgtctgagtctgtggttggagccctccctgcagagcatcagttttcatttatggaaaaacgtaatcaatggctggtatctcagctttcagcggcttctcctgacactggccatgactcagacaaatcagaccaaagtttacctaatgcctcagcagactccttgggcggtagccaggagatggtgcaacggccccagcctcacaggaaccgagcaggcctggatctgccaaccatagacacgggatatgattcccagccccaggatgtcctgggcatcaggcagctggaaaggcccctgcccctcacctccgtgtgttacccccaggacctccccagacctctcaggtccagggagttccctcagtttgaacctcagaggtatccagcatgtgcacagatgctgcctcccaatctttccccacatgctccatggaactatcattaccattgtcctggaagtcccgatcaccaggtgccatatggccatgactaccctcgagcagcctaccagcaagtgatccagccggctctgcctgggcagcccctgcctggagccagtgtgagaggcctgcaccctgtgcagaaggttatcctgaattatcccagcccctgggaccacgaagagaggcccgcacagagagactgctcctttccggggcttccaaggcaccaggaccagccacatcaccagccacctaatagagctggtgctcctggggagtccttggagtgccctgcagagctgagaccacaggttccccagcctccgtccccagctgctgtgcctagaccccctagcaaccctccagccagaggaactctaaaaacaagcaatttgccagaagaattgcggaaagtctttatcacttattcgatggacacagctatggaggtggtgaaattcgtgaactttttgttggtaaatggcttccaaactgcaattgacatatttgaggatagaatccgaggcattgatatcattaaatggatggagcgctaccttagggataagaccgtgatgataatcgtagcaatcagccccaaatacaaacaggacgtggaaggcgctgagtcgcagctggacgaggatgagcatggcttacatactaagtacattcatcgaatgatgcagattgagttcataaaacaaggaagcatgaatttcagattcatccctgtgctcttcccaaatgctaagaaggagcatgtgcccacctggcttcagaacactcatgtctacagctggcccaagaataaaaaaaacatcctgctgcggctgctgagagaggaagagtatgtggctcctccacgggggcctctgcccacccttcaggtggttcccttgtgacaccgttcatccccagatcactgaggccaggccatgtttggggccttgttctgacagcattctggctgaggctggtcggtagcactcctggctggtttttttctgttcctccccgagaggccctctggcccccaggaaacctgttgtgcagagctcttccccggagacctccacacaccctggctttgaagtggagtctgtgactgctctgcattctctgcttttaaaaaaaccattgcaggtgccagtgtcccatatgttcctcctgacagtttgatgtgtccattctgggcctctcagtgcttagcaagtagataatgtaagggatgtggcagcaaatggaaatgactacaaacactctcctatcaatcacttcaggctacttttatgagttagccagatgcttgtgtatcctcagaccaaactgattcatgtacaaataataaaatgtttactcttttgt

SEQ ID NO: 191845 - DNA, 1065 bp, Homo sapiens
  Payload ID: 17909
  Gene Name: TRAF3 interacting protein 3
  ENST ID: ENST00000367023
  CDS Start-End: 264-812
gagatgacagcgcagcggggattggctgaagccctaagcaacctctactagagcagagagatgagctgtgggctggtgcttctgtggtgaggtggtggtgtttctggagagcagatcagaggcaggggaaaaccacgcagaagcaggagctgaagacctcagaccggcaccagggacagcttaatgaagacaaactgaaggggaaactgagatccttagaaaaccagctatacacctgtacccagaaatactccccttggggaatgaaaaaagtactactggagatggaagaccagaaaaacagctatgagcagaaggccaaggagtcactgcagaaagtgctggaggagaaaatgaatgcagagcagcaactacagagcacacagcgatccctggccctggcagagcagaagtgtgaagagtggaggagccagtatgaggctctgaaggaggactggaggacccttgggacccagcacagggagctggagagccaactccacgtgcttcagtccaaactgcagggagcagatagcagggacttacagatgaaccaggccctgcgatttttggaaaatgagcaccagcaactgcaggccaagattgaatgcctgcaaggggacagagacctgtgcagcttggatacccaggacctacaagatcaactaaaaaggtcagaggcagagaaactcaccctggtgaccagagtacagcagttgcagggtttgcttcaaaatcaatccttacagcttcaagaacaggagaaactcttaacaaagaaaggtcagcaaatttattaccacaaattctaagatattgctcttctcttacctgcctagaggcagcgggatggactacatgacctcctggagtcccagccagttctgggagtctgttaagtccgggatgtgtgggagctttttaaggactgatcattggctctgaggacacttcaactagttagccttctatcttgaggtatataaactgtgaaaaagggtttctattctctctgaaagcacatgtctgtgttgaacatttcaataaatttattttgaactcagg

SEQ ID NO: 191846 - DNA, 2331 bp, Homo sapiens
  Payload ID: 17909
  Gene Name: TRAF3 interacting protein 3
  Uniprot ID: Q9Y228
  ENST ID: ENST00000367024
  CDS Start-End: 517-2172
agagaattccagactgagccagagtagcgaagtcccagtaaaggggcagagagtctgctacctgttgagtctgtttggcctataaataaaccccaaggggttagagctagcaaatgcctgctagttggtgaagctgagataccctcctcccagggtggtgggtaatgaggtcgtgggaggaagagaagcagcagcagctgtgagggggagtccctcttccttcatcagtccctggtctgactccagtgatcagaggaggcaggacacagaatttccaacgctcaggatccagctcatccaaatccagcccaactcagcaaagtgaccagagggttctaggaggataaactacagaagcagccttattgaggtacaattcatgtgcttgtgggtttggatggcacaatctgtgtctgggctaaggaaagcagacttggcaccaacattaaccctgacagatccaggcatctattccaggaactggaagccaagcgcaacaggtgcttggaggtcatcatgatcagcccagaccccaggccctcccctggcttggcccggtgggctgagagctatgaggccaagtgtgagcgcaggcaagagatccgtgaaagccgccgctgccgtcccaatgtgaccacttgccgccaggtggggaagacgctgaggatccaacagagagagcagctccagagagctcgactgcagcagttcttcaggaggaggaacctggagctagaggagaagggcaaagcgcagcatccccaggccagggagcaagggccctccaggcggccaggacaggtgactgtcctcaaggaacccttgtcttgtgccagaaggatttcttctcccagagagcaggtgacaggcaccagctctgaagtctttccagcccagcatcctcctccctcaggcatctgcagggatctgtctgaccacctctcctcacaggctgggggccttcctccacaggacactcccatcaagaagccacccaaacaccaccgtggtactcagacaaaggcagaaggaccaacaattaagaacgatgccagtcagcaaaccaattacggagttgcagttctggataaggaaatcatccagctttctgattacctcaaagaggccctacaaagggagctggtcctaaaacagaaaatggtgattctccaagacctactgtccactctgattcaggcctctgacagctcttggaagggacagcttaatgaagacaaactgaaggggaaactgagatccttagaaaaccagctatacacctgtacccagaaatactccccttggggaatgaaaaaagtactactggagatggaagaccagaaaaacagctatgagcagaaggccaaggagtcactgcagaaagtgctggaggagaaaatgaatgcagagcagcaactacagagcacacagcgatccctggccctggcagagcagaagtgtgaagagtggaggagccagtatgaggctctgaaggaggactggaggacccttgggacccagcacagggagctggagagccaactccacgtgcttcagtccaaactgcagggagcagatagcagggacttacagatgaaccaggccctgcgatttttggaaaatgagcaccagcaactgcaggccaagattgaatgcctgcaaggggacagagacctgtgcagcttggatacccaggacctacaagatcaactaaaaaggtcagaggcagagaaactcaccctggtgaccagagtacagcagttgcagggtttgcttcaaaatcaatccttacagcttcaagaacaggagaaactcttaacaaagaaagatcaggctttgcccgtgtggagtccaaagtccttccctaacgaagtggagcctgagggtacagggaaggagaaagactgggatctcagagaccagctgcaaaagaagactttgcagctccaggccaaggaaaaggagtgcagagaactgcattcagaattagacaacctcagtgacgagtatctctcctgcctgcgtaagctgcagcactgtcgagaagagctgaaccagagccagcagctgcctcccagaaggcaatgtgggcgatggctcccagtgctgatggtggtgattgctgcagcactggcagtgttcctggccaataaagacaacctgatgatctgaataatttgtgacaactgccttgggtgaaaatcagaagcaagcaactcagcgaaaaactcagaaggtttgggtacattacagcttgggttttccaactgacttaggatttctgactttttattaatttcttaacctactgtaaataaacttcacctgacc

SEQ ID NO: 191847 - DNA, 2243 bp, Homo sapiens
  Payload ID: 17909
  Gene Name: TRAF3 interacting protein 3
  Uniprot ID: Q9Y228
  ENST ID: ENST00000367025
  CDS Start-End: 421-2076
acttagatgataccagagagcaagagagaggaactggggtttgcgaaccttgtggctttgtctgtttcctgtttcagcaaggctgctgtgcaaaaagaaagacggtaccaagaagggacgtgttaatggggcccagacctatggattgaaagcgtgtgctttacccatctgctgtcttgctccatctgagaccagagccaagatctgcccaggactggaatgctttcccgagtggcttgagttggagcctgggactaggagcagccttattgaggtacaattcatgtgcttgtgggtttggatggcacaatctgtgtctgggctaaggaaagcagacttggcaccaacattaaccctgacagatccaggcatctattccaggaactggaagccaagcgcaacaggtgcttggaggtcatcatgatcagcccagaccccaggccctcccctggcttggcccggtgggctgagagctatgaggccaagtgtgagcgcaggcaagagatccgtgaaagccgccgctgccgtcccaatgtgaccacttgccgccaggtggggaagacgctgaggatccaacagagagagcagctccagagagctcgactgcagcagttcttcaggaggaggaacctggagctagaggagaagggcaaagcgcagcatccccaggccagggagcaagggccctccaggcggccaggacaggtgactgtcctcaaggaacccttgtcttgtgccagaaggatttcttctcccagagagcaggtgacaggcaccagctctgaagtctttccagcccagcatcctcctccctcaggcatctgcagggatctgtctgaccacctctcctcacaggctgggggccttcctccacaggacactcccatcaagaagccacccaaacaccaccgtggtactcagacaaaggcagaaggaccaacaattaagaacgatgccagtcagcaaaccaattacggagttgcagttctggataaggaaatcatccagctttctgattacctcaaagaggccctacaaagggagctggtcctaaaacagaaaatggtgattctccaagacctactgtccactctgattcaggcctctgacagctcttggaagggacagcttaatgaagacaaactgaaggggaaactgagatccttagaaaaccagctatacacctgtacccagaaatactccccttggggaatgaaaaaagtactactggagatggaagaccagaaaaacagctatgagcagaaggccaaggagtcactgcagaaagtgctggaggagaaaatgaatgcagagcagcaactacagagcacacagcgatccctggccctggcagagcagaagtgtgaagagtggaggagccagtatgaggctctgaaggaggactggaggacccttgggacccagcacagggagctggagagccaactccacgtgcttcagtccaaactgcagggagcagatagcagggacttacagatgaaccaggccctgcgatttttggaaaatgagcaccagcaactgcaggccaagattgaatgcctgcaaggggacagagacctgtgcagcttggatacccaggacctacaagatcaactaaaaaggtcagaggcagagaaactcaccctggtgaccagagtacagcagttgcagggtttgcttcaaaatcaatccttacagcttcaagaacaggagaaactcttaacaaagaaagatcaggctttgcccgtgtggagtccaaagtccttccctaacgaagtggagcctgagggtacagggaaggagaaagactgggatctcagagaccagctgcaaaagaagactttgcagctccaggccaaggaaaaggagtgcagagaactgcattcagaattagacaacctcagtgacgagtatctctcctgcctgcgtaagctgcagcactgtcgagaagagctgaaccagagccagcagctgcctcccagaaggcaatgtgggcgatggctcccagtgctgatggtggtgattgctgcagcactggcagtgttcctggccaataaagacaacctgatgatctgaataatttgtgacaactgccttgggtgaaaatcagaagcaagcaactcagcgaaaaactcagaaggtttgggtacattacagcttgggttttccaactgacttaggatttctgactttttattaatttcttaacctactgtaaataaacttcacctgaccagattgtt

SEQ ID NO: 191848 - DNA, 2058 bp, Homo sapiens
  Payload ID: 17909
  Gene Name: TRAF3 interacting protein 3
  Uniprot ID: Q9Y228
  ENST ID: ENST00000367026
  CDS Start-End: 291-1886
gcccagacctatggattgaaagcgtgtgctttacccatctgctgtcttgctccatctgagaccagagccaagatctgcccaggactggaatgctttcccgagtggcttgagttggagcctgggactaggagcagccttattgaggtacaattcatgtgcttgtgggtttggatggcacaatctgtgtctgggctaaggaaagcagacttggcaccaacattaaccctgacagatccaggcatctattccaggaactggaagccaagcgcaacaggtgcttggaggtcatcatgatcagcccagaccccaggccctcccctggcttggcccggtgggctgagagctatgaggccaagtgtgagcgcaggcaagagatccgtgaaagccgccgctgccgtcccaatgtgaccacttgccgccaggtggggaagacgctgaggatccaacagagagagcagctccagagagctcgactgcagcagttcttcaggaggaggaacctggagctagaggagaagggcaaagcgcagcatccccaggccagggagcaagggccctccaggcggccaggacaggtgacaggcaccagctctgaagtctttccagcccagcatcctcctccctcaggcatctgcagggatctgtctgaccacctctcctcacaggctgggggccttcctccacaggacactcccatcaagaagccacccaaacaccaccgtggtactcagacaaaggcagaaggaccaacaattaagaacgatgccagtcagcaaaccaattacggagttgcagttctggataaggaaatcatccagctttctgattacctcaaagaggccctacaaagggagctggtcctaaaacagaaaatggtgattctccaagacctactgtccactctgattcaggcctctgacagctcttggaagggacagcttaatgaagacaaactgaaggggaaactgagatccttagaaaaccagctatacacctgtacccagaaatactccccttggggaatgaaaaaagtactactggagatggaagaccagaaaaacagctatgagcagaaggccaaggagtcactgcagaaagtgctggaggagaaaatgaatgcagagcagcaactacagagcacacagcgatccctggccctggcagagcagaagtgtgaagagtggaggagccagtatgaggctctgaaggaggactggaggacccttgggacccagcacagggagctggagagccaactccacgtgcttcagtccaaactgcagggagcagatagcagggacttacagatgaaccaggccctgcgatttttggaaaatgagcaccagcaactgcaggccaagattgaatgcctgcaaggggacagagacctgtgcagcttggatacccaggacctacaagatcaactaaaaaggtcagaggcagagaaactcaccctggtgaccagagtacagcagttgcagggtttgcttcaaaatcaatccttacagcttcaagaacaggagaaactcttaacaaagaaagatcaggctttgcccgtgtggagtccaaagtccttccctaacgaagtggagcctgagggtacagggaaggagaaagactgggatctcagagaccagctgcaaaagaagactttgcagctccaggccaaggaaaaggagtgcagagaactgcattcagaattagacaacctcagtgacgagtatctctcctgcctgcgtaagctgcagcactgtcgagaagagctgaaccagagccagcagctgcctcccagaaggcaatgtgggcgatggctcccagtgctgatggtggtgattgctgcagcactggcagtgttcctggccaataaagacaacctgatgatctgaataatttgtgacaactgccttgggtgaaaatcagaagcaagcaactcagcgaaaaactcagaaggtttgggtacattacagcttgggttttccaactgacttaggatttctgactttttattaatttcttaacctactgtaaataaacttcacctgaccagattgttcctca

SEQ ID NO: 191849 - DNA, 1854 bp, Homo sapiens
  Payload ID: 17909
  Gene Name: TRAF3 interacting protein 3
  ENST ID: ENST00000400959
  CDS Start-End: 438-1652
tcagagttcaggggcccacttagatgataccagagagcaagagagaggaactggggtttgcgaaccttgtggctttgtctgtttcctgtttcagcaaggctgctgtgcaaaaagaaagacggtaccaagaagggacgtgttaatggggcccagacctatggattgaaagcgtgtgctttacccatctgctgtcttgctccatctgagaccagagccaagatctgcccaggactggaatgctttcccgagtggcttgagttggagcctgggactaggagcagccttattgaggtacaattcatgtgcttgtgggtttggatggcacaatctgtgtctgggctaaggaaagcagacttggcaccaacattaaccctgacagatccaggcatctattccaggaactggaagccaagcgcaacaggtgcttggaggtcatcatgatcagcccagaccccaggccctcccctggcttggcccggtgggctgagagctatgaggccaagtgtgagcgcaggcaagagatccgtgaaagccgccgctgccgtcccaatgtgaccacttgccgccaggtggggaagacgctgaggatccaacagagagagcagctccagagagctcgactgcagcagttcttcaggaggaggaacctggagctagaggagaagggcaaagcgcagcatccccaggccagggagcaagggccctccaggcggccaggacaggtgacaggcaccagctctgaagtctttccagcccagcatcctcctccctcaggcatctgcagggatctgtctgaccacctctcctcacaggctgggggccttcctccacaggacactcccatcaagaagccacccaaacaccaccgtggtactcagacaaaggcagaaggaccaacaattaagaacgatgccagtcagcaaaccaattacggagttgcagttctggataaggaaatcatccagctttctgattacctcaaagaggccctacaaagggagctggtcctaaaacagaaaatggtgattctccaagacctactgtccactctgattcaggcctctgacagctcttggaagggacagcttaatgaagacaaactgaaggggaaactgagatccttagaaaaccagctatacacctgtacccagaaatactccccttggggaatgaaaaaagtactactggagatggaagaccagaaaaacagctatgagcagaaggccaaggagtcactgcagaaagtgctggaggagaaaatgaatgcagagcagcaactacagagcacacagcgatccctggccctggcagagcagaagtgtgaagagtggaggagccagtatgaggctctgaaggaggactggaggacccttgggacccagcacagggagctggagagccaactccacgtgcttcagtccaaactgcagggagcagatagcagggacttacagatgaaccaggccctgcgatttttggaaaatgagcaccagcaactgcaggccaagattgaatgcctgcaaggggacagagacctgtgcagcttggatacccaggacctacaagatcaactaaaaaggtcagaggcagagaaactcaccctggtgaccagagtacagcagttgcaggaggcagcgggatggactacatgacctcctggagtcccagccagttctgggagtctgttaagtccgggatgtgtgggagctttttaaggactgatcattggctctgaggacacttcaactagttagccttctatcttgaggtatataaactgtgaaaaagggtttctattctctctgaaagcacatgtctgtgttgaacatttcaataaatttattttgaactcag

SEQ ID NO: 191850 - DNA, 791 bp, Homo sapiens
  Payload ID: 17909
  Gene Name: TRAF3 interacting protein 3
  ENST ID: ENST00000477431
  CDS Start-End: 137-607
gaaaaccacgcagaagcaggagctgaagacctcagaccggcaccagggacagcttaatgaagacaaactgaaggggaaactgagatccttagaaaaccagctatacacctgtacccagaaatactccccttggggaatgaaaaaagtactactggagatggaagaccagaaaaacagctatgagcagaaggccaaggagtcactgcagaaagtgctggaggagaaaatgaatgcagagcagcaactacagagcacacagcgatccctggccctggcagagcagaagtgtgaagagtggaggagccagtatgaggctctgaaggaggactggaggacccttgggacccagcacagggagctggagagccaactccacgtgcttcagtccaaactgcagggagcagatagcagggacttacagatgaaccaggccctgcgatttttggaaaatgagcaccagcaactgcaggccaagattgaatgcctgcaaggggacagagacctgtgcagcttggatacccaggacctacaagaggcaatgtgggcgatggctcccagtgctgatggtggtgattgctgcagcactggcagtgttcctggccaataaagacaacctgatgatctgaataatttgtgacaactgccttgggtgaaaatcagaagcaagcaactcagcgaaaaactcagaaggtttgggtacattacagcttgggttttccaactgacttaggatttctgactttttattaatttcttaacctactgtaaataaacttcacctgaccagattg

SEQ ID NO: 191851 - DNA, 1860 bp, Homo sapiens
  Payload ID: 17909
  Gene Name: TRAF3 interacting protein 3
  Uniprot ID: Q9Y228
  ENST ID: ENST00000478359
  CDS Start-End: 404-1465
gagcaagagagaggaactggggtttgcgaaccttgtggctttgtctgtttcctgtttcagcaaggctgctgtgcaaaaagaaagacggtaccaagaagggacgtgttaatggggcccagacctatggattgaaagcgtgtgctttacccatctgctgtcttgctccatctgagaccagagccaagatctgcccaggactggaatgctttcccgagtggcttgagttggagcctgggactaggagcagccttattgaggtacaattcatgtgcttgtgggtttggatggcacaatctgtgtctgggctaaggaaagcagacttggcaccaacattaaccctgacagatccaggcatctattccaggaactggaagccaagcgcaacaggtgcttggaggtcatcatgatcagcccagaccccaggccctcccctggcttggcccggtgggctgagagctatgaggccaagtgtgagcgcaggcaagagatccgtgaaagccgccgctgccgtcccaatgtgaccacttgccgccaggtggggaagacgctgaggatccaacagagagagcagctccagagagctcgactgcagcagttcttcaggaggaggaacctggagctagaggagaagggcaaagcgcagcatccccaggccagggagcaagggccctccaggcggccaggacaggtgactgtcctcaaggaacccttgtcttgtgccagaaggatttcttctcccagagagcaggtgacaggcaccagctctgaagtctttccagcccagcatcctcctccctcaggcatctgcagggatctgtctgaccacctctcctcacaggctgggggccttcctccacaggacactcccatcaagaagccacccaaacaccaccgtggtactcagacaaaggcagaaggaccaacaattaagaacgatgccagtcagcaaaccaattacggagttgcagttctggataaggaaatcatccagctttctgattacctcaaagaggccctacaaagggagctggtcctaaaacagaaaatggtgattctccaagacctactgtccactctgattcaggcctctgacagctcttggaagggacagcttaatgaagacaaactgaaggggaaactgagatccttagaaaaccagctatacacctgtacccagaaatactccccttggggaatgaaaaaagtactactggagatggaagaccagaaaaacagctatgagcagaaggccaaggagtcactgcagaaagtgctggaggagaaaatgaatgcagagcagcaactacagagcacacagcgatccctggccctggcagagcagaagtgtgaagagtggaggagccagtatgaggctctgaaggaggactggaggacccttgggacccagcacagggagctggagagccaactccacgtgcttcagtccaaactgcagatcaactaaaaaggtcagaggcagagaaactcaccctggtgaccagagtacagcagttgcagggtttgcttcaaaatcaatccttacagcttcaagaacaggagaaactcttaacaaagaaaggtcagcaaatttattaccacaaattctaagatattgctcttctcttacctgcctagaggcagcgggatggactacatgacctcctggagtcccagccagttctgggagtctgttaagtccgggatgtgtgggagctttttaaggactgatcattggctctgaggacacttcaactagttagccttctatcttgaggtatataaactgtgaaaaagggtttctattctctctgaaagcacatgtctgtgttgaacatttcaataaatttattttgaactcag

SEQ ID NO: 191852 - DNA, 499 bp, Homo sapiens
  Payload ID: 17909
  Gene Name: TRAF3 interacting protein 3
  ENST ID: ENST00000487271
  CDS Start-End: 206-499
agaggcaggggaaaaccacgcagaagcaggagctgaagacctcagaccggcaccagggacagcttaatgaagacaaactgaaggggaaactgagatccttagaaaaccagctatacacctgtacccagctcaggatttggcacacagaagctcaatgtgtatttgttgaattgcatcaaatttacagaaatactccccttggggaatgaaaaaagtactactggagatggaagaccagaaaaacagctatgagcagaaggccaaggagtcactgcagaaagtgctggaggagaaaatgaatgcagagcagcaactacagagcacacagcgatccctggccctggcagagcagaagtgtgaagagtggaggagccagtatgaggctctgaaggaggactggaggacccttgggacccagcacagggagctggagagccaactccacgtgcttcagtccaaactgcagggagcagatagcagggacttacagatgaaccag

SEQ ID NO: 191853 - DNA, 540 bp, Homo sapiens
  Payload ID: 17909
  Gene Name: TRAF3 interacting protein 3
  ENST ID: ENST00000479796
  CDS Start-End: 463-540
gtgcaaaaagaaagacggtaccaagaagggacgtgttaatggggcccagacctatggattgaaagcgtgtgctttacccatctgctgtcttgctccatctgagaccagagccaagatctgcccaggactggaatgctttcccgagtggcttgagttggagcctgggactaggagtccctggtctgactccagtgatcagaggaggcaggacacagaatttccaacgctcaggatccagctcatccaaatccagcccaactcagcaaagtgaccagagggttctaggaggataaactacagaagcagccttattgaggtacaattcatgtgcttgtgggtttggatggcacaatctgtgtctgggctaaggaaagcagacttggcaccaacattaaccctgacagatccaggcatctattccaggaactggaagccaagcgcaacaggtgcttggaggtcatcatgatcagcccagaccccaggccctcccctggcttggcccggtgggctgagagctatgaggccaagtgtgagcgcagg

SEQ ID NO: 191854 - DNA, 551 bp, Homo sapiens
  Payload ID: 17909
  Gene Name: TRAF3 interacting protein 3
  ENST ID: ENST00000471368
  CDS Start-End: 1-210
ctgcaaggggacagagacctgtgcagcttggatacccaggacctacaagatcaactaaaaaggtcagaggcagagaaactcaccctggtgaccagagtacagcagttgcagggtttgcttcaaaatcaatccttacagcttcaagaacaggagaaactcttaacaaagaaagtgcagagaactgcattcagaattagacaacctcagtgacgagtatctctcctgcctgcgtaagctgcagcactgtcgagaagagctgaaccagagccagcagctgcctcccagaaggcaatgtgggcgatggctcccagtgctgatggtggtgattgctgcagcactggcagtgttcctggccaataaagacaacctgatgatctgaataatttgtgacaactgccttgggtgaaaatcagaagcaagcaactcagcgaaaaactcagaaggtttgggtacattacagcttgggttttccaactgacttaggatttctgactttttattaatttcttaacctactgtaaataaacttcacctgaccagattgttcctca

SEQ ID NO: 191855 - DNA, 811 bp, Homo sapiens
  Payload ID: 17910
  Gene Name: trafficking protein particle complex 1
  Uniprot ID: Q9Y5R8
  ENST ID: ENST00000303731
  CDS Start-End: 117-554
gttccggtgagtccgtgggtggggtccccacctggttggaaggctgtgggtccgggaacccgagcccaaggagtgggggcggccccggagcgaggctcacactccctgccctgcagatgactgtccacaacctgtacctgtttgaccggaatggagtgtgtctgcactacagcgaatggcaccgcaagaagcaagcagggattcccaaggaggaggagtataagctgatgtacgggatgctcttctctatccgctcgtttgtcagcaagatgtccccgctagacatgaaggatggcttcctggccttccaaactagccgttacaaactccattactacgagacgcccactgggatcaaagttgtcatgaatactgacttgggcgtgggacccatccgagatgtgctgcaccacatctacagtgcgctgtatgtggagctggtggtgaagaatcccctgtgcccgctgggccaaactgtgcaaagtgagctctttcgctcccgactggactcctatgttcgctctctgcccttcttctccgcccgggctggctgaagcaacctacctcaagtctcaggagaattcatgtctgcctggggcccttccgaacctgtgccaactaagggcccccactgtaagcccccgcacccccaccccctgcccagagcaacagcctaaaggcctgccctgatgctctcctcctaccagagtgaagcccacagagtccctccacctccacaccaggccctctctccagttttatcccctgcctaatgctgcgagaagcacagaataaactttttgtcactctc

SEQ ID NO: 191856 - DNA, 759 bp, Homo sapiens
  Payload ID: 17910
  Gene Name: trafficking protein particle complex 1
  Uniprot ID: Q9Y5R8
  ENST ID: ENST00000540486
  CDS Start-End: 61-498
aaggggcggagctccgtggaaaccggaagtaactcttgacgggcactcggagcagttccgatgactgtccacaacctgtacctgtttgaccggaatggagtgtgtctgcactacagcgaatggcaccgcaagaagcaagcagggattcccaaggaggaggagtataagctgatgtacgggatgctcttctctatccgctcgtttgtcagcaagatgtccccgctagacatgaaggatggcttcctggccttccaaactagccgttacaaactccattactacgagacgcccactgggatcaaagttgtcatgaatactgacttgggcgtgggacccatccgagatgtgctgcaccacatctacagtgcgctgtatgtggagctggtggtgaagaatcccctgtgcccgctgggccaaactgtgcaaagtgagctctttcgctcccgactggactcctatgttcgctctctgcccttcttctccgcccgggctggctgaagcaacctacctcaagtctcaggagaattcatgtctgcctggggcccttccgaacctgtgccaactaagggcccccactgtaagcccccgcacccccaccccctgcccagagcaacagcctaaaggcctgccctgatgctctcctcctaccagagtgaagcccacagagtccctccacctccacaccaggccctctctccagttttatcccctgcctaatgctgcgagaagcacagaataaactttttgtcactctctgcg

SEQ ID NO: 191857 - DNA, 648 bp, Homo sapiens
  Payload ID: 17910
  Gene Name: trafficking protein particle complex 1
  ENST ID: ENST00000571739
  CDS Start-End: 24-152
gacgggcactcggagcagttccgatgactgtccacaacctgtacctgtttgaccggaatggagtgtgtctgcactacagcgaatggcaccgcaagaagcaagcagggattcccaaggaggaggaaggatggcttcctggccttccaaactagccgttacaaactccattactacgagacgcccactgggatcaaagttgtcatgaatactgacttgggcgtgggacccatccgagatgtgctgcaccacatctacagtgcgctgtatgtggagctggtggtgaagaatcccctgtgcccgctgggccaaactgtgcaaagtgagctctttcgctcccgactggactcctatgttcgctctctgcccttcttctccgcccgggctggctgaagcaacctacctcaagtctcaggagaattcatgtctgcctggggcccttccgaacctgtgccaactaagggcccccactgtaagcccccgcacccccaccccctgcccagagcaacagcctaaaggcctgccctgatgctctcctcctaccagagtgaagcccacagagtccctccacctccacaccaggccctctctccagttttatcccctgcctaatgctgcgagaagcacagaataaactttttgtcactctct

SEQ ID NO: 191858 - DNA, 306 bp, Homo sapiens
  Payload ID: 17910
  Gene Name: trafficking protein particle complex 1
  ENST ID: ENST00000571947
  CDS Start-End: 22-306
gcagttccggtgagtccgtggatgactgtccacaacctgtacctgtttgaccggaatggagtgtgtctgcactacagcgaatggcaccgcaagaagcaagcagggattcccaaggaggaggagtataagctgatgtacgggatgctcttctctatccgctcgtttgtcagcaagatgtccccgctagacatgaaggatggcttcctggccttccaaactagccgttacaaactccattactacgagacgcccactgggatcaaagttgtcatgaatactgacttgggcgtgggacccatccgagat

SEQ ID NO: 191859 - DNA, 561 bp, Homo sapiens
  Payload ID: 17910
  Gene Name: trafficking protein particle complex 1
  ENST ID: ENST00000575639
  CDS Start-End: 93-221
tccccacctggttggaaggctgtgggtccgggaacccgagcccaaggagtgggggcggccccggagcgaggctcacactccctgccctgcagatgactgtccacaacctgtacctgtttgaccggaatggagtgtgtctgcactacagcgaatggcaccgcaagaagcaagcagggattcccaaggaggaggaaggatggcttcctggccttccaaactagccgttacaaactccattactacgagacgcccactgggatcaaagttgtcatgaatactgacttgggcgtgggacccatccgagatgtgctgcaccacatctacagtgcgctgtatgtggagctggtggtgaagaatcccctgtgcccgctgggccaaactgtgcaaagtgagctctttcgctcccgactggactcctatgttcgctctctgcccttcttctccgcccgggctggctgaagcaacctacctcaagtctcaggagaattcatgtctgcctggggcccttccgaacctgtgccaactaagggcccccactgtaagcccccgcacccccacccc

SEQ ID NO: 191860 - DNA, 409 bp, Homo sapiens
  Payload ID: 17910
  Gene Name: trafficking protein particle complex 1
  ENST ID: ENST00000572656
  CDS Start-End: 185-409
cgagcgcctggccgcgcgtgcgcggctccggtggccacagattggctgagggagggaggcggagtctgacaagcagcactggagcggagttaatgcccagccgcggccgagcgagaacccccctaaggggcggagctccgtggaaaccggaagtaactcttgacgggcactcggagcagttccgatgactgtccacaacctgtacctgtttgaccggaatggagtgtgtctgcactacagcgaatggcaccgcaagaagcaagcagggattcccaaggaggaggagtataagctgatgtacgggatgctcttctctatccgctcgtttgtcagcaagatgtccccgctagacatgaaggatggcttcctggccttccaaactagccgttacaaactccattactacgag

SEQ ID NO: 191861 - DNA, 6976 bp, Homo sapiens
  Payload ID: 17911
  Gene Name: trafficking protein particle complex 10
  Uniprot ID: P48553
  ENST ID: ENST00000291574
  CDS Start-End: 176-3955
ccggaagtggctgaggccggcagcagcgggcggcagctgcggcgcaaccggctccggagctgcctggcgcggccgggcgggcggcgccgctcaggctcgggctccggctgggcccggcgcggcctcggggctgcccatggggcgcggggggccgggccggtgacgccggacgcccatggacgcctctgaggagccgctgccgccggtgatctacaccatggagaacaagcccatcgtcacctgtgctggagatcagaatttatttacctctgtttatccaacgctctctcagcagcttccaagagaaccaatggaatggagaaggtcctatggccgggctccgaagatgattcacctagagtctaactttgttcaattcaaagaggagctgctgcccaaagaaggaaacaaagctctgctcacgtttcccttcctccatatttactggacagagtgctgtgataccgaagtgtataaagctacagtaaaagatgacctcaccaagtggcagaatgttctgaaggctcatagctctgtggactggttaatagtgatagttgaaaatgatgccaagaaaaaaaacaaaaccaacatccttccccgaacctctattgtggacaaaataagaaatgatttttgtaataaacagagtgacaggtgtgttgtgctctccgaccccttgaaggactcttctcgaactcaggaatcctggaatgccttcctgaccaaactcaggacattgcttcttatgtcttttaccaaaaacctaggcaagtttgaggatgacatgagaaccttgagggagaagaggactgagccaggctggagcttttgtgaatatttcatggttcaggaggagcttgcctttgttttcgagatgctgcagcagttcgaggacgccctggtgcagtacgacgaactggacgccctcttctctcagtatgtggtcaacttcggggccggggatggtgccaactggctgacttttttctgccagccagtgaagagctggaacggattgatcctccgaaaacccatagatatggagaagcgggaatcgatccagaggcgagaagccaccctgttagatctgcgcagttacctgttctctcgccagtgcaccttgctgctcttcctgcagaggccgtgggaggtggcccagcgcgccctagagctgctgcacaactgcgtgcaggaactgaagctcttagaagtctctgtcccacctggtgctctggactgctgggtgtttctgagctgtctggaggtgttgcagaggatagaaggctgctgtgaccgggcacagatcgactcaaacattgcccacactgtggggctatggagctatgccacagaaaagttaaagtccttgggctatctatgtggacttgtgtcagagaaaggacctaactcagaagatctcaacaggacagttgaccttttggcaggtttgggagctgagcgaccagaaacagccaacacagctcagagtccttataagaaactgaaagaagcattatcgtcagtggaagcttttgaaaaacactacttagatttgtcccatgccaccattgaaatgtatacaagcattgggaggattcgatctgctaagtttgttggaaaagatctggcagagttttacatgaggaaaaaggctccacaaaaggcagaaatctatcttcaaggagcactgaaaaactacctggctgagggctgggcactccccatcacacacacaaggaagcagctggccgaatgtcaaaagcaccttggacaaattgaaaactacctgcagaccagcagcctcttagccagtgaccaccacctcactgaagaggagcgcaagcacttctgccaggagatacttgactttgccagccagccgtcagacagcccaggtcataagatagtgctacccatgcattcctttgcacaactgcgagatctccattttgatccctccaatgccgtggtccacgtgggcggcgttttgtgcgttgagataaccatgtacagccagatgcctgtgcctgttcacgtggagcagattgtggtcaatgtccacttcagcattgagaaaaacagctaccggaagactgcggagtggcttaccaagcacaagacgtccaatgggatcattaactttccacccgagaccgcacctttccctgtatcccaaaacagtttgcccgcgctggagttgtatgaaatgtttgagagaagcccatctgataactccttgaacacgactgggattatctgcagaaacgtccacatgctcctgagaaggcaggagagcagctcctctctagagatgccctcaggggtggctctggaggagggtgcccacgtgctgaggtgcagccacgtgaccctggaaccaggggccaaccagataacattcaggactcaggccaaggaacctggaacgtatacactcaggcagctgtgcgcctcggtgggctccgtgtggttcgtcctccctcacatctaccccattgtgcagtacgacgtgtactcacaggagccccagctgcacgtggagccgctggctgatagccttctggcaggcattcctcagagagtcaagttcactgtcactaccggccattatacgataaagaatggagacagcctgcagcttagcaatgccgaagccatgctcatcctgtgccaggcggagagcagggctgtggtctactccaacacgagagaacagtcttctgaggccgcgctccggattcagtcctccgacaaggtcacgagcatcagtctgcctgttgcgcctgcgtaccacgtgatcgaatttgaactggaagttctctctttaccttcagccccagcactcggaggggagagtgacatgctggggatggcagagccccacaggaagcataaggacaaacagagaactggccgctgcatggttaccacagaccacaaagtgtcgattgactgcccgtggtccatctactccacagtcatcgcactgaccttcagcgtacccttcaggaccacacacagcctcctgtcctcaggaacacggaaatatgttcaagtttgtgtccagaatttgtcagaacttgactttcagctgtcagatagttatcttgtagataccggtgatagtaccgacctgcaactagtaccactgaacacgcagtcccagcagcccatctacagcaagcagtcggtgttcttcgtctgggaactcaagtggacagaagagcctcccccttctctgcattgccggttctctgttggattttccccagcttctgaggaacagctgtctatctccttaaagccgtatacttatgaatttaaagtggaaaatttttttacattatacaacgtgaaggctgagatctttcccccttcgggaatggagtattgcagaacaggctccctctgctccctggaggttttgatcacgaggctctcagacctcttggaggtggataaagatgaagcactgactgaatctgatgagcatttttcgacaaagcttatgtatgaagttgtcgacaacagtagcaactgggcagtgtgtgggaaaagctgcggtgtcatctccatgccagtggctgctcgggccactcacagggtccacatggaagtgatgccgctcttcgccgggtatctccccctgcccgacgtcaggctgttcaagtacctcccccatcattctgcacactcctcccaactggacgctgacagctggatagaaaacgacagcctgtcagtagacaagcacggggacgaccagccggacagcagcagcctcaagagcaggggcagcgtgcattcggcctgcagcagcgagcacaaaggcctacccatgccccggctgcaggcactgccggccggccaggtcttcaactccagctcgggcacacaagtcctggtcatccccagccaagatgaccacgtcctggaagtcagtgtaacatgacaacgccagggtgaacacacgccacttcccagctaggagtgcactttatgggactgtgactggactcttccgttctggctccagccagaccttcagtggtcctgcctggccgtggggacatcagagagtgtcatcacgcagctggccagctgagttctgttgttgttttcatgccgcctgtgatctcagattcctgcttttctcaccccgtccccatgctggtgtccgacgccgcttactcagagccctggcctccctccccctacctcacacgctgctcatgaaagtttccacccacgctgtctccacggaacagcctccgtctgctggctcttcgtggaaggccatttgtctttcaggtagacactcagcagccctcacggtcttagtgacgtgtgtgcctttctggtcacacagctgcccagtttcctgatcggggtggatttgtgtcccctaaggggtaaaacagccgtttaccgcagatcctctcattgtgcttttctagaataacacccttctaggggaggcgggtgggggagggagggatcataaccccttctgtgccttgggatgccggagctgggggacctggaggcccatcagccggagccacgtgaaaggtactgaagaaagctgagacccggctgtgaggagcgcctcagcggtgaggtggtttagggataaatgtttctggaaccctgtggtcccccataatgttgatagaatatcatatgcactgggagttaaatatatttaatttaatgatcattatatatgtgggggttaatatgttgtttttctgtccctttaaagtctttacatgtaattgtagctgtataatcgttatttttcttttgcatcttaagtcttagaaattaagatattccatcgtgaggatgagagaggtcctcagtgtgtttttggtctggttgtagggaaggactcaagtcctggaatgtcctccactggtctactgagttgcagtcacactgttccaatggattatttgctttcggttgtaaatttaattgtacatatggttgatttattatttttaaaaatacagactaactgatgtaatgtttatgtataagttgcaccaaaaatcaaggacaaaaataagtgtgtttgtttttacaggtgtgaaagtcacagcttgtaaataagtgttgtatgtattaaaccttttccagttctccaaagcgatgtatttttgtacacttgaaatagagtactcttaatttactgggcaaatgtgcttggaattgaacttgacaagattagctcaagcagatagagtcgggtccagcagtgggtggccctcgtgtgaatccccgtggatgtgcaagttgtggagagaaggagcaccgggttcctgcccagcactgtgcttgcgggaggcggtggggcatgggaggaaggaggcacagaccggggaaatatgacagccgtcatttccagtattctctgtgttgtcttttagctcattcaataaataaaggtggtgtgatttttttttcctcctgtctttttcatttgtagaaactggagacgtgtaaagaagataaataattgtgtaattaaactttccagaaatttatcttcctcatgtgcagtttaacaaacttggtcaaactagttagcaaattagaacttcagaatctaatgatagtttagggtttctaaaataaggttttttattgtaaaaattgacgattgccctgcatttctaccaagtcctgtgaataaagagatgggagatttgattccgtcagaagagactgtaatccgtgtcgtcagcctgggagccttccccagtgtaatgtagctttctctcttaccttctggaagagggaatgtttcatttattactgtttgattttcttgtatctggttctactcccaggatgaaattatccaactacatatatatttagaggaagaaagtgaaggggaaatttaaaatgtttacggcgcttaattgcctggaaatgaaatgaaatcaaatttatcagtttttttccccctaattacccaaaagatcttttgcaaactatgttacatgaatgcttctgcctctttaagacaaagaagaatgtcacccaaaattgtcatttttttcttaatgttcatcataaaagtcctaaaagagtaactgtaattggatgtttattgtttttatctaaagtaaggtgtatgtgtttgagacaagctggttttgttgataaagagatgttaaataattgtgaagccagatatgcaatgtgtatctgaaaagcaaggaatttgcagccgttttacaaatatctgtggaacatgtaaatactgtcaaatggaaaataaaataagttataatttttgtgaatttcatgggatgtcctatgattggaaaaattataactcttctgattctaatgtggaaattgttgtatttaatctgaaaatgactttacctacaacagttccattgtcagcacagcctaggaaggtcagatcctgtattaattactcttagtggagatgccagatatcccatacagaattagcagagaaaatacacacaggcttctattcaaattttctttagtgcttaaaattaagttttaaaatgaaatcagacactgcaggtttgtatataaaatgaaaagctatactactttttacaaaagggcaaactgggctgatgtaaatgttttactttcaactgtgttctttaaaataaatcctacctggtttttaaattttatttttcatgaaaatgctcctttctctacatttattcatcctatatacatcaggctgtaagaccccccccagtcatcattaatacaatgtgttgggattctgtgactggaaaaggtgacaagttggtgactttgacactgcaggtattccattttcatggtttactatgaaaagtcatttttcatattatgtaatatattgttagattaaaaccattgtattaagactttaaaatgtaagcattgtaattctgaaaatacacattttaagaagaaa

SEQ ID NO: 191862 - DNA, 1763 bp, Homo sapiens
  Payload ID: 17911
  Gene Name: trafficking protein particle complex 10
  Uniprot ID: P48553
  ENST ID: ENST00000380221
  CDS Start-End: 176-1006
ccggaagtggctgaggccggcagcagcgggcggcagctgcggcgcaaccggctccggagctgcctggcgcggccgggcgggcggcgccgctcaggctcgggctccggctgggcccggcgcggcctcggggctgcccatggggcgcggggggccgggccggtgacgccggacgcccatggacgcctctgaggagccgctgccgccggtgatctacaccatggagaacaagcccatcgtcacctgtgctggagatcagaatttatttacctctgtttatccaacgctctctcagcagcttccaagagaaccaatggaatggagaaggtcctatggccgggctccgaagatgattcacctagagtctaactttgttcaattcaaagaggagctgctgcccaaagaaggaaacaaagctctgctcacgtttcccttcctccatatttactggacagagtgctgtgataccgaagtgtataaagctacagtaaaagatgacctcaccaagtggcagaatgttctgaaggctcatagctctgtggactggttaatagtgatagttgaaaatgatgccaagaaaaaaaacaaaaccaacatccttccccgaacctctattgtggacaaaataagaaatgatttttgtaataaacagagtgacaggtgtgttgtgctctccgaccccttgaaggactcttctcgaactcaggaatcctggaatgccttcctgaccaaactcaggacattgcttcttatgtcttttaccaaaaacctaggcaagtttgaggatgacatgagaaccttgagggagaagaggactgagccaggctggagcttttgtgaatatttcatggttcaggaggagcttgcctttgttttcgagatgctgcagcagttcgaggacgccctggtgcagtacgacgaactggacgccctcttctctcagtatgtggtcaacttcggggccgggggtataaaatgtcctttccacaactcagtggcctgctggtgatgcttcgattctgtccctcgttagaatcagagtggacgtccctttgccttccatccaggggttatctttggaatgctcgagtgctcattgctgtgaacttataaaatgcccttgggtgttcatctttcttttgcacttttaaataatatcttaagctcctttacaattaaagaattagcacagtgaaaccatacacagagagaaacattggttattgtcctcagtgtttttcgctgatacttattttgatgaaagtgataccacgttatatagctgtttctctgtcgctcctttttgttactcacagcccatcctgggcatctctccaggttagcaggtggggtttggagttgtttttgttacaattggtattcctggcttgattccattacctggtgttggacattgggttcttttatgcttcttgccaccacaagcagtgctgtagtgggcatctctgccaggtgttctttttgagaacccttgtcaccatgtgtgaaggaaggagtaattttgaggagccctggtgtcagcaggagaacctggagggagatgaagtgtggggacggtcagttctagctgtgagcactgtcctcactctggaactcatcagtggcgccgatggatactggctcatagtgcttctgaagatcaggtctggatatctcactctcctgagatgccagtatagacacagaaccaaagcaaagtgtttactaagtaaaaaaataaaataaaaaaacacttctatttctta

SEQ ID NO: 191863 - DNA, 5267 bp, Homo sapiens
  Payload ID: 17911
  Gene Name: trafficking protein particle complex 10
  ENST ID: ENST00000422875
  CDS Start-End: 170-967
gtggctgaggccggcagcagcgggcggcagctgcggcgcaaccggctccggagctgcctggcgcggccgggcgggcggcgccgctcaggctcgggctccggctgggcccggcgcggcctcggggctgcccatggggcgcggggggccgggccggtgacgccggacgcccatggacgcctctgaggagccgctgccgccggtgatctacaccatggagaacaagcccatcgtcacctgtgctggagatcagaatttatttacctctgtttatccaacgctctctcagcagcttccaagagaaccaatggaatggagaaggtcctatggccgggctccgaagatgattcacctagagtctaactttgttcaattcaaagaggagctgctgcccaaagaaggaaacaaagctctgctcacgtttcccttcctccatatttactggacagagtgctgtgataccgaagtgtataaagctacagtaaaagatgacctcaccaagtggcagaatgttctgaaggctcatagctctgtggactggttaatagtgatagttgaaaatgatgccaagaaaaaaaacaaaaccaacatccttccccgaacctctattgtggacaaaataagaaatgatttttgtaataaacagagtgacaggtgtgttgtgctctccgaccccttgaaggactcttctcgaactcaggaatcctggaatgccttcctgaccaaactcaggacattgcttcttatgtcttttaccaaaaacctaggcaagtttgaggatgacatgagaaccttgagggagaagaggactgagccaggctggagcttttgtgaatatttcatggttcaggaggagcttgcctttgttttcgagatgctgcagcagttcgaggacgccctggtgcagtacgacgaactggacgccctcttctctcagtatgtggtcaacttcggggccgggggagcttgactcagggacgtgacgtggttgagttagggaaataaggaaggaatatgtaatctaaggaagaccaaaaaacaccaggatggtcagagcaggctgcactccagcccacagatggtgccaactggctgacttttttctgccagccagtgaagagctggaacggattgatcctccgaaaacccatagatatggagaagcgggaatcgatccagaggcgagaagccaccctgttagatctgcgcagttacctgttctctcgccagtgcaccttgctgctcttcctgcagaggccgtgggaggtggcccagcgcgccctagagctgctgcacaactgcgtgcaggaactgaagctcttagaagtctctgtcccacctggtgctctggactgctgggtgtttctgagctgtctggaggtgttgcagaggatagaaggctgctgtgaccgggcacagatcgactcaaacattgcccacactgtggggctatggagctatgccacagaaaagttaaagtccttgggctatctatgtggacttgtgtcagagaaaggacctaactcagaagatctcaacaggacagttgaccttttggcaggtttgggagctgagcgaccagaaacagccaacacagctcagagtccttataagaaactgaaagaagcattatcgtcagtggaagcttttgaaaaacactacttagatttgtcccatgccaccattgaaatgtatacaagcattgggaggattcgatctgctaagtttgttggaaaagatctggcagagttttacatgaggaaaaaggctccacaaaaggcagaaatctatcttcaaggagcactgaaaaactacctggctgagggctgggcactccccatcacacacacaaggaagcagctggccgaatgtcaaaagcaccttggacaaattgaaaactacctgcagaccagcagcctcttagccagtgaccaccacctcactgaagaggagcgcaagcacttctgccaggagatacttgactttgccagccagccgtcagacagcccaggtcataagatagtgctacccatgcattcctttgcacaactgcgagatctccattttgatccctccaatgccgtggtccacgtgggcggcgttttgtgcgttgagataaccatgtacagccagatgcctgtgcctgttcacgtggagcagattgtggtcaatgtccacttcagcattgagaaaaacagctaccggaagactgcggagtggcttaccaagcacaagacgtccaatgggatcattaactttccacccgagaccgcacctttccctgtatcccaaaacagtttgcccgcgctggagttgtatgaaatgtttgagagaagcccatctgataactccttgaacacgactgggattatctgcagaaacgtccacatgctcctgagaaggcaggagagcagctcctctctagagatgccctcaggggtggctctggaggagggtgcccacgtgctgaggtgcagccacgtgaccctggaaccaggggccaaccagataacattcaggactcaggccaaggaacctggaacgtatacactcaggcagctgtgcgcctcggtgggctccgtgtggttcgtcctccctcacatctaccccattgtgcagtacgacgtgtactcacaggagccccagctgcacgtggagccgctggctgatagccttctggcaggcattcctcagagagtcaagttcactgtcactaccggccattatacgataaagaatggagacagcctgcagcttagcaatgccgaagccatgctcatcctgtgccaggcggagagcagggctgtggtctactccaacacgagagaacagtcttctgaggccgcgctccggattcagtcctccgacaaggtcacgagcatcagtctgcctgttgcgcctgcgtaccacgtgatcgaatttgaactggaagttctctctttaccttcagccccagcactcggaggggagagtgacatgctggggatggcagagccccacaggaagcataaggacaaacagagaactggccgctgcatggttaccacagaccacaaagtgtcgattgactgcccgtggtccatctactccacagtcatcgcactgaccttcagcgtacccttcaggaccacacacagcctcctgtcctcaggaacacggaaatatgttcaagtttgtgtccagaatttgtcagaacttgactttcagctgtcagatagttatcttgtagataccggtgatagtaccgacctgcaactagtaccactgaacacgcagtcccagcagcccatctacagcaagcagtcggtgttcttcgtctgggaactcaagtggacagaagagcctcccccttctctgcattgccggttctctgttggattttccccagcttctgaggaacagctgtctatctccttaaagccgtatacttatgaatttaaagtggaaaatttttttacattatacaacgtgaaggctgagatctttcccccttcgggaatggagtattgcagaacaggctccctctgctccctggaggttttgatcacgaggctctcagacctcttggaggtggataaagatgaagcactgactgaatctgatgagcatttttcgacaaagcttatgtatgaagttgtcgacaacagtagcaactgggcagtgtgtgggaaaagctgcggtgtcatctccatgccagtggctgctcgggccactcacagggtccacatggaagtgatgccgctcttcgccgggtatctccccctgcccgacgtcaggctgttcaagtacctcccccatcattctgcacactcctcccaactggacgctgacagctggatagaaaacgacagcctgtcagtagacaagcacggggacgaccagccggacagcagcagcctcaagagcaggggcagcgtgcattcggcctgcagcagcgagcacaaaggcctacccatgccccggctgcaggcactgccggccggccaggtcttcaactccagctcgggcacacaagtcctggtcatccccagccaagatgaccacgtcctggaagtcagtgtaacatgacaacgccagggtgaacacacgccacttcccagctaggagtgcactttatgggactgtgactggactcttccgttctggctccagccagaccttcagtggtcctgcctggccgtggggacatcagagagtgtcatcacgcagctggccagctgagttctgttgttgttttcatgccgcctgtgatctcagattcctgcttttctcaccccgtccccatgctggtgtccgacgccgcttactcagagccctggcctccctccccctacctcacacgctgctcatgaaagtttccacccacgctgtctccacggaacagcctccgtctgctggctcttcgtggaaggccatttgtctttcaggtagacactcagcagccctcacggtcttagtgacgtgtgtgcctttctggtcacacagctgcccagtttcctgatcggggtggatttgtgtcccctaaggggtaaaacagccgtttaccgcagatcctctcattgtgcttttctagaataacacccttctaggggaggcgggtgggggagggagggatcataaccccttctgtgccttgggatgccggagctgggggacctggaggcccatcagccggagccacgtgaaaggtactgaagaaagctgagacccggctgtgaggagcgcctcagcggtgaggtggtttagggataaatgtttctggaaccctgtggtcccccataatgttgatagaatatcatatgcactgggagttaaatatatttaatttaatgatcattatatatgtgggggttaatatgttgtttttctgtccctttaaagtctttacatgtaattgtagctgtataatcgttatttttcttttgcatcttaagtcttagaaattaagatattccatcgtgaggatgagagaggtcctcagtgtgtttttggtctggttgtagggaaggactcaagtcctggaatgtcctccactggtctactgagttgcagtcacactgttccaatggattatttgctttcggttgtaaatttaattgtacatatggttgatttattatttttaaaaatacagactaactgatgtaatgtttatgtataagttgcaccaaaaatcaaggacaaaaataagtgtgtttgtttttacaggtgtgaaagtcacagcttgtaaataagtgttgtatgtattaaaccttttccagttctccaaa

SEQ ID NO: 191864 - DNA, 4552 bp, Homo sapiens
  Payload ID: 17912
  Gene Name: trafficking protein particle complex 11
  Uniprot ID: Q7Z392
  ENST ID: ENST00000334690
  CDS Start-End: 203-3604
aaagtgcttcctgtgccgggggaggtgggtacagggaagtctcgcctgttggaactggctgtggggctgcggcggtggggacgggccacggcgttctgtgacatccccccgcctcccctcgtcttctcccggctggcggcgaccggcctcagctgcagcgggcccggggcgtggggcctgggttttttgtgacatcgtaaacatgagccccacacagtgggacttccctgtggaattatgttgccggcctatggcctttgttactctaacgggcctggatgtagtttataatgcagtccatcgagctgtctgggacgccttctgtgcaaatcggagagctgatcgagtaccaatttctttcaaggtgctcccaggtgaccatgagtatcccaaatgtagacccaagagaacttcatatgagtggtacattcctaaagggatcttaaagactggctggatgaataagcatctgaatctggtgccagccctggtggttgtgttctatgaactggactgggatgagcctcagtggaaagaaaagcagtctgagtgcgccaccagagtggaaatagtcaggcaaagtttacaaggaagaaacacaaaagttgcagtggttctgattcagaagaaaacccctttgcccccaggagaagatgtcattgcttcagaaagggctgcagctttatgcaatgcatgtgaactctcaggaaagtctttgtttgtactgccgcacactgaccaccttgtgggttatattataagattggaaaatgccttttatgaacatgcacagacttattactacactgagatcagaagagtgaaatctcataaagaatttttgaataaaacaacacaccagcttttatttgttaggcatcagttcaaaatagctttcttcagtgagttgaaacaagatacacaaaatgcgctgaagaattataggaccgcctataatcttgtacacgaattgagagcccatgaaactaatattctggaaattaagactatggcaggatttataaactacaagatctgtaggctgtgttttcaacacaacaccccattggatgcaattgctcagttccgaaaacacatcgacttgtgtaagaaaaagattggaagtgcagagctgtcttttgagcatgatgcatggatgtctaaacaattccaggcctttggagatttatttgatgaagctattaagttagggttaacagctattcaaactcagaatcctggtttctattaccagcaggcagcatactatgcccaggagcggaaacagcttgcaaaaaccctctgtaaccacgaagcttctgtaatgtatcccaatcctgatcccttagaaacacaaacaggcgttcttgacttttatggacaaagatcatggcgacaaggaatactaagttttgatctttctgatcctgaaaaagaaaaggtgggaattcttgccattcagctgaaggagagaaatgttgttcactctgagataatcataactcttctgagcaatgctgttgcacagttcaagaagtataagtgcccgcgaatgaaaagtcacctaatggttcagatgggagaggaatattattacgcaaaggattataccaaagctttgaagttgctggattatgtgatgtgtgattatcggagtgaaggatggtggactctgctcacttctgtattaactacagctctgaagtgctcctacctcatggcccaattaaaggattacattacttactccctagaactccttggtagagcttcaactctgaaagatgaccagaagtctcggatagaaaagaacctcataaatgttttaatgaatgaaagtcctgatccagaacccgactgtgatatcttagctgtgaaaactgctcagaagctgtgggcagaccgaatttctctggctggcagcaatattttcacaataggagtacaggactttgtgccatttgtgcagtgcaaagccaagtttcatgccccaagttttcatgttgatgttcctgttcagtttgatatttatctgaaggctgattgtccacatcccattaggttttccaagctctgtgtcagctttaataatcaggaatacaaccagttctgtgtaatagaagaagcatccaaagcaaatgaagttttagaaaatctgactcaaggaaagatgtgcctagttcctggcaaaacaagaaaactgttatttaagtttgttgcaaaaactgaagatgtgggaaagaaaattgagattacttcagtggatcttgctctgggcaatgagacgggaagatgtgtggttttaaattggcagggaggaggaggagatgctgcttcctcccaagaagccttacaggcagctcggtctttcaaaaggcgacctaagctacctgacaatgaagttcactgggacagcattataattcaggcaagcacaatgatcatatccagagtcccaaacatttctgtacatctgctacatgaaccccctgcactgactaatgaaatgtattgtttggttgtgactgttcagtcccatgaaaagacccaaatcagagatgtgaagctcaccgctggcttaaaaccaggacaggatgccaatttaactcagaagactcacgtgactcttcatggaacagaactgtgtgatgaatcctacccggctttactcactgacattcctgttggagacttacatccaggggaacagctggaaaaaatgttgtatgttcgctgtggaacagtgggttccagaatgtttcttgtatatgtttcttacctgataaatacaaccgttgaagaaaaagaaattgtttgcaagtgtcacaaggatgaaactgtaacaattgaaacagtctttccatttgatgttgcggttaaatttgtttctaccaagtttgagcacctggaaagggtttatgctgacatcccctttctgttgatgacggacctcttaagtgcctcaccctgggccctcactattgtttccagtgagctccagcttgctccatccatgaccacagtggaccagctcgagtctcaagtggacaatgttatcttacagactggagagagtgctagtgaatgcttttgtcttcaatgcccatctcttggaaatattgaaggtggagtagcaaccgggcattatattatctcttggaaaaggacctcagcaatggagaatatccccatcatcacaactgtcatcactctgccgcacgtgattgtggagaatatccctctccatgtgaatgcagatctgccgtcatttgggcgtgtcagagagtcgttacctgtcaagtatcacctacagaataagaccgacttagttcaagatgtagaaatttctgtggagcccagtgatgccttcatgttctcaggtctcaaacagattcgattacgtatcctccctggcacggagcaggaaatgctatataatttctatcctctgatggctggataccagcagctgccatctctcaacatcaacttgcttagatttcctaacttcacaaatcagctgctcaggcgttttatacctaccagtatttttgtcaagccacagggtcgactcatggatgatacctctattgctgctgcatgatgttcaagaccggcccttggctgttgttacagagatgttgggcagagctatgcaggtgtttcattgtgaactctagctttgatcatggtaaaaagttaaccttttctattttttaatggatgttataccaactattcagaggaactcatacttcaaaaatattaggaaaatctgtcttatagtttctctaataaatatctgaaatctcagtacgacatgaaagaatgtcagaccattgttattgttgaaagtcatttgatgaatggtaaattctatgaaaagtaagtgatttgcatgtataatatcaggaaaattaagcatcccaagtgtgactggacaaagagagcagatgcaccagtgcctgtgccataaagttccgaatcccccatgtgtctctttcagagctggccagaccggaaataaatcattctcataaattcagtgtgtactcagaacacatacacaacaacatagggagttgtatgactgatacggaaaacttccagaaagttttaatcaaagcagtttaattaaggtatcaaaaatatctttgcttactatcaagaagtgtcaaataggttcagcttgctgccaaaatatggatcatttatgaagcaggttcatattttagaggtgttaataaaatcctcatcggaaaagatccaaagtgcaaggatttgattataaacataatttcctagactgaaagtttttggaaaagatgcagggtctgagtcaggccttctggttatattgtgcagtttcaaaagaactatttaaaactcttgaaaactcatgtaaataaaaatcatagggtgaaaattgtatttgttaaaataccttaataatttaaaatgacctgatttcctggaaaattttattattcaaaaggtggaggcattgtaaaaaggaaatagtgatgtaaataaacatgttctctttcaagta

SEQ ID NO: 191865 - DNA, 4435 bp, Homo sapiens
  Payload ID: 17912
  Gene Name: trafficking protein particle complex 11
  Uniprot ID: Q7Z392
  ENST ID: ENST00000357207
  CDS Start-End: 203-3463
aaagtgcttcctgtgccgggggaggtgggtacagggaagtctcgcctgttggaactggctgtggggctgcggcggtggggacgggccacggcgttctgtgacatccccccgcctcccctcgtcttctcccggctggcggcgaccggcctcagctgcagcgggcccggggcgtggggcctgggttttttgtgacatcgtaaacatgagccccacacagtgggacttccctgtggaattatgttgccggcctatggcctttgttactctaacgggcctggatgtagtttataatgcagtccatcgagctgtctgggacgccttctgtgcaaatcggagagctgatcgagtaccaatttctttcaaggtgctcccaggtgaccatgagtatcccaaatgtagacccaagagaacttcatatgagtggtacattcctaaagggatcttaaagactggctggatgaataagcatctgaatctggtgccagccctggtggttgtgttctatgaactggactgggatgagcctcagtggaaagaaaagcagtctgagtgcgccaccagagtggaaatagtcaggcaaagtttacaaggaagaaacacaaaagttgcagtggttctgattcagaagaaaacccctttgcccccaggagaagatgtcattgcttcagaaagggctgcagctttatgcaatgcatgtgaactctcaggaaagtctttgtttgtactgccgcacactgaccaccttgtgggttatattataagattggaaaatgccttttatgaacatgcacagacttattactacactgagatcagaagagtgaaatctcataaagaatttttgaataaaacaacacaccagcttttatttgttaggcatcagttcaaaatagctttcttcagtgagttgaaacaagatacacaaaatgcgctgaagaattataggaccgcctataatcttgtacacgaattgagagcccatgaaactaatattctggaaattaagactatggcaggatttataaactacaagatctgtaggctgtgttttcaacacaacaccccattggatgcaattgctcagttccgaaaacacatcgacttgtgtaagaaaaagattggaagtgcagagctgtcttttgagcatgatgcatggatgtctaaacaattccaggcctttggagatttatttgatgaagctattaagttagggttaacagctattcaaactcagaatcctggtttctattaccagcaggcagcatactatgcccaggagcggaaacagcttgcaaaaaccctctgtaaccacgaagcttctgtaatgtatcccaatcctgatcccttagaaacacaaacaggcgttcttgacttttatggacaaagatcatggcgacaaggaatactaagttttgatctttctgatcctgaaaaagaaaaggtgggaattcttgccattcagctgaaggagagaaatgttgttcactctgagataatcataactcttctgagcaatgctgttgcacagttcaagaagtataagtgcccgcgaatgaaaagtcacctaatggttcagatgggagaggaatattattacgcaaaggattataccaaagctttgaagttgctggattatgtgatgtgtgattatcggagtgaaggatggtggactctgctcacttctgtattaactacagctctgaagtgctcctacctcatggcccaattaaaggattacattacttactccctagaactccttggtagagcttcaactctgaaagatgaccagaagtctcggatagaaaagaacctcataaatgttttaatgaatgaaagtcctgatccagaacccgactgtgatatcttagctgtgaaaactgctcagaagctgtgggcagaccgaatttctctggctggcagcaatattttcacaataggagtacaggactttgtgccatttgtgcagtgcaaagccaagtttcatgccccaagttttcatgttgatgttcctgttcagtttgatatttatctgaaggctgattgtccacatcccattaggttttccaagctctgtgtcagctttaataatcaggaatacaaccagttctgtgtaatagaagaagcatccaaagcaaatgaagttttagaaaatctgactcaaggaaagatgtgcctagttcctggcaaaacaagaaaactgttatttaagtttgttgcaaaaactgaagatgtgggaaagaaaattgagattacttcagtggatcttgctctgggcaatgagacgggaagatgtgtggttttaaattggcagggaggaggaggagatgctgcttcctcccaagaagccttacaggcagctcggtctttcaaaaggcgacctaagctacctgacaatgaagttcactgggacagcattataattcaggcaagcacaatgatcatatccagagtcccaaacatttctgtacatctgctacatgaaccccctgcactgactaatgaaatgtattgtttggttgtgactgttcagtcccatgaaaagacccaaatcagagatgtgaagctcaccgctggcttaaaaccaggacaggatgccaatttaactcagaagactcacgtgactcttcatggaacagaactgtgtgatgaatcctacccggctttactcactgacattcctgttggagacttacatccaggggaacagctggaaaaaatgttgtatgttcgctgtggaacagtgggttccagaatgtttcttgtatatgtttcttacctgataaatacaaccgttgaagaaaaagaaattgtttgcaagtgtcacaaggatgaaactgtaacaattgaaacagtctttccatttgatgttgcggttaaatttgtttctaccaagtttgagcacctggaaagggtttatgctgacatcccctttctgttgatgacggacctcttaagtgcctcaccctgggccctcactattgtttccagtgagctccagcttgctccatccatgaccacagtggaccagctcgagtctcaagtggacaatgttatcttacagactggagagagtgctagtgaatgcttttgtcttcaatgcccatctcttggaaatattgaaggtggagtagcaaccgggcattatattatctcttggaaaaggacctcagcaatggagaatatccccatcatcacaactgtcatcactctgccgcacgtgattgtggagaatatccctctccatgtgaatgcagatctgccgtcatttgggcgtgtcagagagtcgttacctgtcaagtatcacctacagaataagaccgacttagttcaagatgtagaaatttctgtggagcccagtgatgccttcatgttctcaggtctcaaacagattcgattacctgctcaggcgttttatacctaccagtatttttgtcaagccacagggtcgactcatggatgatacctctattgctgctgcatgatgttcaagaccggcccttggctgttgttacagagatgttgggcagagctatgcaggtgtttcattgtgaactctagctttgatcatggtaaaaagttaaccttttctattttttaatggatgttataccaactattcagaggaactcatacttcaaaaatattaggaaaatctgtcttatagtttctctaataaatatctgaaatctcagtacgacatgaaagaatgtcagaccattgttattgttgaaagtcatttgatgaatggtaaattctatgaaaagtaagtgatttgcatgtataatatcaggaaaattaagcatcccaagtgtgactggacaaagagagcagatgcaccagtgcctgtgccataaagttccgaatcccccatgtgtctctttcagagctggccagaccggaaataaatcattctcataaattcagtgtgtactcagaacacatacacaacaacatagggagttgtatgactgatacggaaaacttccagaaagttttaatcaaagcagtttaattaaggtatcaaaaatatctttgcttactatcaagaagtgtcaaataggttcagcttgctgccaaaatatggatcatttatgaagcaggttcatattttagaggtgttaataaaatcctcatcggaaaagatccaaagtgcaaggatttgattataaacataatttcctagactgaaagtttttggaaaagatgcagggtctgagtcaggccttctggttatattgtgcagtttcaaaagaactatttaaaactcttgaaaactcatgtaaataaaaatcatagggtgaaaattgtatttgttaaaataccttaataatttaaaatgacctgatttcctggaaaattttattattcaaaaggtggaggcattgtaaaaaggaaatagtgatgtaaataaacatgttctctttcaagtatg

SEQ ID NO: 191866 - DNA, 2546 bp, Homo sapiens
  Payload ID: 17912
  Gene Name: trafficking protein particle complex 11
  ENST ID: ENST00000512476
  CDS Start-End: 102-2321
agaatgttgaagagtctgaaatgattatattaaataaaggtttcaaggagtgtacacatacaacgttcatatgaagatttatattaaatgagctgtctaaaatgagttgtgtctcatcttacgcaggttttgatctttctgatcctgaaaaagaaaaggtgggaattcttgccattcagctgaaggagagaaatgttgttcactctgagataatcataactcttctgagcaatgctgttgcacagttcaagaagtataagtgcccgcgaatgaaaagtcacctaatggttcagatgggagaggaatattattacgcaaaggattataccaaagctttgaagttgctggattatgtgatgtgtgattatcggagtgaaggatggtggactctgctcacttctgtattaactacagctctgaagtgctcctacctcatggcccaattaaaggattacattacttactccctagaactccttggtagagcttcaactctgaaagatgaccagaagtctcggatagaaaagaacctcataaatgttttaatgaatgaaagtcctgatccagaacccgactgtgatatcttagctgtgaaaactgctcagaagctgtgggcagaccgaatttctctggctggcagcaatattttcacaataggagtacaggactttgtgccatttgtgcagtgcaaagccaagtttcatgccccaagttttcatgttgatgttcctgttcagtttgatatttatctgaaggctgattgtccacatcccattaggttttccaagctctgtgtcagctttaataatcaggaatacaaccagttctgtgtaatagaagaagcatccaaagcaaatgaagttttagaaaatctgactcaaggaaagatgtgcctagttcctggcaaaacaagaaaactgttatttaagtttgttgcaaaaactgaagatgtgggaaagaaaattgagattacttcagtggatcttgctctgggcaatgagacgggaagatgtgtggttttaaattggcagggaggaggaggagatgctgcttcctcccaagaagccttacaggcagctcggtctttcaaaaggcgacctaagctacctgacaatgaagttcactgggacagcattataattcaggcaagcacaatgatcatatccagagtcccaaacatttctgtacatctgctacatgaaccccctgcactgactaatgaaatgtattgtttggttgtgactgttcagtcccatgaaaagacccaaatcagagatgtgaagctcaccgctggcttaaaaccaggacaggatgccaatttaactcagaagactcacgtgactcttcatggaacagaactgtgtgatgaatcctacccggctttactcactgacattcctgttggagacttacatccaggggaacagctggaaaaaatgttgtatgttcgctgtggaacagtgggttccagaatgtttcttgtatatgtttcttacctgataaatacaaccgttgaagaaaaagaaattgtttgcaagtgtcacaaggatgaaactgtaacaattgaaacagtctttccatttgatgttgcggttaaatttgtttctaccaagtttgagcacctggaaagggtttatgctgacatcccctttctgttgatgacggacctcttaagtgcctcaccctgggccctcactattgtttccagtgagctccagcttgctccatccatgaccacagtggaccagctcgagtctcaagtggacaatgttatcttacagactggagagagtgctagtgaatgcttttgtcttcaatgcccatctcttggaaatattgaaggtggagtagcaaccgggcattatattatctcttggaaaaggacctcagcaatggagaatatccccatcatcacaactgtcatcactctgccgcacgtgattgtggagaatatccctctccatgtgaatgcagatctgccgtcatttgggcgtgtcagagagtcgttacctgtcaagtatcacctacagaataagaccgacttagttcaagatgtagaaatttctgtggagcccagtgatgccttcatgttctcaggtctcaaacagattcgattacgtatcctccctggcacggagcaggaaatgctatataatttctatcctctgatggctggataccagcagctgccatctctcaacatcaacttgcttagatttcctaacttcacaaatcagctgctcaggcgttttatacctaccagtatttttgtcaagccacagggtcgactcatggatgatacctctattgctgctgcatgatgttcaagaccggcccttggctgttgttacagagatgttgggcagagctatgcaggtgtttcattgtgaactctagctttgatcatggtaaaaagttaaccttttctattttttaatggatgttataccaactattcagaggaactcatacttcaaaaatattaggaaaatctgtcttatagtttctctaataaatatctgaaatctcagtacgacatgaaagaa

SEQ ID NO: 191867 - DNA, 2244 bp, Homo sapiens
  Payload ID: 17912
  Gene Name: trafficking protein particle complex 11
  ENST ID: ENST00000505676
  CDS Start-End: 94-468
cgcctcccctcgtcttctcccggctggcggcgaccggcctcagctgcagcgggcccggggcgtggggcctgggttttttgtgacatcgtaaacatgagccccacacagtgggacttccctgtggaattatgttgccggcctatggcctttgttactctaacgggcctggatgtagtttataatgcagtccatcgagctgtctgggacgccttctgtgcaaatcggagagctgatcgagtaccaatttctttcaagcaggcagcatactatgcccaggagcggaaacagcttgcaaaaaccctctgtaaccacgaagcttctgtaatgtatcccaatcctgatcccttagaaacacaaacaggcgttcttgacttttatggacaaagatcatggcgacaaggaatactaagttttgatctttctgatcctgaaaaagaaaaggttttccaagctctgtgtcagctttaataatcaggaatacaaccagttctgtgtaatagaagaagcatccaaagcaaatgaagttttagaaaatctgactcaaggaaagatgtgcctagttcctggcaaaacaagaaaactgttatttaagtttgttgcaaaaactgaagatgtgggaaagaaaattgagattacttcagtggatcttgctctgggcaatgagacgggaagatgtgtggttttaaattggcagggaggaggaggagatgctgcttcctcccaagaagccttacaggcagctcggtctttcaaaaggcgacctaagctacctgacaatgaagttcactgggacagcattataattcaggcaagcacaatgatcatatccagagtcccaaacatttctgtacatctgctacatgaaccccctgcactgactaatgaaatgtattgtttggttgtgactgttcagtcccatgaaaagacccaaatcagagatgtgaagctcaccgctggcttaaaaccaggacaggatgccaatttaactcagaagactcacgtgactcttcatggaacagaactgtgtgatgaatcctacccggctttactcactgacattcctgttggagacttacatccaggggaacagctggaaaaaatgttgtatgttcgctgtggaacagtgggttccagaatgtttcttgtatatgtttcttacctgataaatacaaccgttgaagaaaaagaaattgtttgcaagtgtcacaaggatgaaactgtaacaattgaaacagtctttccatttgatgttgcggttaaatttgtttctaccaagtttgagcacctggaaagggtttatgctgacatcccctttctgttgatgacggacctcttaagtgcctcaccctgggccctcactattgtttccagtgagctccagcttgctccatccatgaccacagtggaccagctcgagtctcaagtggacaatgttatcttacagactggagagagtgctagtgaatgcttttgtcttcaatgcccatctcttggaaatattgaaggtggagtagcaaccgggcattatattatctcttggaaaaggacctcagcaatggagaatatccccatcatcacaactgtcatcactctgccgcacgtgattgtggagaatatccctctccatgtgaatgcagatctgccgtcatttgggcgtgtcagagagtcgttacctgtcaagtatcacctacagaataagaccgacttagttcaagatgtagaaatttctgtggagcccagtgatgccttcatgttctcaggtctcaaacagattcgattacctgctcaggcgttttatacctaccagtatttttgtcaagccacagggtcgactcatggatgatacctctattgctgctgcatgatgttcaagaccggcccttggctgttgttacagagatgttgggcagagctatgcaggtgtttcattgtgaactctagctttgatcatggtaaaaagttaaccttttctattttttaatggatgttataccaactattcagaggaactcatacttcaaaaatattaggaaaatctgtcttatagtttctctaataaatatctgaaatctcagtacgacatgaaagaatgtcagaccattgttattgttgaaagtcatttgatgaatggtaaattctatgaaaagtaagtgatttgcatgtataatatcaggaaaattaagcatcccaagtgtgactggacaaagagagcagatgcaccagtgcctgtgccataaagttccg

SEQ ID NO: 191868 - DNA, 2508 bp, Homo sapiens
  Payload ID: 17913
  Gene Name: trafficking protein particle complex 12
  Uniprot ID: Q8WVT3
  ENST ID: ENST00000324266
  CDS Start-End: 196-2403
ggggcagggcctcgggttcctgcatcgggcctgagcagaactaggcgcgccgcggcccggcacgcgcaggcgtacagagctccccgggggtgccagttcctctccgattcccggcttctgtcaccttcctcacggaccttggtcacggccgcaggtgaccccttagcccagctccagtgggcgggtggcagggtcatggaggacgctggcggcggcgaggagaccccggccccggaggccccgcacccccctcagctcgcgcctccggaggagcaggggttgctcttccaggaggaaaccatcgatcttggcggagatgagtttggatccgaagagaacgagaccgcatcggaaggctcgagtcctctcgcggacaagctgaacgaacacatgatggagagcgtcctcatctctgactcccccaacagcgagggcgacgcgggcgacctgggccgagtgcgggacgaagctgagcccggaggggaaggcgacccaggcccggagcccgcgggcaccccgagtcccagcggcgaggccgacggcgactgtgcccccgaggacgcggcacccagtagcggaggggccccgaggcaggacgcggcccgcgaggtcccaggcagcgaagccgcgcgcccggagcaggagcctcccgttgcggagccggtcccggtgtgcaccatcttcagccagcgcgcgcccccagcctccggggacggcttcgagccgcagatggtgaagtcgcccagcttcggtggcgccagcgaggcctcggccaggacaccgccccaggtcgtgcagcccagccccagcctcagcacgttcttcggagacacggccgccagccactccttggcctcggacttcttcgactcctttactacctccgccttcatttccgtcagcaatcccggcgcgggctccccggcccccgccagcccgcctcccctcgctgtgcccgggaccgaggggcgccccgaacccgtggccatgcgagggccccaggcagctgcgcccccggcgtcgccagagcctttcgcgcacatccaggcagtgtttgcagggagtgacgacccctttgccaccgccctgagcatgagcgagatggaccggaggaacgacgcctggcttcccggcgaggctacgcgtggagtcctgcgggccgtggccacccagcagcgcggcgccgtgttcgtggacaaggagaacctcaccatgccgggcctcaggttcgacaacatccagggagatgcagttaaagacttgatgcttcgctttctgggtgaaaaagctgcagcaaagagacaagtcctaaatgccgactcagtggaacaatcttttgttggattgaaacagctaatcagctgcagaaactggagggcagcagtggacctgtgcggacgtctcctcacagcccacggccagggctacggcaagagcgggctgctcaccagccacacgacagattcactgcagctctggtttgtcaggctggcactactagtgaagttgggccttttccagaatgctgagatggaatttgaacccttcggaaatcttgatcagccagatctttattacgagtactacccgcacgtgtaccctgggcgcaggggctccatggtccccttctcgatgcgcatcttgcacgcggagcttcagcagtacctggggaacccacaggagtcgctggatagactgcacaaggtgaagactgtctgcagcaagatcctggccaatttggagcaaggcttagcagaagacggcggcatgagcagcgtgactcaggagggcagacaagcctctatccggctgtggaggtcacgtctgggccgggtgatgtactccatggcaaactgtctgctcctgatgaaggattatgtgctggccgtggaggcgtatcattcggttatcaagtattacccagagcaagagccccagctgctcagcggcatcggccggatttccctgcagattggagacataaaaacagctgaaaagtattttcaagacgttgagaaagtaacacagaaattagatggactacagggtaaaatcatggttttgatgaacagcgcgttccttcacctcgggcagaataactttgcagaagcccacaggttcttcacagagatcttaaggatggatccaagaaacgcagtggccaacaacaacgctgccgtgtgtctgctctacctgggcaagctcaaggactccctgcggcagctggaggccatggtccagcaggaccccaggcactacctgcacgagagcgtgctcttcaacctgaccaccatgtacgagctggagtcctcacggagcatgcagaagaaacaggccctgctggaggctgtcgccggcaaggagggggacagcttcaacacacagtgcctcaagctggcctagctgcctccaacacactacgtcagaaggacccgggtctttgaaactgtgtcttgaagctaatgtattaatgtgacatggaggaactcaataaaactcctgcttcac

SEQ ID NO: 191869 - DNA, 2483 bp, Homo sapiens
  Payload ID: 17913
  Gene Name: trafficking protein particle complex 12
  Uniprot ID: Q8WVT3
  ENST ID: ENST00000382110
  CDS Start-End: 170-2377
tttccggcctgggggcagggcctcgggttcctgcatcgggcctgagcagaactaggcgcgccgcggcccggcacgcgcaggcgtacagagctccccgggggtgccagttcctctccgattcccggcttctgtcaccttcctcacggaccttggtcacggccgcagggtcatggaggacgctggcggcggcgaggagaccccggccccggaggccccgcacccccctcagctcgcgcctccggaggagcaggggttgctcttccaggaggaaaccatcgatcttggcggagatgagtttggatccgaagagaacgagaccgcatcggaaggctcgagtcctctcgcggacaagctgaacgaacacatgatggagagcgtcctcatctctgactcccccaacagcgagggcgacgcgggcgacctgggccgagtgcgggacgaagctgagcccggaggggaaggcgacccaggcccggagcccgcgggcaccccgagtcccagcggcgaggccgacggcgactgtgcccccgaggacgcggcacccagtagcggaggggccccgaggcaggacgcggcccgcgaggtcccaggcagcgaagccgcgcgcccggagcaggagcctcccgttgcggagccggtcccggtgtgcaccatcttcagccagcgcgcgcccccagcctccggggacggcttcgagccgcagatggtgaagtcgcccagcttcggtggcgccagcgaggcctcggccaggacaccgccccaggtcgtgcagcccagccccagcctcagcacgttcttcggagacacggccgccagccactccttggcctcggacttcttcgactcctttactacctccgccttcatttccgtcagcaatcccggcgcgggctccccggcccccgccagcccgcctcccctcgctgtgcccgggaccgaggggcgccccgaacccgtggccatgcgagggccccaggcagctgcgcccccggcgtcgccagagcctttcgcgcacatccaggcagtgtttgcagggagtgacgacccctttgccaccgccctgagcatgagcgagatggaccggaggaacgacgcctggcttcccggcgaggctacgcgtggagtcctgcgggccgtggccacccagcagcgcggcgccgtgttcgtggacaaggagaacctcaccatgccgggcctcaggttcgacaacatccagggagatgcagttaaagacttgatgcttcgctttctgggtgaaaaagctgcagcaaagagacaagtcctaaatgccgactcagtggaacaatcttttgttggattgaaacagctaatcagctgcagaaactggagggcagcagtggacctgtgcggacgtctcctcacagcccacggccagggctacggcaagagcgggctgctcaccagccacacgacagattcactgcagctctggtttgtcaggctggcactactagtgaagttgggccttttccagaatgctgagatggaatttgaacccttcggaaatcttgatcagccagatctttattacgagtactacccgcacgtgtaccctgggcgcaggggctccatggtccccttctcgatgcgcatcttgcacgcggagcttcagcagtacctggggaacccacaggagtcgctggatagactgcacaaggtgaagactgtctgcagcaagatcctggccaatttggagcaaggcttagcagaagacggcggcatgagcagcgtgactcaggagggcagacaagcctctatccggctgtggaggtcacgtctgggccgggtgatgtactccatggcaaactgtctgctcctgatgaaggattatgtgctggccgtggaggcgtatcattcggttatcaagtattacccagagcaagagccccagctgctcagcggcatcggccggatttccctgcagattggagacataaaaacagctgaaaagtattttcaagacgttgagaaagtaacacagaaattagatggactacagggtaaaatcatggttttgatgaacagcgcgttccttcacctcgggcagaataactttgcagaagcccacaggttcttcacagagatcttaaggatggatccaagaaacgcagtggccaacaacaacgctgccgtgtgtctgctctacctgggcaagctcaaggactccctgcggcagctggaggccatggtccagcaggaccccaggcactacctgcacgagagcgtgctcttcaacctgaccaccatgtacgagctggagtcctcacggagcatgcagaagaaacaggccctgctggaggctgtcgccggcaaggagggggacagcttcaacacacagtgcctcaagctggcctagctgcctccaacacactacgtcagaaggacccgggtctttgaaactgtgtcttgaagctaatgtattaatgtgacatggaggaactcaataaaactcctgcttcact

SEQ ID NO: 191870 - DNA, 473 bp, Homo sapiens
  Payload ID: 17913
  Gene Name: trafficking protein particle complex 12
  ENST ID: ENST00000416918
  CDS Start-End: 1-367
gcatcggccggatttccctgcaggtacctgtgcacgcgcgttccttcacctcgggcagaataactttgcagaagcccacaggttcttcacagagatcttaaggatggatccaagaaacgcagtggccaacaacaacgctgccgtgtgtctgctctacctgggcaagctcaaggactccctgcggcagctggaggccatggtccagcaggaccccaggcactacctgcacgagagcgtgctcttcaacctgaccaccatgtacgagctggagtcctcacggagcatgcagaagaaacaggccctgctggaggctgtcgccggcaaggagggggacagcttcaacacacagtgcctcaagctggcctagctgcctccaacacactacgtcagaaggacccgggtctttgaaactgtgtcttgaagctaatgtattaatgtgacatggaggaactcaataaaactcctgcttcact

SEQ ID NO: 191871 - DNA, 544 bp, Homo sapiens
  Payload ID: 17913
  Gene Name: trafficking protein particle complex 12
  ENST ID: ENST00000452495
  CDS Start-End: 1-328
tgaaaagtattttcaagacgttgagaaagtaacacagaaattagatggactacagggtaaaatcatggttttgatgaacagcgcgttccttcacctcgggcagaataactttgcagaagcccacaggttcttcacagagatcttaaggatggatccaagaaacgcagtgcagatgctgtcagcctcgcatcctacaggaaaggaaccatcgccaaaagacgctgaggaacatcccgagggtcacagggacagtgcagagccaggaccagcccggcccatggtcccccagcgtgcaccacctggcccggcactgtgtgctcagccatgaggactgggaagagtcctgcccacagctcaagtgtctacaccgcactgccatccaggctgtgagccgctgctgagcatggggaatgtggctgctgcagagacgttatgaaacacttctaaaagaatgtaaaagatctcattaataattttgagtacctgttaaaatgatagtaattttggatctagtagattaaataaaacatattattaaaattaa

SEQ ID NO: 191872 - DNA, 815 bp, Homo sapiens
  Payload ID: 17913
  Gene Name: trafficking protein particle complex 12
  ENST ID: ENST00000415624
  CDS Start-End: 1-705
aaggtgaagactgtctgcagcaagatcctggccaatttggagcaaggcttagcagaagacggcggcatgagcagcgtgactcaggagggcagacaagcctctatccggctgtggaggtcacgtctgggccgggtgatgtactccatggcaaactgtctgctcctgatgaaggattatgtgctggccgtggaggcgtatcattcggttatcaagtattacccagagcaagagccccagctgctcagcggcatcggccggatttccctgcagcagattggagacataaaaacagctgaaaagtattttcaagacgttgagaaagtaacacagaaattagatggactacagggtaaaatcatggttttgatgaacagcgcgttccttcacctcgggcagaataactttgcagaagcccacaggttcttcacagagatcttaaggatggatccaagaaacgcagtggccaacaacaacgctgccgtgtgtctgctctacctgggcaagctcaaggactccctgcggcagctggaggccatggtccagcaggaccccaggcactacctgcacgagagcgtgctcttcaacctgaccaccatgtacgagctggagtcctcacggagcatgcagaagaaacaggccctgctggaggctgtcgccggcaaggagggggacagcttcaacacacagtgcctcaagctggcctagctgcctccaacacactacgtcagaaggacccgggtctttgaaactgtgtcttgaagctaatgtattaatgtgacatggaggaactcaataaaactcctgcttcactggtg

SEQ ID NO: 191873 - DNA, 698 bp, Homo sapiens
  Payload ID: 17913
  Gene Name: trafficking protein particle complex 12
  ENST ID: ENST00000441099
  CDS Start-End: 1-191
atctttattacgagtactacccgcacgtgtaccctgggcgcaggggctccatggtccccttctcgatgcgcatcttgcacgcggagcttcagcagtacctggggaacccacaggagtcgctggatagactgcacaaggtgaagactgtctgcagcaagcaacatggatacagctggaggccattatcctaagtgaattaacacagaaacagaaaaccaaatagtgaatgttttcacatatcctggccaatttggagcaaggcttagcagaagacggcggcatgagcagcgtgactcaggagggcagacaagtcagcactgcacgtgtccactcgtgcatttgcaactcactcctttcttggggaagccaagcacatcactgggtgatgctgtgggtgcaacgtgcagcctcagacccgaaccctgcgcccggggagaagacacgccttcaccacaaaagcacacggcccggaacctgccacgctgagtggtctgagtgggcgcgaggaaggagcccagcccagccgaaggggcccagaggggcctctgcgtcggggagagaggcctctgcgtcggggacagaggcctctgcgtcggggacagaggctcgggagggtgcttcaggaggagctggagaggaaggcccagagcctggggcaggctgagggacctgggcagttccctggagcattggaaacc

SEQ ID NO: 191874 - DNA, 1047 bp, Homo sapiens
  Payload ID: 17913
  Gene Name: trafficking protein particle complex 12
  ENST ID: ENST00000417243
  CDS Start-End: 1-637
ctgcagaaactggagggcagcagtggacctgtgcggacgtctcctcacagcccacggccagggctacggcaagagcgggctgctcaccagccacacgacagattcactgcagctctggtttgtcaggctggcactactagtgaagttgggccttttccagaatgctgagatggaatttgaacccttcggaaatcttgatcagccagatctttattacgagtactacccgcacgtgtaccctgggcgcaggggctccatggtccccttctcgatgcgcatcttgcacgcggagcttcagcagtacctggggaacccacaggagtcgctggatagactgcacaaggtgaagactgtctgcagcaagatcctggccaatttggagcaaggcttagcagaagacggcggcatgagcagcgtgactcaggagggcagacaagcctctatccggctgtggaggtcacgtctgggccgggtgatgtactccatggcaaactgtctgctcctgatgaaggattatgtgctggccgtggaggcgtatcattcggttatcaagtattacccagagcaagagccccagctgctcagcggcatcggccggatttccctgcagcgcgttccttcacctcgggcagaataactttgcagaagcccacaggttcttcacagagatcttaaggatggatccaagaaacgcagtggccaacaacaacgctgccgtgtgtctgctctacctgggcaagctcaaggactccctgcggcagctggaggccatggtccagcaggaccccaggcactacctgcacgagagcgtgctcttcaacctgaccaccatgtacgagctggagtcctcacggagcatgcagaagaaacaggccctgctggaggctgtcgccggcaaggagggggacagcttcaacacacagtgcctcaagctggcctagctgcctccaacacactacgtcagaaggacccgggtctttgaaactgtgtcttgaagctaatgtattaatgtgacatggaggaactcaataaaactcctgcttcact

SEQ ID NO: 191875 - DNA, 579 bp, Homo sapiens
  Payload ID: 17913
  Gene Name: trafficking protein particle complex 12
  ENST ID: ENST00000457845
  CDS Start-End: 470-579
acagtgttattgctgtcttggtacctgcactccgcggagtcctgagttcttgtcctgcctccaagaagaacgagattatgccgacaaccagagtggagatgcagttaaagacttgatgcttcgctttctgggtgaaaaagctgcagcaaagagacaagtcctaaatgccgactcagtggaacaatcttttgttggattgaaacagctaatccgttgacaaatggcatgcccctccgtgccgtcagcacactgacgttgtcaccattactaacggctggctggcgctgcttccagcaagagctgcagaaactggagggcagcagtggacctgtgcggacgtctcctcacagcccacggccagggctacggcaagagcgggctgctcaccagccacacgacagattcactgcagctctggtttgtcaggctggcactactagtgaagttgggccttttccagaatgctgagatggaatttgaacccttcggaaatcttgatcagccagatctttattacgagtactacccgcacgtgtaccctgggcgcaggggctccatggtccccttctcgatgcgcat

SEQ ID NO: 191876 - DNA, 838 bp, Homo sapiens
  Payload ID: 17913
  Gene Name: trafficking protein particle complex 12
  ENST ID: ENST00000411973
  CDS Start-End: 1-667
cccagcctccggggacggcttcgagccgcagatggtgaagtcgcccagcttcggtggcgccagcgaggcctcggccaggacaccgccccaggtcgtgcagcccagccccagcctcagcacgttcttcggagacacggccgccagccactccttggcctcggacttcttcgactcctttactacctccgccttcatttccgtcagcaatcccggcgcgggctccccggcccccgccagcccgcctcccctcgctgtgcccgggaccgaggggcgccccgaacccgtggccatgcgagggccccaggcagctgcgcccccggcgtcgccagagcctttcgcgcacatccaggcagtgtttgcagggagtgacgacccctttgccaccgccctgagcatgagcgagatggaccggaggaacgacgcctggcttcccggcgaggctacgcgtggagtcctgcgggccgtggccacccagcagcgcggcgccgtgttcgtggacaaggagaacctcaccatgccgggcctcaggttcgacaacatccagggagatgcagttaaagacttgatgcttcgctttctgggtgaaaaagctgcagcaaagagacaagtcctaaatgccgactcagtggaacaatcttttgttggattgaaacagctaatccgttgacaaatggcatgcccctccgtgccgtcagcacactgacgttgtcaccattactaacggctggctggcgctgcttccagcaagagctgcagaaactggagggcagcagtggacctgtgcggacgtctcctcacagcccacggccagggctacggcaagagcgggctgctcacc

SEQ ID NO: 191877 - DNA, 518 bp, Homo sapiens
  Payload ID: 17913
  Gene Name: trafficking protein particle complex 12
  ENST ID: ENST00000437733
  CDS Start-End: 1-168
atgtactccatggcaaactgtctgctcctgatgaagctcgccagtatgcacatcagaacccgccgtggctccgcacatgatggaaaggagcacgcagctgcatcagctaccttccgtcttgctgaaattagactgcagaagtccttgctggttgcagaatggttgtaaatctagtttcacggcctgtaaacacgtgtggctgctgaaaagaaatggtgaagattgagctaaaatagacttgtccctggaagattatgtgctggccgtggaggcgtatcattcggttatcaagtattacccagagcaagagccccagctgctcagcggcatcggccggatttccctgcagattggagacataaaaacagctgaaaagtattttcaagacgttgagaaagtaacacagaaattagatggactacagggtaaaatcatggttttgatgaacagcgcgttccttcacctcgggcagaataactttgcagaagcccacaggttcttcacagagatcttaagga

SEQ ID NO: 191878 - DNA, 683 bp, Homo sapiens
  Payload ID: 17913
  Gene Name: trafficking protein particle complex 12
  ENST ID: ENST00000441983
  CDS Start-End: 108-683
attgctgtcttggtacctgcactccgcggagtcctgagttcttgtcctgcctccaagaagaacgagattatgccgacaaccagagtggagatgcagttaaagacttgatgcttcgctttctgggtgaaaaagctgcagcaaagagacaagtcctaaatgccgactcagtggaacaatcttttgttggattgaaacagctaatcagctgcagaaactggagggcagcagtggacctgtgcggacgtctcctcacagcccacggccagggctacggcaagagcgggctgctcaccagccacacgacagattcactgcagctctggtttgtcaggctggcactactagtgaagttgggccttttccagaatgctgagatggaatttgaacccttcggaaatcttgatcagccagatctttattacgagtactacccgcacgtgtaccctgggcgcaggggctccatggtccccttctcgatgcgcatcttgcacgcggagcttcagcagtacctggggaacccacaggagtcgctggatagactgcacaaggtgaagactgtctgcagcaagatcctggccaatttggagcaaggcttagcagaagacggcggcatgagcagcgtgactcaggagggcagacaagcctctatccggctgtggaggtcacgtctgggccgggtgatg

SEQ ID NO: 191879 - DNA, 1269 bp, Homo sapiens
  Payload ID: 17913
  Gene Name: trafficking protein particle complex 12
  ENST ID: ENST00000618133
  CDS Start-End: 1-1161
ggagatgcagttaaagacttgatgcttcgctttctgggtgaaaaagctgcagcaaagagacaagtcctaaatgccgactcagtggaacaatcttttgttggattgaaacagctaatcagctgcagaaactggagggcagcagtggacctgtgcggacgtctcctcacagcccacggccagggctacggcaagagcgggctgctcaccagccacacgacagattcactgcagctctggtttgtcaggctggcactactagtgaagttgggccttttccagaatgctgagatggaatttgaacccttcggaaatcttgatcagccagatctttattacgagtactacccgcacgtgtaccctgggcgcaggggctccatggtccccttctcgatgcgcatcttgcacgcggagcttcagcagtacctggggaacccacaggagtcgctggatagactgcacaaggtgaagactgtctgcagcaagatcctggccaatttggagcaaggcttagcagaagacggcggcatgagcagcgtgactcaggagggcagacaagcctctatccggctgtggaggtcacgtctgggccgggtgatgtactccatggcaaactgtctgctcctgatgaaggattatgtgctggccgtggaggcgtatcattcggttatcaagtattacccagagcaagagccccagctgctcagcggcatcggccggatttccctgcagattggagacataaaaacagctgaaaagtattttcaagacgttgagaaagtaacacagaaattagatggactacagggtaaaatcatggttttgatgaacagcgcgttccttcacctcgggcagaataactttgcagaagcccacaggttcttcacagagatcttaaggatggatccaagaaacgcagtggccaacaacaacgctgccgtgtgtctgctctacctgggcaagctcaaggactccctgcggcagctggaggccatggtccagcaggaccccaggcactacctgcacgagagcgtgctcttcaacctgaccaccatgtacgagctggagtcctcacggagcatgcagaagaaacaggccctgctggaggctgtcgccggcaaggagggggacagcttcaacacacagtgcctcaagctggcctagctgcctccaacacactacgtcagaaggacccgggtctttgaaactgtgtcttgaagctaatgtattaatgtgacatggaggaactcaataaaactcctgcttcactgg

SEQ ID NO: 191880 - DNA, 1303 bp, Homo sapiens
  Payload ID: 17913
  Gene Name: trafficking protein particle complex 12
  ENST ID: ENST00000628660
  CDS Start-End: 1-1095
ggagatgcagttaaagacttgatgcttcgctttctgggtgaaaaagctgcagcaaagagacaagtcctaaatgccgactcagtggaacaatcttttgttggattgaaacagctaatcagctgcagaaactggagggcagcagtggacctgtgcggacgtctcctcacagcccacggccagggctacggcaagagcgggctgctcaccagccacacgacagattcactgcagctctggtttgtcaggctggcactactagtgaagttgggccttttccagaatgctgagatggaatttgaacccttcggaaatcttgatcagccagatctttattacgagtactacccgcacgtgtaccctgggcgcaggggctccatggtccccttctcgatgcgcatcttgcacgcggagcttcagcagtacctggggaacccacaggagtcgctggatagactgcacaaggtgaagactgtctgcagcaagatcctggccaatttggagcaaggcttagcagaagacggcggcatgagcagcgtgactcaggagggcagacaaggctgctcttaccttgtagcctctatccggctgtggaggtcacgtctgggccgggtgatgtactccatggcaaactgtctgctcctgatgaaggattatgtgctggccgtggaggcgtatcattcggttatcaagtattacccagagcaagagccccagctgctcagcggcatcggccggatttccctgcagattggagacataaaaacagctgaaaagtattttcaagacgttgagaaagtaacacagaaattagatggactacagggtaaaatcatggttttgatgaacagcgcgttccttcacctcgggcagaataactttgcagaagcccacaggttcttcacagagatcttaaggatggatccaagaaacgcagtgcagatgctgtcagcctcgcatcctacaggaaaggaaccatcgccaaaagacgctgaggaacatcccgagggtcacagggacagtgcagagccaggaccagcccggcccatggtcccccagcgtgcaccacctggcccggcactgtgtgctcagccatgaggactgggaagagtcctgcccacagctcaagtgtctacaccgcactgccatccaggctgtgagccgctgctgagcatggggaatgtggctgctgcagagacgttatgaaacacttctaaaagaatgtaaaagatctcattaataattttgagtacctgttaaaatgatagtaattttggatctagtagattaaataaaacatattatt

SEQ ID NO: 191881 - DNA, 1253 bp, Homo sapiens
  Payload ID: 17913
  Gene Name: trafficking protein particle complex 12
  ENST ID: ENST00000631737
  CDS Start-End: 4-1143
ttgatgcttcgctttctgggtgaaaaagctgcagcaaagagacaagtcctaaatgccgactcagtggaacaatcttttgttggattgaaacagctaatcagctgcagaaactggagggcagcagtggacctgtgcggacgtctcctcacagcccacggccagggctacggcaagagcgggctgctcaccagccacacgacagattcactgcagctctggtttgtcaggctggcactactagtgaagttgggccttttccagaatgctgagatggaatttgaacccttcggaaatcttgatcagccagatctttattacgagtactacccgcacgtgtaccctgggcgcaggggctccatggtccccttctcgatgcgcatcttgcacgcggagcttcagcagtacctggggaacccacaggagtcgctggatagactgcacaaggtgaagactgtctgcagcaagatcctggccaatttggagcaaggcttagcagaagacggcggcatgagcagcgtgactcaggagggcagacaagcctctatccggctgtggaggtcacgtctgggccgggtgatgtactccatggcaaactgtctgctcctgatgaaggattatgtgctggccgtggaggcgtatcattcggttatcaagtattacccagagcaagagccccagctgctcagcggcatcggccggatttccctgcagattggagacataaaaacagctgaaaagtattttcaagacgttgagaaagtaacacagaaattagatggactacagggtaaaatcatggttttgatgaacagcgcgttccttcacctcgggcagaataactttgcagaagcccacaggttcttcacagagatcttaaggatggatccaagaaacgcagtggccaacaacaacgctgccgtgtgtctgctctacctgggcaagctcaaggactccctgcggcagctggaggccatggtccagcaggaccccaggcactacctgcacgagagcgtgctcttcaacctgaccaccatgtacgagctggagtcctcacggagcatgcagaagaaacaggccctgctggaggctgtcgccggcaaggagggggacagcttcaacacacagtgcctcaagctggcctagctgcctccaacacactacgtcagaaggacccgggtctttgaaactgtgtcttgaagctaatgtattaatgtgacatggaggaactcaataaaactcctgcttcactggtg

SEQ ID NO: 191882 - DNA, 2715 bp, Homo sapiens
  Payload ID: 17914
  Gene Name: trafficking protein particle complex 13
  Uniprot ID: A5PLN9
  ENST ID: ENST00000231526
  CDS Start-End: 22-1257
gggtcaaaagtgccggtcaaaatggaagtgaatccccctaaacaggagcacctgctggcgctaaaagtgatgcggctgactaagcctactttattcaccaatatcccagtaacatgtgaagagaaagacttacctggagatctctttaaccagctgatgagagatgatccttcaaccgttaatggtgcagaagttttaatgttgggagaaatgctgactttaccacagaattttgggaatatatttttgggagagaccttttccagttatatcagcgttcataatgatagcaatcaagttgtaaaagacatattagtaaaagctgatcttcagacaagttctcagcgtttaaatctttcagcctccaatgctgcagtggctgaacttaaaccggattgttgtattgatgatgtcatacatcatgaagtcaaagaaattggaacacacatcttggtatgtgctgtgagttatacaactcaggctggagaaaaaatgtatttcagaaaattcttcaaatttcaggttctcaaaccattggatgtgaaaaccaaattttacaatgcagagactgatgaagtatttctggaagcccagattcagaatatgacaacctcacctatgtttatggagaaggtttcactggagccatctattatgtacaatgtaacagaattaaattcagtcagccaagctggagaatgtgtgtctacgtttgggtcaagagcatatttgcaaccaatggatacacgccagtacttatactgcctaaagccaaagaatgaatttgcagaaaaagcaggcatcattaagggagtaacagtaattggaaaattggatatagtatggaaaacaaatctaggtgaaaggggaaggttacagaccagccaacttcaaagaatggctccaggttatggagatgttaggttgtctttggaggcaataccagataccgtaaaccttgaagaaccttttcatattacctgtaaaataacaaactgcagtgaaaggactatggatctggttttggaaatgtgcaataccaattccatccactggtgtggaatttcaggaagacagctgggaaagctgcatccaagttcttcgctctgtcttgcccttactctgctttcttcagtacagggactgcaaagcatctctggcttaagactaacagacacattcttaaagagaacatatgaatatgatgacatcgcacaagtctgtgtggtatcttctgccattaaagtggaaagctgaaggaaacttccaatgttaggcttttcatttagtttcacagaactgctctttttgttacctttgtaaaatgatgacgtcaacaacgaagtaaatatgttacttaaattttctttcctgtaaaatggttaaaatattaaatatttgttttgaagagatctgattttatcttgtaatttatatttgaaatgaacatgtgtatattttctacacctattatttaatttcatttcattttagatgaccattggactttgttctccaaaagctgtgtatctgagaccatttgtccctagcaagttatctagaacacgagtcagcacactttttatgtaaggtacaagatactaaatattttaggctttgcaggccgtaaggtttctgtcacaaatactgaactctgccatcgtacttcaagagcagccagtaggcaaaaaaagtacagtggtgtacacaaaaagaagcagttggactcgggaagctgaggcaggagaatcacttgaaccggggaggcagaggttgcagttaagccgagatcatgctactgcactctagcctgagcgacagagtgagactctgtctcaaaaaaaaagaggcagctgggcagatttggcctgcagggtatagttggctgacctcaatctagaagatagagttgtttcttagaactttgtaatattttggttagaaatatttcagttaactccagttttttcctagctattcggtcagcagaaaaagtttgcttaaaacaaagggggtagtcctcttataacctgatatttgtcaacacagtataagctttctagttgttttcaaaattactgtaatggtttgtgtctgtatttgtatattatacctacaaacatacatatctttcagctactgaacacatcagaattggttttactttttaggttgttgattttttttaattaactattaactaagaataatacttattttctaattataagccaaaaacccctgggtttttttctcattgattaagccacttatttttataaggtatatttaaataattcccatcttctgatatgattttaaactctaaatcatgtgttactgttacaaaactttctctctccatgtaatcacacttagttatgagcaaagcagtgagaaagttgaggtgataaacaactttgcagcattaatgtaacaaaaagtttcagtatttgtcaggaaaacaaaagcttaggctgttaaataaaagctattctattttggtaagttgaaattcaagaatgtatatataatttcttaaatgtaagagtgcattaaatcaaatacaaaaattggtttttcaatgcatcattatttattgccataacaaattgtttggtccaaaatgaaagctatattcagaaggtttgcacctcaaaattgagtaataattaatgaaatgtctgtacaaaataaagtgcaagcagtgtaaaa

SEQ ID NO: 191883 - DNA, 3221 bp, Homo sapiens
  Payload ID: 17914
  Gene Name: trafficking protein particle complex 13
  Uniprot ID: A5PLN9
  ENST ID: ENST00000399438
  CDS Start-End: 346-1599
tttttttttttttttttttaaaaaaaaaactccggcaacgttggcctttgggaggccgcgtattgttacctaggggtggtttcttttcctgcagtcgcgatgtgtgattgcagatggaaaacaaagtattttatgcctacgtttctaagatagaagaaatggacttgttgaaaagaagccagtttgtaaaggacacagtaggagaatttaaggtaccaccaccagagagaggttgagagtgcgtttgacttttggttttgccaaacgcgaggttttccgtttccttccggggcaagttgaacctgtccagcccccgtaggctgtgggtcaaaagtgccggtcaaaatggaagtgaatccccctaaacaggagcacctgctggcgctaaaagtgatgcggctgactaagcctactttattcaccaatatcccagtaacatgtgaagagaaagacttacctggagatctctttaaccagctgatgagagatgatccttcaaccgttaatggtgcagaagttttaatgttgggagaaatgctgactttaccacagaattttgggaatatatttttgggagagaccttttccagttatatcagcgttcataatgatagcaatcaagttgtaaaagacatattagtaaaagctgatcttcagacaagttctcagcgtttaaatctttcagcctccaatgctgcagtggctgaacttaaaccggattgttgtattgatgatgtcatacatcatgaagtcaaagaaattggaacacacatcttggtatgtgctgtgagttatacaactcaggctggagaaaaaatgtatttcagaaaattcttcaaatttcaggttctcaaaccattggatgtgaaaaccaaattttacaatgcagagagtgacctcagttctgtgactgatgaagtatttctggaagcccagattcagaatatgacaacctcacctatgtttatggagaaggtttcactggagccatctattatgtacaatgtaacagaattaaattcagtcagccaagctggagaatgtgtgtctacgtttgggtcaagagcatatttgcaaccaatggatacacgccagtacttatactgcctaaagccaaagaatgaatttgcagaaaaagcaggcatcattaagggagtaacagtaattggaaaattggatatagtatggaaaacaaatctaggtgaaaggggaaggttacagaccagccaacttcaaagaatggctccaggttatggagatgttaggttgtctttggaggcaataccagataccgtaaaccttgaagaaccttttcatattacctgtaaaataacaaactgcagtgaaaggactatggatctggttttggaaatgtgcaataccaattccatccactggtgtggaatttcaggaagacagctgggaaagctgcatccaagttcttcgctctgtcttgcccttactctgctttcttcagtacagggactgcaaagcatctctggcttaagactaacagacacattcttaaagagaacatatgaatatgatgacatcgcacaagtctgtgtggtatcttctgccattaaagtggaaagctgaaggaaacttccaatgttaggcttttcatttagtttcacagaactgctctttttgttacctttgtaaaatgatgacgtcaacaacgaagtaaatatgttacttaaattttctttcctgtaaaatggttaaaatattaaatatttgttttgaagagatctgattttatcttgtaatttatatttgaaatgaacatgtgtatattttctacacctattatttaatttcatttcattttagatgaccattggactttgttctccaaaagctgtgtatctgagaccatttgtccctagcaagttatctagaacacgagtcagcacactttttatgtaaggtacaagatactaaatattttaggctttgcaggccgtaaggtttctgtcacaaatactgaactctgccatcgtacttcaagagcagccagtaggcaaaaaaagtacagtggtgtacacaaaaagaagcagttggactcgggaagctgaggcaggagaatcacttgaaccggggaggcagaggttgcagttaagccgagatcatgctactgcactctagcctgagcgacagagtgagactctgtctcaaaaaaaaagaggcagctgggcagatttggcctgcagggtatagttggctgacctcaatctagaagatagagttgtttcttagaactttgtaatattttggttagaaatatttcagttaactccagttttttcctagctattcggtcagcagaaaaagtttgcttaaaacaaagggggtagtcctcttataacctgatatttgtcaacacagtataagctttctagttgttttcaaaattactgtaatggtttgtgtctgtatttgtatattatacctacaaacatacatatctttcagctactgaacacatcagaattggttttactttttaggttgttgattttttttaattaactattaactaagaataatacttattttctaattataagccaaaaacccctgggtttttttctcattgattaagccacttatttttataaggtatatttaaataattcccatcttctgatatgattttaaactctaaatcatgtgttactgttacaaaactttctctctccatgtaatcacacttagttatgagcaaagcagtgagaaagttgaggtgataaacaactttgcagcattaatgtaacaaaaagtttcagtatttgtcaggaaaacaaaagcttaggctgttaaataaaagctattctattttggtaagttgaaattcaagaatgtatatataatttcttaaatgtaagagtgcattaaatcaaatacaaaaattggtttttcaatgcatcattatttattgccataacaaattgtttggtccaaaatgaaagctatattcagaaggtttgcacctcaaaattgagtaataattaatgaaatgtctgtacaaaataaagtgcaagcagtgtaaaattgaagtctgtctttgtttcaaaatgattaagattaaatgatgaaataatattttatagccactgcattggatacttggattgtttttcaagcatcttcttatgactaaatcttctgtttcattctgttttaaatctaaaaagtaaaatgatggtcacttggaa

SEQ ID NO: 191884 - DNA, 1437 bp, Homo sapiens
  Payload ID: 17914
  Gene Name: trafficking protein particle complex 13
  Uniprot ID: A5PLN9
  ENST ID: ENST00000438419
  CDS Start-End: 28-1284
ggctgtgggtcaaaagtgccggtcaaaatggaagtgaatccccctaaacaggagcacctgctggcgctaaaagtgatgcggctgactaagcctactttattcaccaatatcccagtaacatgtgaagagaaagacttacctggagatctctttaaccagctgatgagagatgatccttcaaccgttaatggtgcagaagttttaatgttgggagaaatgctgactttaccacagaattttgggaatatatttttgggagagaccttttccagttatatcagcgttcataatgatagcaatcaagttgtaaaagacatattagtaaaagctgatcttcagacaagttctcagcgtttaaatctttcagcctccaatgctgcagtggctgaacttaaaccggattgttgtattgatgatgtcatacatcatgaagtcaaagaaattggaacacacatcttggtatgtgctgtgagttatacaactcaggctggagaaaaaatgtatttcagaaaattcttcaaatttcaggttctcaaaccattggatgtgaaaaccaaattttacaatgcagagagtgacctcagttctgtgactgatgaagtatttctggaagcccagattcagaatatgacaacctcacctatgtttatggagaaggtttcactggagccatctattatgtacaatgtaacagaattaaattcagtcagccaagctggagaatgtgtgtctacgtttgggtcaagagcatatttgcaaccaatggatacacgccagtacttatactgcctaaagccaaagaatgaatttgcagaaaaagcaggcatcattaagggagtaacagtaattggaaaattggatatagtatggaaaacaaatctaggtgaaaggggaaggttacagaccagccaacttcaaagaatggctccaggttatggagatgttaggttgtctttggaggcaataccagataccgtaaaccttgaagaaccttttcatattacctgtaaaataacaaactgcagcagtgaaaggactatggatctggttttggaaatgtgcaataccaattccatccactggtgtggaatttcaggaagacagctgggaaagctgcatccaagttcttcgctctgtcttgcccttactctgctttcttcagtacagggactgcaaagcatctctggcttaagactaacagacacattcttaaagagaacatatgaatatgatgacatcgcacaagtctgtgtggtatcttctgccattaaagtggaaagctgaaggaaacttccaatgttaggcttttcatttagtttcacagaactgctctttttgttacctttgtaaaatgatgacgtcaacaacgaagtaaatatgttacttaaattttctttcctgtaaaatggttaaaatattaaatatttgttttgaaga

SEQ ID NO: 191885 - DNA, 1410 bp, Homo sapiens
  Payload ID: 17914
  Gene Name: trafficking protein particle complex 13
  Uniprot ID: A5PLN9
  ENST ID: ENST00000505553
  CDS Start-End: 17-1255
aaaagtgccggtcaaaatggaagtgaatccccctaaacaggagcacctgctggcgctaaaagtgatgcggctgactaagcctactttattcaccaatatcccagtaacatgtgaagagaaagacttacctggagatctctttaaccagctgatgagagatgatccttcaaccgttaatggtgcagaagttttaatgttgggagaaatgctgactttaccacagaattttgggaatatatttttgggagagaccttttccagttatatcagcgttcataatgatagcaatcaagttgtaaaagacatattagtaaaagctgatcttcagacaagttctcagcgtttaaatctttcagcctccaatgctgcagtggctgaacttaaaccggattgttgtattgatgatgtcatacatcatgaagtcaaagaaattggaacacacatcttggtatgtgctgtgagttatacaactcaggctggagaaaaaatgtatttcagaaaattcttcaaatttcaggttctcaaaccattggatgtgaaaaccaaattttacaatgcagagactgatgaagtatttctggaagcccagattcagaatatgacaacctcacctatgtttatggagaaggtttcactggagccatctattatgtacaatgtaacagaattaaattcagtcagccaagctggagaatgtgtgtctacgtttgggtcaagagcatatttgcaaccaatggatacacgccagtacttatactgcctaaagccaaagaatgaatttgcagaaaaagcaggcatcattaagggagtaacagtaattggaaaattggatatagtatggaaaacaaatctaggtgaaaggggaaggttacagaccagccaacttcaaagaatggctccaggttatggagatgttaggttgtctttggaggcaataccagataccgtaaaccttgaagaaccttttcatattacctgtaaaataacaaactgcagcagtgaaaggactatggatctggttttggaaatgtgcaataccaattccatccactggtgtggaatttcaggaagacagctgggaaagctgcatccaagttcttcgctctgtcttgcccttactctgctttcttcagtacagggactgcaaagcatctctggcttaagactaacagacacattcttaaagagaacatatgaatatgatgacatcgcacaagtctgtgtggtatcttctgccattaaagtggaaagctgaaggaaacttccaatgttaggcttttcatttagtttcacagaactgctctttttgttacctttgtaaaatgatgacgtcaacaacgaagtaaatatgttacttaaattttctttcctgtaaaatggttaaaatattaaatatttgttttgaagaga

SEQ ID NO: 191886 - DNA, 592 bp, Homo sapiens
  Payload ID: 17914
  Gene Name: trafficking protein particle complex 13
  ENST ID: ENST00000504751
  CDS Start-End: 17-262
aaaagtgccggtcaaaatggaagtgaatccccctaaacaggagcacctgctggcgctaaaagtgatgcggctgactaagcctactttattcaccaatatcccagtaacatgtgaagagaaagacttacctggagatctctttaaccagctgatgagagatgatccttcaaccgttaatggtgcagaagttttaatgttgggagaaatgctgactttaccacagaattttgggctgatcttcagacaagttctcagcgtttaaatctttcagcctccaatgctgcagtggctgaacttaaaccggattgttgtattgatgatgtcatacatcatgaagtcaaagaaattggaacacacatcttggtatgtgctgtgagttatacaactcaggctggagaaaaaatgtatttcagaaaattcttcaaatttcaggttctcaaaccattggatgtgaaaaccaaattttacaatgcagagactgatgaagtatttctggaagcccagattcagaatatgacaacctcacctatgtttatggagaaggtttcactggagccatctattatgtacaatgtaacagaattaaattcag

SEQ ID NO: 191887 - DNA, 643 bp, Homo sapiens
  Payload ID: 17914
  Gene Name: trafficking protein particle complex 13
  ENST ID: ENST00000504243
  CDS Start-End: 1-161
cagtaacatgtgaagagaaagacttacctggagatctctttaaccagctgatgagagatgatccttcaaccgttaatggtgcagaagttttaatgttgggagaaatgctgactttaccacagaattttgggctgatcttcagacaagttctcagcgtttaaatctttcagcctccaatgctgcagtggctgaacttaaaccggattgttgtattgatgatgtcatacatcatgaagtcaaagaaattggaacacacatcttggtatgtgctgtgagttatacaactcaggctggagaaaaaatgtatttcagaaaattcttcaaatttcaggttctcaaaccattggatgtgaaaaccaaattttacaatgcagagagtgacctcagttctgtgactgatgaagtatttctggaagcccagattcagaatatgacaacctcacctatgtttatggagaaggtttcactggagccatctattatgtacaatgtaacagaattaaattcagtcagccaagctggagaatgtgtgtctacgtttgggtcaagagcatatttgcaaccaatggatacacgccagtacttatactgcctaaagccaaagaatgaatttgcagaaaaagcaggcatcattaagggagta

SEQ ID NO: 191888 - DNA, 2716 bp, Homo sapiens
  Payload ID: 17915
  Gene Name: trafficking protein particle complex 2
  Uniprot ID: P0DI81
  ENST ID: ENST00000359680
  CDS Start-End: 131-553
acatcccagggtatcgcgagaactgcttcggcgttctggctacaggttcggggcgcgggtctcttccgcggaaactgacattgcgtttccgttgtcggcctcccactgcaggagccatatattgaagaccatgtctgggagcttctactttgtaattgttggccaccatgataatccagtttttgaaatggagtttttgccagctgggaaggcagaatccaaagacgaccatcgtcatctgaaccagttcatagctcatgctgctctcgacctcgtagatgagaacatgtggctatcgaacaacatgtacttgaaaactgtggacaagttcaacgagtggtttgtgtcggcatttgtcactgcggggcatatgaggtttattatgcttcatgacataagacaagaagatggaataaagaacttctttactgatgtttatgatttatatataaagttttcaatgaatccattttatgaacccaattctcctattcgatcaagtgcatttgacagaaaagttcagtttcttgggaagaaacaccttttaagctgaatgcagaaaattccaaaataaatgatgtcaccacaatggtgtatactcaggaatgtgtacattgtaagttacttgattaaatagcctggaaaacttttgtgtattctcagcttatctaaacctaatgaaattccttttatatttaaaaatagtacattctgtctcatgtcacgtatcaatagatcaattggtatttccttgtgaacagtgttatttataaagagttcattatcaataatcatgttttttttttttttttttttctgatacagagtctcactctgttgccaggctggagtgcagtggcgcaatcttggctcactgcaacctccgcctcccaggttcaggcgattctcctgcctcagcctccaagtagctgggactacaggcgcgtgccaccacgcccggctaatttttgtatttttagtagagacagggtttcaccatattggtcaggctggtcttgaactcctgacctcgtgatctgcccgccttggcctcccaaagtactgggattacaggcgtgagccaccgtgcccaaccatgaaatatttttacttaaaaattgggaataagctcgctttttttttttttgagatggagtcttgctcctgttgtgcaggctgtagtgcagtggcacgatcttggctcactgcaacctccacctcccgggttcaagcaattctccttcttcagcctcccgagtagctgagattataggcgtgcaccaccacacctggctaatttttgtatttttagtagagacagggtttcaccatattggtcaggctggtcttgaactcctgacctcgtgatccacccacctcaggaagtgctgggattacaggcgtgtgagccaccacgcccggccatgaaatatttttacttaaaaattgggaataagctttttggttttttgtgggtttttgtttttgttttttgttttttgtttttttgagatggagtcttgctcctgttgtgcaggctggagtgcagtggcacagtcttggctcactgcaacctccacctcctgggttcaagcaattctccttcttcagcctcccgagtagctgggattacaggcatgcaccaccacacctggctaatttttgtgtttttagtagagacggggtttcgctattttggccgggctggtttcaaactcctgacctcagttgatccacccgcctcagcctcccaaagtgctaggattacaggcatgaaccaccgtgcccggccaggaataagcttttgacttacccaattcagataggttgatctttggggttttttttttttttttgagatggagtttcgctctgttgtccaggctggagtgcaatggcagttgtttcaccgtaacctctgcctcctgacttcaagcaattctcctgcctcagcctcccaaagtgctgggattacaggtgtgagccaccgtgcccggcccagataggttgatcttaatgtaacaacccaaaaataaatgtcatagtcaagatttggtagataaatttaaaattaaaatattctgcagttgggagtgaaatgtgatagcacatacgttgacattatgcatttagagatgttataaaaatgtataggcagtatacacagcactactcaagaagccaaagaaacacttgtgcagtgctaagtgtcacatgtctgcttccaccagaggctaggaatagtgatcctgctataatgtgagaacccaaatcatgtttataaaataggacgctgggagcagttgcaggccacagtgaagtgtgttgcttctgtcactttatattcttatatttcctttccctcagacagtaaactgttgatactcgtacttgtaaaaaattgtaaggcaatttttagtattgttgtcaaagaaaagcttggattacattaacatttgtattcagtcttttaggtgatacaccagagggggctgggaattgtctctttgttcctataagtagatcttaatgtaaaatagtaaatgtccattgaaaagcaagtaatacagcctgtgctaattgggagcacttgaacaattttgttccattctgagtaacttttgagcaagtaattctaagctttgtcttgtatccttgtgtgaaattgcataatttttaccctatttgatttcttaaataaagatgtttgctcaag

SEQ ID NO: 191889 - DNA, 2776 bp, Homo sapiens
  Payload ID: 17915
  Gene Name: trafficking protein particle complex 2
  Uniprot ID: P0DI81
  ENST ID: ENST00000380579
  CDS Start-End: 194-616
attgcgtttccgttgtcggcctcccactgcagtatcaccttctcccccaagtgtgacaaccaaagatgtctccagatattgccagatgtcctcttggaagcaagatcgctccgggttgagatccacagagctaaacgttttagagtaccaaccattgtgtgctgtgaggtaaaggagccatatattgaagaccatgtctgggagcttctactttgtaattgttggccaccatgataatccagtttttgaaatggagtttttgccagctgggaaggcagaatccaaagacgaccatcgtcatctgaaccagttcatagctcatgctgctctcgacctcgtagatgagaacatgtggctatcgaacaacatgtacttgaaaactgtggacaagttcaacgagtggtttgtgtcggcatttgtcactgcggggcatatgaggtttattatgcttcatgacataagacaagaagatggaataaagaacttctttactgatgtttatgatttatatataaagttttcaatgaatccattttatgaacccaattctcctattcgatcaagtgcatttgacagaaaagttcagtttcttgggaagaaacaccttttaagctgaatgcagaaaattccaaaataaatgatgtcaccacaatggtgtatactcaggaatgtgtacattgtaagttacttgattaaatagcctggaaaacttttgtgtattctcagcttatctaaacctaatgaaattccttttatatttaaaaatagtacattctgtctcatgtcacgtatcaatagatcaattggtatttccttgtgaacagtgttatttataaagagttcattatcaataatcatgttttttttttttttttttttctgatacagagtctcactctgttgccaggctggagtgcagtggcgcaatcttggctcactgcaacctccgcctcccaggttcaggcgattctcctgcctcagcctccaagtagctgggactacaggcgcgtgccaccacgcccggctaatttttgtatttttagtagagacagggtttcaccatattggtcaggctggtcttgaactcctgacctcgtgatctgcccgccttggcctcccaaagtactgggattacaggcgtgagccaccgtgcccaaccatgaaatatttttacttaaaaattgggaataagctcgctttttttttttttgagatggagtcttgctcctgttgtgcaggctgtagtgcagtggcacgatcttggctcactgcaacctccacctcccgggttcaagcaattctccttcttcagcctcccgagtagctgagattataggcgtgcaccaccacacctggctaatttttgtatttttagtagagacagggtttcaccatattggtcaggctggtcttgaactcctgacctcgtgatccacccacctcaggaagtgctgggattacaggcgtgtgagccaccacgcccggccatgaaatatttttacttaaaaattgggaataagctttttggttttttgtgggtttttgtttttgttttttgttttttgtttttttgagatggagtcttgctcctgttgtgcaggctggagtgcagtggcacagtcttggctcactgcaacctccacctcctgggttcaagcaattctccttcttcagcctcccgagtagctgggattacaggcatgcaccaccacacctggctaatttttgtgtttttagtagagacggggtttcgctattttggccgggctggtttcaaactcctgacctcagttgatccacccgcctcagcctcccaaagtgctaggattacaggcatgaaccaccgtgcccggccaggaataagcttttgacttacccaattcagataggttgatctttggggttttttttttttttttgagatggagtttcgctctgttgtccaggctggagtgcaatggcagttgtttcaccgtaacctctgcctcctgacttcaagcaattctcctgcctcagcctcccaaagtgctgggattacaggtgtgagccaccgtgcccggcccagataggttgatcttaatgtaacaacccaaaaataaatgtcatagtcaagatttggtagataaatttaaaattaaaatattctgcagttgggagtgaaatgtgatagcacatacgttgacattatgcatttagagatgttataaaaatgtataggcagtatacacagcactactcaagaagccaaagaaacacttgtgcagtgctaagtgtcacatgtctgcttccaccagaggctaggaatagtgatcctgctataatgtgagaacccaaatcatgtttataaaataggacgctgggagcagttgcaggccacagtgaagtgtgttgcttctgtcactttatattcttatatttcctttccctcagacagtaaactgttgatactcgtacttgtaaaaaattgtaaggcaatttttagtattgttgtcaaagaaaagcttggattacattaacatttgtattcagtcttttaggtgatacaccagagggggctgggaattgtctctttgttcctataagtagatcttaatgtaaaatagtaaatgtccattgaaaagcaagtaatacagcctgtgctaattgggagcacttgaacaattttgttccattctgagtaacttttgagcaagtaattctaagctttgtcttgtatccttgtgtgaaattgcataatttttaccctatttgatttcttaaataaagatgtttgctc

SEQ ID NO: 191890 - DNA, 678 bp, Homo sapiens
  Payload ID: 17915
  Gene Name: trafficking protein particle complex 2
  Uniprot ID: P0DI81
  ENST ID: ENST00000458511
  CDS Start-End: 105-629
ctcttccgcggaaactgacattgcgtttccgttgtcggcctcccactgcagtatcaccttctcccccaagtgtgacaaccaaagatgtctccagatattgccagatgtcctcttggaagcaagatcgctccgggttgagatccacagagctaaacgttttagagtaccaaccattgtgtgctgtgaggagccatatattgaagaccatgtctgggagcttctactttgtaattgttggccaccatgataatccagtttttgaaatggagtttttgccagctgggaaggcagaatccaaagacgaccatcgtcatctgaaccagttcatagctcatgctgctctcgacctcgtagatgagaacatgtggctatcgaacaacatgtacttgaaaactgtggacaagttcaacgagtggtttgtgtcggcatttgtcactgcggggcatatgaggtttattatgcttcatgacataagacaagaagatggaataaagaacttctttactgatgtttatgatttatatataaagttttcaatgaatccattttatgaacccaattctcctattcgatcaagtgcatttgacagaaaagttcagtttcttgggaagaaacaccttttaagctgaatgcagaaaattccaaaataaatgatgtcaccacaatggtgtatactca

SEQ ID NO: 191891 - DNA, 562 bp, Homo sapiens
  Payload ID: 17915
  Gene Name: trafficking protein particle complex 2
  ENST ID: ENST00000518847
  CDS Start-End: 341-562
atcccagggtatcgcgagaactgcttcggcgttctggctacaggttcggggcgcgggtctcttccgcggaaactgacattgcgtttccgttgtcggcctcccactgcagtatcaccttctcccccaagtgtgacaaccaaagatgtctccagatattgccagatgtcctcttggaagcaagatcgctccgggttgagatccacagagctaaacgttttagagtaccaaccattgtgtgctgtgaggtaaaggtaagtgacatgaggtagagttggttttagcttcccccgacggatgcctcctggaaatttctaaggcaaggagccatatattgaagaccatgtctgggagcttctactttgtaattgttggccaccatgataatccagtttttgaaatggagtttttgccagctgggaaggcagaatccaaagacgaccatcgtcatctgaaccagttcatagctcatgctgctctcgacctcgtagatgagaacatgtggctatcgaacaacatgtacttgaaaactgtggacaagttcaacgagtggtttgtgtcggca

SEQ ID NO: 191892 - DNA, 561 bp, Homo sapiens
  Payload ID: 17915
  Gene Name: trafficking protein particle complex 2
  ENST ID: ENST00000519885
  CDS Start-End: 71-412
ctcttccgcggaaactgacattgcgtttccgttgtcggcctcccactgcaggagccatatattgaagaccatgtctgggagcttctactttgtaattgttggccaccatgataatccagtttttgaaatggagtttttgccagctgggaaggcagaatccaaagacgaccatcgtcatctgaaccagttcatagctcatgctgctctcgacctcgtagatgagaacatgtggctatcgaacaacatgtacttgaaaactgtggacaagttcaacgagtggtttgtgtcggcatttgtcactgcggggcatatgaggtttattatgcttcatgacataagacaagaagatggaataaagaacttctttactgatgtttatgatttatatataaaggtatggtatgttctataatttttaaattctgatgagaaaggattcgacctttgtcaggaaactggcctattgaagtaactcccttaggctgcagtttacctttcagactagctttcccccatcagaactatctctggcaactccctccgcaggtaagtcttcacagc

SEQ ID NO: 191893 - DNA, 2215 bp, Homo sapiens
  Payload ID: 17916
  Gene Name: trafficking protein particle complex 2-like
  Uniprot ID: Q9UL33
  ENST ID: ENST00000301021
  CDS Start-End: 66-488
gctttggaggccgcgtgaccagcggcgggtcacgtgacgcggtgcctggcgccgagcctcccaagatggcggtgtgcatcgcggtgattgccaaggagaattaccccctctacattcgcagcacccctacggagaacgagctgaagttccactacatggtgcacacatctctggacgtggtggatgagaagatctccgcaatggggaaggccctggtcgaccagagggagctgtacctgggcctgctctaccccacggaggactacaaggtatacggctacgtcaccaactccaaggtgaagtttgtcatggtggtagattcctccaacacagcccttcgagacaacgaaattcgcagcatgttccggaagctacacaactcctacacagacgtgatgtgcaaccccttctacaacccgggggaccgcatccagtccagcagggcctttgataacatggtgacgtcgatgatgatacaggtgtgctgagtgagctgtgctgccagccatcgcagaggagcccgcgcacgactgtggtggggccgtcggtctgttctggttgcctcttcctgaatgggacgcctggggctttcagggcaggcagctgtgcatgttctctcaactaaaggtcttgtgagaggagatttggctttttccttccgtgtcagccaaggatttaattaagaagaattcaactaaggacttttctggggtgtgggcagaggtttgggatcagatggcgcaggtagcctgtcctcagttgtcccaaaggggcagaggcaggggtgcctggagccaagagttcctgagcctgcaggacctgtgaccatgtgggtcacccactggctgaacaggtgggctggtctggagggggtggcctcctgagcccagaaccagcctaggatctaggggcacaaggggagccggcgtggcttcccacaggggagggccctcctctttctggacttggcctccattctttgcatctggctcaatgtctggattccgcccggccttaaaaggagcccttgtgaaacctgggaagcctcgtggccccgcggcgttggctcagctgcagccctggtcctaaaccttggagcgcagacttgaggcaccccctcctgcctgttggtgctgagggggttgggtgctgtgtcacttgatgacgtggctgactaccacccagggcagcggccgagcccatagtggcgtcagtgccgccggcgtccttggggtccagcggtcaaggctcagcccgctgaggggacccccccggagttggttccagcactggtccaggactggagagtttctcaaggaccttgaggaccccagaagcccttgcagcaggaaaggctgtaagggggggtcagcctagggcaggacctagggaggggaactttcttgatacatatttgccttttcatcccatctagcaagcacagtgttaattttagaaattatagaagaaaaaatcagcaaggagtgtgggaaaactgcatgccccaggcctcccccgccccagggtgaattggaagccctggaatgggccgaggcacaccaggcagctgatctgggtgcatgtgggccacagaccactctcacaaggttaaatctttaacaagagcctcatgtttgttaggagaaggtgggaccccagcccaagcacttccccattgcagcctggcatgaaatctttgccttttagtggggatcactcctgcccgagtcctggctgtggtggggactctgcaagttgctaacccagcgtccattctctttcctccgtactaacagaaccccggtgcctctgcccagttccaatagcgggcagacgagagccatgtcctgggctcccttgcagcccggggtgtgcagctgtggcgtggaggtgggtggtgctgggagagacttgcagggaagctcctgtgaaggggactcagctgccacatgcaggacccttcccctttgccttcttcctgcctggaacatggatgtgatggctggtgctgggacagctgtcctgagagcgtgaggaaagggtcacaccctaaggacagtggagcagaacacaggaaggaccctgggcctttgctgacgcagaacgcgggaaggaccctgggcctttgctgacataccagccccagactacttaaattcagctttttttttaatgtgagaaaataaatgcacccctctctggtttaagccactga

SEQ ID NO: 191894 - DNA, 1084 bp, Homo sapiens
  Payload ID: 17916
  Gene Name: trafficking protein particle complex 2-like
  ENST ID: ENST00000565205
  CDS Start-End: 21-248
ctggcgccgagcctcccaagatggcggtgtgcatcgcggtgattgccaaggagaattaccccctctacattcgcagcacccctacggagaacgagctgaagttccactacatggtgcacacatctctggacgtggtggatgagaagatctccgcaatggggaaggccctggtcgaccagagggagctgtacctgggcctgctctaccccacggaggactacaagttaactttccgggccaggcattgattcatgaagagggtgaggtgttccagacagacagactcggagtctaggtggttcggctcctggagtgtgaactgggtaaggcttggctgcctgctcttcgcttctcctgcaaacaccagacgtcgccctagcaaagtatttaggcttgtacccagcacggccactgcaggaccagcccagcatgggcatttcctgtgattcaaggttgccacatttctccaaagtgagggcccacagagggccctccaccggcagtccctgtgttacgagtgccttccctaaccagctgtgcagatacggctacgtcaccaactccaaggtgaagtttgtcatggtggtagattcctccaacacagcccttcgagacaacgaaattcgcagcatgttccggaagctacacaactcctacacagacgtgatgtgcaaccccttctacaacccgggggaccgcatccagtccagggcctttgataacatggtgacgtcgatgatgatacaggtgtgctgagtgagctgtgctgccagccatcgcagaggagcccgcgcacgactgtggtggggccgtcggtctgttctggttgcctcttcctgaatgggacgcctggggctttcagggcaggcagctgtgcatgttctctcaactaaaggtcttgtgagaggagatttggctttttccttccgtgtcagccaaggatttaattaagaagaattcaactaaggacttttctggggtgtgggcagaggtttgggatcagatggcgcaggtagcctgtcctcagttgtcccaaaggggcagaggcaggggtgcctggagccaagagttcctgagcctgcag

SEQ ID NO: 191895 - DNA, 3102 bp, Homo sapiens
  Payload ID: 17916
  Gene Name: trafficking protein particle complex 2-like
  ENST ID: ENST00000565504
  CDS Start-End: 25-750
gtgcctggcgccgagcctcccaagatggcggtgtgcatcgcggtgattgccaaggagaattaccccctctacattcgcagcacccctacggagaacgagctgaagttccactacatggtgcacacatctctggacgtggtggatgagaagatctccgcaatggggaaggccctggtcgaccagagggagctgtacctgggcctgctctaccccacggaggactacaaggtatacggctacgtcaccaactccaaggtgaagtttgtcatggtggtagattcctccaacacagcccttcgagacaacgaaattcgcagcatgttccggaagctacacaactcctacacagacgtgatgtgcaaccccttctacaacccgggggaccgcatccagtccaggtgggccctactttctgtgtcttgccaccttctttctgtaggacatgccttgccattttggttgccaaaatgcaaccatttggaaaataagggaggaaagatctttttaagctatgagcaccatccccctagggcagaggttttaaagccacaaagccccgtttctccacaccaactcttacacagatctccagcgcataaagtggatagagtgtgtgtggtgtggggagtagagcttgcccatttggcttcccaggtgtgcccagtgggtacctggggcacctgcaggactcagggccaagcacatgggcagtggctttcagggatcacacgtccttttgtagctacctgatcttttatgttgaatttggaacagtcaggaacctggtttgcaggtgtcttccgaatagtccacaaagtaaacagatttaacttttgaacatcatgagggaaatgtggggtccatgcccacattccagacttgctttcagtgagtccccagttccaagacataattccctgtggttggcagggaagaggacgctgcagtgatccaaggcaggcccctccctccaccaggacactgtcttggggccatcctggtcccagatgggagcaggcaggcgaatgtccacagtcttgcctcctgggctgcacagggccatccttgccacaccaccgctctgcctgcccatgctgctccctcctccaccccttcctggggccttgggaggctgcacagggaacttggaggcagcagatgggttctcagtgcccggtggggtgggactcctgtcctggcctctcagcggagttcacatttctggaccctggagaaggtcccgagcatcctgtggatggagccatgctgcccggcccgtctctgagcagaggggtggagggcctggctctcctctgagtgggtctgtttctcttagcagggcctttgataacatggtgacgtcgatgatgatacaggtgtgctgagtgagctgtgctgccagccatcgcagaggagcccgcgcacgactgtggtggggccgtcggtctgttctggttgcctcttcctgaatgggacgcctggggctttcagggcaggcagctgtgcatgttctctcaactaaaggtcttgtgagaggagatttggctttttccttccgtgtcagccaaggatttaattaagaagaattcaactaaggacttttctggggtgtgggcagaggtttgggatcagatggcgcaggtagcctgtcctcagttgtcccaaaggggcagaggcaggggtgcctggagccaagagttcctgagcctgcaggacctgtgaccatgtgggtcacccactggctgaacaggtgggctggtctggagggggtggcctcctgagcccagaaccagcctaggatctaggggcacaaggggagccggcgtggcttcccacaggggagggccctcctctttctggacttggcctccattctttgcatctggctcaatgtctggattccgcccggccttaaaaggagcccttgtgaaacctgggaagcctcgtggccccgcggcgttggctcagctgcagccctggtcctaaaccttggagcgcagacttgaggcaccccctcctgcctgttggtgctgagggggttgggtgctgtgtcacttgatgacgtggctgactaccacccagggcagcggccgagcccatagtggcgtcagtgccgccggcgtccttggggtccagcggtcaaggctcagcccgctgaggggacccccccggagttggttccagcactggtccaggactggagagtttctcaaggaccttgaggaccccagaagcccttgcagcaggaaaggctgtaagggggggtcagcctagggcaggacctagggaggggaactttcttgatacatatttgccttttcatcccatctagcaagcacagtgttaattttagaaattatagaagaaaaaatcagcaaggagtgtgggaaaactgcatgccccaggcctcccccgccccagggtgaattggaagccctggaatgggccgaggcacaccaggcagctgatctgggtgcatgtgggccacagaccactctcacaaggttaaatctttaacaagagcctcatgtttgttaggagaaggtgggaccccagcccaagcacttccccattgcagcctggcatgaaatctttgccttttagtggggatcactcctgcccgagtcctggctgtggtggggactctgcaagttgctaacccagcgtccattctctttcctccgtactaacagaaccccggtgcctctgcccagttccaatagcgggcagacgagagccatgtcctgggctcccttgcagcccggggtgtgcagctgtggcgtggaggtgggtggtgctgggagagacttgcagggaagctcctgtgaaggggactcagctgccacatgcaggacccttcccctttgccttcttcctgcctggaacatggatgtgatggctggtgctgggacagctgtcctgagagcgtgaggaaagggtcacaccctaaggacagtggagcagaacacaggaaggaccctgggcctttgctgacgcagaacgcgggaaggaccctgggcctttgctgacataccagccccagactacttaaattcagctttttttttaatgtgagaaaataaatgcacccctctctggttt

SEQ ID NO: 191896 - DNA, 499 bp, Homo sapiens
  Payload ID: 17916
  Gene Name: trafficking protein particle complex 2-like
  ENST ID: ENST00000567312
  CDS Start-End: 17-346
cgccgagcctcccaagatggcggtgtgcatcgcggtgattgccaaggagaattaccccctctacattcgcagcacccctacggagaacgagctgaagttccactacatggtgcacacatctctggacgtggtggatgagaagatctccgcaatggggaaggccctggtcgaccagagggagctgtacctgggcctgctctaccccacggaggactacaagatgttccggaagctacacaactcctacacagacgtgatgtgcaaccccttctacaacccgggggaccgcatccagtccagggcctttgataacatggtgacgtcgatgatgatacaggtgtgctgagtgagctgtgctgccagccatcgcagaggagcccgcgcacgactgtggtggggccgtcggtctgttctggttgcctcttcctgaatgggacgcctggggctttcagggcaggcagctgtgcatgttctctcaactaaaggtcttgtgagagga

SEQ ID NO: 191897 - DNA, 542 bp, Homo sapiens
  Payload ID: 17916
  Gene Name: trafficking protein particle complex 2-like
  ENST ID: ENST00000562792
  CDS Start-End: 25-138
gtgcctggcgccgagcctcccaagatggcggtgtgcatcgcggtgattgccaaggaggtgcgtacgcgcggcgtggggcgtccgggctcgcaccatcctcggctctccgctttctttctacttcttccctgggcttagaaggcaccttaggaaatgggacctggaggaggccttcgccgagctccagcggtcaggggcttcgcggtggacgagccgccaggcagaccctgactgagaccccagttccgcgctcgcccgtcccgctgctgaacgcacccctcggcgcagcaggtctcctccccgccaggacccaccagaaacctagcacccctacggagaacgagctgaagttccactacatggtgcacacatctctggacgtggtggatgagaagatctccgcaatggggaaggccctggtcgaccagagggagctgtacctgggcctgctctaccccacggaggactacaaggtatacggctacgtcaccaactccaaggtgaagtttgtcatggtggtagattcctccaacacagccctt

SEQ ID NO: 191898 - DNA, 915 bp, Homo sapiens
  Payload ID: 17916
  Gene Name: trafficking protein particle complex 2-like
  ENST ID: ENST00000564404
  CDS Start-End: 8-235
tcccaagatggcggtgtgcatcgcggtgattgccaaggagaattaccccctctacattcgcagcacccctacggagaacgagctgaagttccactacatggtgcacacatctctggacgtggtggatgagaagatctccgcaatggggaaggccctggtcgaccagagggagctgtacctgggcctgctctaccccacggaggactacaagttaactttccgggccaggcattgattcatgaagagggtgaggtgttccagacagacagactcggagtctaggtggttcggctcctggagtgtgaactgggtaaggcttggctgcctgctcttcgcttctcctgcaaacaccagacgtcgccctagcaaagtatttaggcttgtacccagcacggccactgcaggaccagcccagcatgggcatttcctgtgattcaaggttgccacatttctccaaagtgagggcccacagagggccctccaccggcagtccctgtgttacgagtgccttccctaaccagctgtgcagatacggctacgtcaccaactccaaggtgaagtttgtcatggtggtagattcctccaacacagcccttcgagacaacgaaattcgcagcatgttccggaagctacacaactcctacacagacgtgatgtgcaaccccttctacaacccgggggaccgcatccagtccagtgggtctgtttctcttagcagggcctttgataacatggtgacgtcgatgatgatacaggtgtgctgagtgagctgtgctgccagccatcgcagaggagcccgcgcacgactgtggtggggccgtcggtctgttctggttgcctcttcctgaatgggacgcctggggctttcagggcaggcagctgtgcatgttctctcaactaaaggtcttgtgagag

SEQ ID NO: 191899 - DNA, 1060 bp, Homo sapiens
  Payload ID: 17916
  Gene Name: trafficking protein particle complex 2-like
  ENST ID: ENST00000564365
  CDS Start-End: 425-604
tctccagaggacagagacagccgtcagaattaccccctctacattcgcagcacccctacggagaacgagctgaagttccactacatggtgcacacatctctggacgtggtggatgagaagatctccgcaatggggaaggccctggtcgaccagagggagctgtacctgggcctgctctaccccacggaggactacaagttaactttccgggccaggcattgattcatgaagagggtgaggtgttccagacagacagactcggagtctaggtggttcggctcctggagtgtgaactgggttgccacatttctccaaagtgagggcccacagagggccctccaccggcagtccctgtgttacgagtgccttccctaaccagctgtgcagatacggctacgtcaccaactccaaggtgaagtttgtcatggtggtagattcctccaacacagcccttcgagacaacgaaattcgcagcatgttccggaagctacacaactcctacacagacgtgatgtgcaaccccttctacaacccgggggaccgcatccagtccagcagggcctttgataacatggtgacgtcgatgatgatacaggtgtgctgagtgagctgtgctgccagccatcgcagaggagcccgcgcacgactgtggtggggccgtcggtctgttctggttgcctcttcctgaatgggacgcctggggctttcagggcaggcagctgtgcatgttctctcaactaaaggtcttgtgagaggagatttggctttttccttccgtgtcagccaaggatttaattaagaagaattcaactaaggacttttctggggtgtgggcagaggtttgggatcagatggcgcaggtagcctgtcctcagttgtcccaaaggggcagaggcaggggtgcctggagccaagagttcctgagcctgcaggacctgtgaccatgtgggtcacccactggctgaacaggtgggctggtctggagggggtggcctcctgagcccagaaccagcctaggatctaggggcacaaggggagccggcgtggcttcccacagggg

SEQ ID NO: 191900 - DNA, 558 bp, Homo sapiens
  Payload ID: 17916
  Gene Name: trafficking protein particle complex 2-like
  ENST ID: ENST00000561840
  CDS Start-End: 79-468
ggtgattgccaaggagcacccctacggagaacgagctgaagttccactacatggtgcacacatctctggacgtggtggatgagaagatctccgcaatggggaaggccctggtcgaccagagggagctgtacctgggcctgctctaccccacggaggactacaaggttgccacatttctccaaagtgagggcccacagagggccctccaccggcagtccctgtgttacgagtgccttccctaaccagctgtgcagatacggctacgtcaccaactccaaggtgaagtttgtcatggtggtagattcctccaacacagcccttcgagacaacgaaattcgcagcatgttccggaagctacacaactcctacacagacgtgatgtgcaaccccttctacaacccgggggaccgcatccagtccagggcctttgataacatggtgacgtcgatgatgatacaggtgtgctgagtgagctgtgctgccagccatcgcagaggagcccgcgcacgactgtggtggggccgtcggtctgttctggttgcctcttcctgaatggga

SEQ ID NO: 191901 - DNA, 854 bp, Homo sapiens
  Payload ID: 17916
  Gene Name: trafficking protein particle complex 2-like
  ENST ID: ENST00000567895
  CDS Start-End: 133-462
gctttggaggccgcgtgaccagcggcgggtcacgtgacgcggtgcctggcgccgagcctcccaagatggcggtgtgcatcgcggtgattgccaaggagcacccctacggagaacgagctgaagttccactacatggtgcacacatctctggacgtggtggatgagaagatctccgcaatggggaaggccctggtcgaccagagggagctgtacctgggcctgctctaccccacggaggactacaaggtatacggctacgtcaccaactccaaggtgaagtttgtcatggtggtagattcctccaacacagcccttcgagacaacgaaattcgcagcatgttccggaagctacacaactcctacacagacgtgatgtgcaaccccttctacaacccgggggaccgcatccagtccagggcctttgataacatggtgacgtcgatgatgatacaggtgtgctgagtgagctgtgctgccagccatcgcagaggagcccgcgcacgactgtggtggggccgtcggtctgttctggttgcctcttcctgaatgggacgcctggggctttcagggcaggcagctgtgcatgttctctcaactaaaggtcttgtgagaggagatttggctttttccttccgtgtcagccaaggatttaattaagaagaattcaactaaggacttttctggggtgtgggcagaggtttgggatcagatggcgcaggtagcctgtcctcagttgtcccaaaggggcagaggcaggggtgcctggagccaagagttcctgagcctgcaggacctgtgaccatgtgggtcacccactggctgaacaggtgggctggtctggagggggtggcctc

SEQ ID NO: 191902 - DNA, 801 bp, Homo sapiens
  Payload ID: 17916
  Gene Name: trafficking protein particle complex 2-like
  ENST ID: ENST00000568583
  CDS Start-End: 11-451
gcctcccaagatggcggtgtgcatcgcggtgattgccaaggagaattaccccctctacattcgcagcacccctacggagaacgagctgaagttccactacatggtgcacacatctctggacgtggtggatgagaagatctccgcaatggggaaggccctggtcgaccagagggagctgtacctgggcctgctctaccccacggaggactacaaggtatacggctacgtcaccaactccaaggtgaagtttgtcatggtggtagattcctccaacacagcccttcgagacaacgaaattcgcagcatgttccggaagctacacaactcctacacagacgtgatgtgcaaccccttctacaacccgggggaccgcatccagtccagtgggtctgtttctcttagcagggcctttgataacatggtgacgtcgatgatgatacaggtgtgctgagtgagctgtgctgccagccatcgcagaggagcccgcgcacgactgtggtggggccgtcggtctgttctggttgcctcttcctgaatgggacgcctggggctttcagggcaggcagctgtgcatgttctctcaactaaaggtcttgtgagaggagatttggctttttccttccgtgtcagccaaggatttaattaagaagaattcaactaaggacttttctggggtgtgggcagaggtttgggatcagatggcgcaggtagcctgtcctcagttgtcccaaaggggcagaggcaggggtgcctggagccaagagttcctgagcctgcaggacctgtgaccatgtgggtcac

SEQ ID NO: 191903 - DNA, 281 bp, Homo sapiens
  Payload ID: 17916
  Gene Name: trafficking protein particle complex 2-like
  ENST ID: ENST00000625770
  CDS Start-End: 54-281
gcgtgaccagcggcgggtcacgtgacgcggtgcctggcgccgagcctcccaagatggcggtgtgcatcgcggtgattgccaaggagaattaccccctctacattcgcagcacccctacggagaacgagctgaagttccactacatggtgcacacatctctggacgtggtggatgagaagatctccgcaatggggaaggccctggtcgaccagagggagctgtacctgggcctgctctaccccacggaggactacaagttaactttccgggccaggcattga

SEQ ID NO: 191904 - DNA, 590 bp, Homo sapiens
  Payload ID: 17917
  Gene Name: trafficking protein particle complex 3
  ENST ID: ENST00000373159
  CDS Start-End: 119-475
gcagtgagtcagtgccggtcggtcttgtgggctgaggggcagcggcttaggctccggcgtctgcaggggtcgccgagctaacccgtggctaggcgagtggggcggggcggccggcaccatgtcgaggcaggcgaaccgtggcaccgagagcaagaaaatgagctctgagctcttcaccctgacctatggtgccctggtcacccagctatgtaaggactatgaaaatgatgaagatgtgaataaacagctggacaaaatgggctttaacattggagtccggctgattgaagatttcttggctcggtcaaatgttgggaggtgccatgactttcgggaaactgcggatgtcattgccaaggaaagaaaaatgtttctgggaaaacaaaacaaaacaaagcgacaggcaaaactgtatgatgccgtgaaggagaggggtgcagcatcatgtacagatgcttctcctttgttgtcctgagtatctgaagtgtcatcttgcagaggccacaggtggcgttcaagatgtacttgggcatcactccaagcattactaattggagcccagctggtgatgaattctccctcattttgga

SEQ ID NO: 191905 - DNA, 1056 bp, Homo sapiens
  Payload ID: 17917
  Gene Name: trafficking protein particle complex 3
  Uniprot ID: O43617
  ENST ID: ENST00000373162
  CDS Start-End: 503-907
cgcagtgagtcagtgccggtcggtcttgtgggctgaggggcagcggcttaggctccggcgtctgcaggggtcgccgagctaacccgtggctaggcgagtggggcggggcggccggcaccatgtcgaggcaggcgaaccgtggcaccgagagcaagaaaatggtaacttggagcgcgtgacctcggcgggcggggcgaaattgaggcgtacagggaaggggcccggcgccgagcgcgaggtgcgtttggaaaagggccttcctgtgagctctggcaaggggaagcctcttgctgggtcactccgggggcgttccaggcaggtgaggggaccgtcggagaagttccccggaggagaccccgcccccaaggcctgagtgcagctctgtgctaagccaacaacaacgacgagctctgagctcttcaccctgacctatggtgccctggtcacccagctatgtaaggactatgaaaatgatgaagatgtgaataaacagctggacaaaatgggctttaacattggagtccggctgattgaagatttcttggctcggtcaaatgttgggaggtgccatgactttcgggaaactgcggatgtcattgccaaggtggcgttcaagatgtacttgggcatcactccaagcattactaattggagcccagctggtgatgaattctccctcattttggaaaataaccccttggtggactttgtggaacttcctgataaccactcatcccttatttattccaatctcttgtgtggggtgttgcggggagctttggagatggtccagatggctgtggaggccaagtttgtccaggacaccctgaaaggagacggtgtgacagaaatccggatgagattcatcaggcggattgaggacaatcttccagctggagaggaataaccatccctacaactcgaggatagccatcaggagcactgttggaatcagcaggcctctgtgctccctctgccctccagaactcagtgactcttgaacatggatgttatatattcttataacctgtttccattctccattcaaataaagag

SEQ ID NO: 191906 - DNA, 951 bp, Homo sapiens
  Payload ID: 17917
  Gene Name: trafficking protein particle complex 3
  Uniprot ID: O43617
  ENST ID: ENST00000373163
  CDS Start-End: 289-693
cttaggctccggcgtctgcaggggtcgccgagctaacccgtggctaggcgagtggggcggggcggccggcaccatgtcgaggcaggcgaaccgtggcaccgagagcaagaaaatggtaacttggagcgcgtgacctcggcgggcggggcgaaattgaggcgtacagggaaggggcccggcgccgagcgcgagagctctgagctcttcaccctgacctatggtgccctggtcacccagctatgtaaggactatgaaaatgatgaagatgtgaataaacagctggacaaaatgggctttaacattggagtccggctgattgaagatttcttggctcggtcaaatgttgggaggtgccatgactttcgggaaactgcggatgtcattgccaaggtggcgttcaagatgtacttgggcatcactccaagcattactaattggagcccagctggtgatgaattctccctcattttggaaaataaccccttggtggactttgtggaacttcctgataaccactcatcccttatttattccaatctcttgtgtggggtgttgcggggagctttggagatggtccagatggctgtggaggccaagtttgtccaggacaccctgaaaggagacggtgtgacagaaatccggatgagattcatcaggcggattgaggacaatcttccagctggagaggaataaccatccctacaactcgaggatagccatcaggagcactgttggaatcagcaggcctctgtgctccctctgccctccagaactcagtgactcttgaacatggatgttatatattcttataacctgtttccattctccattcaaataaagagcagactgcgatatagtccatttaccccatgtgtgcacattcaggagcgacagtctctgcccccattcccttgagaggggctggatgtaatcacctttggttggactaga

SEQ ID NO: 191907 - DNA, 1265 bp, Homo sapiens
  Payload ID: 17917
  Gene Name: trafficking protein particle complex 3
  Uniprot ID: O43617
  ENST ID: ENST00000373166
  CDS Start-End: 92-634
tgggctgaggggcagcggcttaggctccggcgtctgcaggggtcgccgagctaacccgtggctaggcgagtggggcggggcggccggcaccatgtcgaggcaggcgaaccgtggcaccgagagcaagaaaatgagctctgagctcttcaccctgacctatggtgccctggtcacccagctatgtaaggactatgaaaatgatgaagatgtgaataaacagctggacaaaatgggctttaacattggagtccggctgattgaagatttcttggctcggtcaaatgttgggaggtgccatgactttcgggaaactgcggatgtcattgccaaggtggcgttcaagatgtacttgggcatcactccaagcattactaattggagcccagctggtgatgaattctccctcattttggaaaataaccccttggtggactttgtggaacttcctgataaccactcatcccttatttattccaatctcttgtgtggggtgttgcggggagctttggagatggtccagatggctgtggaggccaagtttgtccaggacaccctgaaaggagacggtgtgacagaaatccggatgagattcatcaggcggattgaggacaatcttccagctggagaggaataaccatccctacaactcgaggatagccatcaggagcactgttggaatcagcaggcctctgtgctccctctgccctccagaactcagtgactcttgaacatggatgttatatattcttataacctgtttccattctccattcaaataaagagcagactgcgatatagtccatttaccccatgtgtgcacattcaggagcgacagtctctgcccccattcccttgagaggggctggatgtaatcacctttggttggactagaaagagctcaaaccattttacattcctgtttgaatttttccaaagcaaaactcactttgaccccattaagaggcaagcctggcacatctatccctgggcctttagaaagccatttgcctcaaatggctatagggttgtggggtggagggaggaagggctgggagggagtggggaggaattgctagctgtagtgtgacacattgtagtgtttgccaggaaaggagccagtcatgccggaaacactgacttctgggaagccacccaggtctcattcctccctgctgttggaggcaacatctcctctttttacagagggtacatccttttttcttacaaattcttcaataaagacacattcttgagtgaaatcccaa

SEQ ID NO: 191908 - DNA, 1336 bp, Homo sapiens
  Payload ID: 17917
  Gene Name: trafficking protein particle complex 3
  ENST ID: ENST00000616395
  CDS Start-End: 137-703
gcgggaggccgcgcaggcgcagtgagtcagtgccggtcggtcttgtgggctgaggggcagcggcttaggctccggcgtctgcaggggtcgccgagctaacccgtggctaggcgagtggggcggggcggccggcaccatgtcgaggcaggcgaaccgtggcaccgagagcaagaaaatgagctctgagctcttcaccctgacctatggtgccctggtcacccagctatgtaaggactatgaaaatgatgaagatgtgaataaacagctggacaaaattctcttctctaacttccttcccaggggctttaacattggagtccggctgattgaagatttcttggctcggtcaaatgttgggaggtgccatgactttcgggaaactgcggatgtcattgccaaggtggcgttcaagatgtacttgggcatcactccaagcattactaattggagcccagctggtgatgaattctccctcattttggaaaataaccccttggtggactttgtggaacttcctgataaccactcatcccttatttattccaatctcttgtgtggggtgttgcggggagctttggagatggtccagatggctgtggaggccaagtttgtccaggacaccctgaaaggagacggtgtgacagaaatccggatgagattcatcaggcggattgaggacaatcttccagctggagaggaataaccatccctacaactcgaggatagccatcaggagcactgttggaatcagcaggcctctgtgctccctctgccctccagaactcagtgactcttgaacatggatgttatatattcttataacctgtttccattctccattcaaataaagagcagactgcgatatagtccatttaccccatgtgtgcacattcaggagcgacagtctctgcccccattcccttgagaggggctggatgtaatcacctttggttggactagaaagagctcaaaccattttacattcctgtttgaatttttccaaagcaaaactcactttgaccccattaagaggcaagcctggcacatctatccctgggcctttagaaagccatttgcctcaaatggctatagggttgtggggtggagggaggaagggctgggagggagtggggaggaattgctagctgtagtgtgacacattgtagtgtttgccaggaaaggagccagtcatgccggaaacactgacttctgggaagccacccaggtctcattcctccctgctgttggaggcaacatctcctctttttacagagggtacatccttttttcttacaaattcttcaataaagacacattcttgagtgaaatcccaatc

SEQ ID NO: 191909 - DNA, 1305 bp, Homo sapiens
  Payload ID: 17917
  Gene Name: trafficking protein particle complex 3
  Uniprot ID: O43617
  ENST ID: ENST00000617904
  CDS Start-End: 268-672
cgccgtccgcgccgttcgcgccgcccccgccccggagccccgcgcccgcagcctcccggcgcctctcccacggccacggccgagcgggctccacggctccaggagttcgccgcgctagctgcctccccctgcgtccgcgtcttggtacgcgccgcagcgcctgaggactaaagctctgagctcttcaccctgacctatggtgccctggtcacccagctatgtaaggactatgaaaatgatgaagatgtgaataaacagctggacaaaatgggctttaacattggagtccggctgattgaagatttcttggctcggtcaaatgttgggaggtgccatgactttcgggaaactgcggatgtcattgccaaggtggcgttcaagatgtacttgggcatcactccaagcattactaattggagcccagctggtgatgaattctccctcattttggaaaataaccccttggtggactttgtggaacttcctgataaccactcatcccttatttattccaatctcttgtgtggggtgttgcggggagctttggagatggtccagatggctgtggaggccaagtttgtccaggacaccctgaaaggagacggtgtgacagaaatccggatgagattcatcaggcggattgaggacaatcttccagctggagaggaataaccatccctacaactcgaggatagccatcaggagcactgttggaatcagcaggcctctgtgctccctctgccctccagaactcagtgactcttgaacatggatgttatatattcttataacctgtttccattctccattcaaataaagagcagactgcgatatagtccatttaccccatgtgtgcacattcaggagcgacagtctctgcccccattcccttgagaggggctggatgtaatcacctttggttggactagaaagagctcaaaccattttacattcctgtttgaatttttccaaagcaaaactcactttgaccccattaagaggcaagcctggcacatctatccctgggcctttagaaagccatttgcctcaaatggctatagggttgtggggtggagggaggaagggctgggagggagtggggaggaattgctagctgtagtgtgacacattgtagtgtttgccaggaaaggagccagtcatgccggaaacactgacttctgggaagccacccaggtctcattcctccctgctgttggaggcaacatctcctctttttacagagggtacatccttttttcttacaaattcttcaataaagacacattcttgagtgaaatcccaatc

SEQ ID NO: 191910 - DNA, 1114 bp, Homo sapiens
  Payload ID: 17917
  Gene Name: trafficking protein particle complex 3
  ENST ID: ENST00000616074
  CDS Start-End: 137-481
gcgggaggccgcgcaggcgcagtgagtcagtgccggtcggtcttgtgggctgaggggcagcggcttaggctccggcgtctgcaggggtcgccgagctaacccgtggctaggcgagtggggcggggcggccggcaccatgtcgaggcaggcgaaccgtggcaccgagagcaagaaaatggtggcgttcaagatgtacttgggcatcactccaagcattactaattggagcccagctggtgatgaattctccctcattttggaaaataaccccttggtggactttgtggaacttcctgataaccactcatcccttatttattccaatctcttgtgtggggtgttgcggggagctttggagatggtccagatggctgtggaggccaagtttgtccaggacaccctgaaaggagacggtgtgacagaaatccggatgagattcatcaggcggattgaggacaatcttccagctggagaggaataaccatccctacaactcgaggatagccatcaggagcactgttggaatcagcaggcctctgtgctccctctgccctccagaactcagtgactcttgaacatggatgttatatattcttataacctgtttccattctccattcaaataaagagcagactgcgatatagtccatttaccccatgtgtgcacattcaggagcgacagtctctgcccccattcccttgagaggggctggatgtaatcacctttggttggactagaaagagctcaaaccattttacattcctgtttgaatttttccaaagcaaaactcactttgaccccattaagaggcaagcctggcacatctatccctgggcctttagaaagccatttgcctcaaatggctatagggttgtggggtggagggaggaagggctgggagggagtggggaggaattgctagctgtagtgtgacacattgtagtgtttgccaggaaaggagccagtcatgccggaaacactgacttctgggaagccacccaggtctcattcctccctgctgttggaggcaacatctcctctttttacagagggtacatccttttttcttacaaattcttcaataaagacacattcttgagtgaaatcccaatc

SEQ ID NO: 191911 - DNA, 2421 bp, Homo sapiens
  Payload ID: 17918
  Gene Name: trafficking protein particle complex 3-like
  Uniprot ID: Q5T215
  ENST ID: ENST00000356128
  CDS Start-End: 163-456
agtttcaaaatattctgacaggacacagacagccctggctgaaaggagcacagagagaatacttcgagctcatgctgagagaaaaaggcgagtttgtcttttcttacctgagactgggcctgaagggagagtttcagttcttcattgacggttgctttcaagatgtacctgggaattacaccaagtgtgacctgtaacaattcaagcaaaaatgaattttccctgattctagagaagaatcccctggtggagtttgtggaagagctccctgctgggcgatcttctctgtgctactgcaacttgctctgtgggattatcagaggtgccttggaaatggttcatttggcggctgatgttacattcttgcaagacagactaaaaggtgacagtgtgacagaaataggaataacatttctaaaaaagcgagacgagaaaaaatatagagggaaaaaatgaagactagcacggaaaatgccacggggcggctagctgagttaatgttagctaaacatgtatagacatagaaattttgaattgcttcatagcatgagctttgaaaggtttataaatcagccagaaatttgaaatgcagggcatgaaggcttaaaggtttttttttccttttgcttataaatcacgcattttcaatctcatgtccacaaaatttcatatgcaaatagctccttacaagatagcaggcaggaattccacatcttacactatccatcctcagagaagctgttcattccattcacgtatggtaatgggaaaaaaaagcagcacaaatacaaacagttgtgtatttgtctctttgctgaaaaaaaaagaatgaaatgatatagcatagagtttcctatatatagacagtagtttctagatactgtatattgcattccttaaataaataattccatatttctaaaaaaatatgatttgatttttctcatgtattagcttggcttatagctttagccttctgacgctacccttgatttgtaatcaccaagtcaagctatttattcaatgataattttgaaacatttataaataacatttaattttaatttatttagttttaatatagctggcatcaaccaaattccttccttttctcatgaaatattgcttgatggtcaggccaggaaacttctaaaataaaggataaataatattctttgaaattactttcttaccccaaagcttattaattcagaatttctactatcattttcatcctctaaaaaatcttccaaaggatgttttctttgtgaccagaacacatttaaaattcaagtgtaccgaattaaatacacagtaatcttcaccagaccactggcacacaagggcggcctacaaggcagcccagaatctactgggctctgcagagagcccaaattgcaagtacaagttataattagtgtgataccaccctacggaattggagaaaatatttgtaaactatgtatctgacacccttgtgctattaataaccagaatatataaggagttcaaccaactccataggaaaaaattaaaattaataatccaattaaagatgggcaaaagatctgaatagacatttctcaaaagaagacatacacatacaaatggcaaacaggtatatgaaaaggtgctcaacatcattggtcatcagagaaatgcaaatcaaaactataatgagatattatctcaccctagttaaaaatggcttttatccaaaacaggcaatagtgaatgcttgcaaagatgtggagaagagggaactctggtacactgttggtgggaatgtaaattagtataaccactatggagaacggtttggaggttcctcaaaaaacaaaaaatagaatgatcatatgatccagcaatcccactgctggatatatacccaaaataaaggaaatcagtatatcaaagagatatctgcactcccatgtttactgcagaactactgacgatagctaagatttggaagaaatctaagtgtccttcaatagattaatgaaataaagaaaatatggtacatatacacaatggagtactattcagccataaagaagaatgagatcctgtcatttgcaaaacatggatggaactagaggtcattatgttcaatgaaatatgtcaggacagaaagacagactttgcatgttctcatttatttgtaggagctaaaaattaaaacagtggactcatggagatatggagtaaaatgatggatatcagaggctgggaagggtagtttcaagaggagtggagatggttaatgggtacaaaaatatagttagatagaatgaataagatctgggtcgggcatggtggcacaagcctgtaatctctgcactttgggatgccaaagtgggaggattgcttgagctcaggagtttgagaccagcttgggtaacatagacccctgtctct

SEQ ID NO: 191912 - DNA, 1113 bp, Homo sapiens
  Payload ID: 17918
  Gene Name: trafficking protein particle complex 3-like
  Uniprot ID: Q5T215
  ENST ID: ENST00000368602
  CDS Start-End: 97-642
tacaaaaacaaaacaaaaagacatggactgatacacctctaagaaacaggcaaaagaagagaaattgaagatcatattcttcatctatcaagcactatgtctcgccctgcacaccgaagaccagaataccataaaataaataaagatctctttgtccttacctatggagctctggttgcccagctgtgtaaggattatgagaaggatgaagatgtgaaccaatatttagataaaatgggttacggcattggaacgcggcttgtggaagactttttggctcgatcctgcgtgggaagatgccatagttattcagaaattatagacataattgcccaggttgctttcaagatgtacctgggaattacaccaagtgtgacctgtaacaattcaagcaaaaatgaattttccctgattctagagaagaatcccctggtggagtttgtggaagagctccctgctgggcgatcttctctgtgctactgcaacttgctctgtgggattatcagaggtgccttggaaatggttcatttggcggctgatgttacattcttgcaagacagactaaaaggtgacagtgtgacagaaataggaataacatttctaaaaaagcgagacgagaaaaaatatagagggaaaaaatgaagactagcacggaaaatgccacggggcggctagctgagttaatgttagctaaacatgtatagacatagaaattttgaattgcttcatagcatgagctttgaaaggtttataaatcagccagaaatttgaaatgcagggcatgaaggcttaaaggtttttttttccttttgcttataaatcacgcattttcaatctcatgtccacaaaatttcatatgcaaatagctccttacaagatagcaggcaggaattccacatcttacactatccatcctcagagaagctgttcattccattcacgtatggtaatgggaaaaaaaagcagcacaaatacaaacagttgtgtatttgtctctttgctgaaaaaaaaagaatgaaatgatatagcatagagtttcctatatatagacagtagtttctagatactgtatattgcattccttaaataaataattccatatttctaaaaaaa

SEQ ID NO: 191913 - DNA, 975 bp, Homo sapiens
  Payload ID: 17918
  Gene Name: trafficking protein particle complex 3-like
  ENST ID: ENST00000437098
  CDS Start-End: 1-504
aataaagatctctttgtccttacctatggagctctggttgcccagctgtgtaaggattatgagaaggatgaagatgtgaaccaatatttagataaaatgggttacggcattggaacgcggcttgtggaagactttttggctcgatcctgcgtgggaagatgccatagttattcagaaattatagacataattgcccaggttgctttcaagatgtacctgggaattacaccaagtgtgacctgtaacaattcaagcaaaaatgaattttccctgattctagagaagaatcccctggtggagtttgtggaagagctccctgctgggcgatcttctctgtgctactgcaacttgctctgtgggattatcagaggtgccttggaaatggttcatttggcggctgatgttacattcttgcaagacagactaaaaggtgacagtgtgacagaaataggaataacatttctaaaaaagcgagacgagaaaaaatatagagggaaaaaatgaagactagcacggaaaatgccacggggcggctagctgagttaatgttagctaaacatgtatagacatagaaattttgaattgcttcatagcatgagctttgaaaggtttataaatcagccagaaatttgaaatgcagggcatgaaggcttaaaggtttttttttccttttgcttataaatcacgcattttcaatctcatgtccacaaaatttcatatgcaaatagctccttacaagatagcaggcaggaattccacatcttacactatccatcctcagagaagctgttcattccattcacgtatggtaatgggaaaaaaaagcagcacaaatacaaacagttgtgtatttgtctctttgctgaaaaaaaaagaatgaaatgatatagcatagagtttcctatatatagacagtagtttctagatactgtatattgcattccttaaataaataattccatatttctaaaaaaa

SEQ ID NO: 191914 - DNA, 849 bp, Homo sapiens
  Payload ID: 17919
  Gene Name: trafficking protein particle complex 4
  ENST ID: ENST00000359005
  CDS Start-End: 31-576
gaataccagtttccgagcggcaaggcagcgatggcgatttttagtgtgtatgtggtgaacaaagctggcggcttgatttaccagttggacagctacgcgccacgggctgaggctgagaaaactttcagttatccgctggatctgctgctcaagctacacgatgagcgtgtgttggttgctttcggccagcgggacggcatccgagtgggtcatgcagtgctggccatcaatggcatggacgtgaatggcaggtacacggccgacgggaaagaggtgctggagtatctgggtaaccctgctaattacccggtgtccattcgatttggccggccccgcctcacttctaatgagaagcttatgctggcctccatgttccactcgctctttgccatcggctcccagctgtctcctgaacagggaagctcaggcattgagatgctggagacagacacattcaaattgcactgctaccagacactgacagaaatgcctatcaggtgtgagctctttgaccagaacctgaagctagctctggaggtggcagagaaggctggaacttttggacctgggtcataggctgaacctgttatggacccccaaattctgagagttcctgcaacaagaatactgctgttgacactccagtggaaatcccagcagccttgttagtgcacttgaaagtgggagaatgctgaccctgatgacttgtactgattcctgagccttaacactgtgctctttccttctgtatataccatggtcttactttccaactctgtacagatttatttatggaggagctaggtccataaatgttgtaataaatattcctttgatcttggtgtttgc

SEQ ID NO: 191915 - DNA, 794 bp, Homo sapiens
  Payload ID: 17919
  Gene Name: trafficking protein particle complex 4
  Uniprot ID: Q9Y296
  ENST ID: ENST00000434101
  CDS Start-End: 31-528
gaataccagtttccgagcggcaaggcagcgatggcgatttttagtgtgtatgtggtgaacaaagctggcggcttgatttaccagttggacagctacgcgccacgggctgaggctgagaaaactttcagttatccgctggatctgctgctcaagctacacgatgagcgtgtgttggttgctttcggccagcgggacggcatccgagtgggtcatgcagtgctggccatcaatggcatggacgtgaatggcaggtacacggccgacgggaaagagatgctggagacagacacattcaaattgcactgctaccagacactgacagggatcaagtttgtggttctagcagatcctaggcaagctggaatagattctcttctccgaaagatttatgagatttactcagactttgccctcaagaatccattctattccttagaaatgcctatcaggtgtgagctctttgaccagaacctgaagctagctctggaggtggcagagaaggctggaacttttggacctgggtcataggctgaacctgttatggacccccaaattctgagagttcctgcaacaagaatactgctgttgacactccagtggaaatcccagcagccttgttagtgcacttgaaagtgggagaatgctgaccctgatgacttgtactgattcctgagccttaacactgtgctctttccttctgtatataccatggtcttactttccaactctgtacagatttatttatggaggagctaggtccataaatgttgtaataaatattcctttgatcttgg

SEQ ID NO: 191916 - DNA, 1209 bp, Homo sapiens
  Payload ID: 17919
  Gene Name: trafficking protein particle complex 4
  ENST ID: ENST00000533058
  CDS Start-End: 31-804
gaataccagtttccgagcggcaaggcagcgatggcgatttttagtgtgtatgtggtgaacaaagctggcggcttgatttaccagttggacagctacgcgccacgggctgaggctgagaaaactttcagttatccgctggatctgctgctcaagctacacgatgagcgtgtgttggttgctttcggccagcgggacggcatccgagtgggtcatgcagtgctggccatcaatggcatggacgtgaatggcaggtacacggccgacgggaaagaggtgctggagtatctgggtaaccctgctaattacccggtgtccattcgatttggccggccccgcctcacttctaatgagaagcttatgctggcctccatgttccactcgctctttgccatcggctcccagctgtctcctgaacagggaagctcaggcattgagatgctggagacagacacattcaaattgcactgctaccagacactgacagggatcaagtttgtggttctagcagatcctaggcaagctggaatagattctcttctccgaaagatttatgagatttactcagactttgccctcaagaatccattctattccttagaaatgcctatcagagcgtgcagggggaaggccaccgtgggatggtgctccggaacctggactctcttcactcagccttcttggacactcggcccatcttggtgcggatgtttcgtaggaggaagaaggcagccgtgctggccgcacaaatcacttcagccacccagaaggctgtgctccaactgtagtgcttggcaatggtgctgaagggcagcccagccagaaagccgcccactgtcagggggaaagggaagaacctaagccagtggtgctagctccagcttctcactggtctatatgcaaagcacaggtgggggtgagggagagactctagaagttaacacttaccattggccatgagtcccacaatggcgtgggaggtgccacacaagttgggaggggcactctcgttggctatgactccaaacagggcaatggggccatacgaggagaaaccaaatacagctcccaataccaggatccagagctgccaagggcagagtggagtggcattcagagtcggaaagccgacctgcctacccacccctgccaaagcaagaagaaggcttggtccccagaaacaaacagtagtcataaaaggacagtaagtaa

SEQ ID NO: 191917 - DNA, 768 bp, Homo sapiens
  Payload ID: 17919
  Gene Name: trafficking protein particle complex 4
  ENST ID: ENST00000525079
  CDS Start-End: 7-360
gcagcgatggcgatttttagtgtgtatgtggtgaacaaagctggcggcttgatttaccagttggacagctacgcgccacgggctgaggctgagaaaactttcagttatccgctggatctgctgctcaagctacacgatgagcgtgtgttggttgctttcggccagcgggacggcatccgagtgggtcatgcagtgctggccatcaatggcatggacgtgaatggcaggtacacggccgacgggaaagaggtgctggagtatctgggtaaccctgctaattacccggtgtccattcgatttggccggccccgcctcacttctaatgagaagcttatgctggcctccatgttccactcgtaagtcccccgtctcctgaacggcagcgcttgtaatttgtctaccttttcttaaatcgtcgttctggtgttatgaaaaacgcaaccgatccagatctagattttaggctctttgccatcggctcccagctgtctcctgaacagggaagctcaggcattgagatgctggagacagacacattcaaattgcactgctaccagacactgacagggatcaagtttgtggttctagcagatcctaggcaagctggaatagattctcttctccgaaagatttatgagatttactcagactttgccctcaagaatccattctattccttagaaatgcctatcaggtgtgagctctttgaccagaacctgaagctagctctggaggtggcagagaaggctggaacttttggacctgggt

SEQ ID NO: 191918 - DNA, 654 bp, Homo sapiens
  Payload ID: 17919
  Gene Name: trafficking protein particle complex 4
  ENST ID: ENST00000525303
  CDS Start-End: 31-411
gaataccagtttccgagcggcaaggcagcgatggcgatttttagtgtgtatgtggtgaacaaagctggcggcttgatttaccagttggacagctacgcgccacgggctgaggctgagaaaactttcagttatccgctggatctgctgctcaagctacacgatgagcgtgtgttggttgctttcggccagcgggacggcatccgagggatcaagtttgtggttctagcagatcctaggcaagctggaatagattctcttctccgaaagatttatgagatttactcagactttgccctcaagaatccattctattccttagaaatgcctatcaggtgtgagctctttgaccagaacctgaagctagctctggaggtggcagagaaggctggaacttttggacctgggtcataggctgaacctgttatggacccccaaattctgagagttcctgcaacaagaatactgctgttgacactccagtggaaatcccagcagccttgttagtgcacttgaaagtgggagaatgctgaccctgatgacttgtactgattcctgagccttaacactgtgctctttccttctgtatataccatggtcttactttccaactctgtacagatttatttatggaggagctaggtccataaatgttgt

SEQ ID NO: 191919 - DNA, 1759 bp, Homo sapiens
  Payload ID: 17919
  Gene Name: trafficking protein particle complex 4
  Uniprot ID: Q9Y296
  ENST ID: ENST00000533632
  CDS Start-End: 365-1024
cggcgaagcgctcgccctctagcctgaggcggaagacaggaagtggattctagttcccaagccgcaccgcctaaatactgccggagtctgcgctagttgtgacgcatactatagcgctgttttcctgcactgataaacgaaaagcaatccaccaggtctcggcagctaactttccggcactacttatgcccgagcgtgtcgctcccagtgcgcaagtgcagcaggtggctgcacggggggcgcgggaggaggaggaggaggaggaggaggctggggtggggccggcggcaagtgctgtgatgcggttccggggaggggccgtcgggtagaggctgaataccagtttccgagcggcaaggcagcgatggcgatttttagtgtgtatgtggtgaacaaagctggcggcttgatttaccagttggacagctacgcgccacgggctgaggctgagaaaactttcagttatccgctggatctgctgctcaagctacacgatgagcgtgtgttggttgctttcggccagcgggacggcatccgagtgggtcatgcagtgctggccatcaatggcatggacgtgaatggcaggtacacggccgacgggaaagaggtgctggagtatctgggtaaccctgctaattacccggtgtccattcgatttggccggccccgcctcacttctaatgagaagcttatgctggcctccatgttccactcgctctttgccatcggctcccagctgtctcctgaacagggaagctcaggcattgagatgctggagacagacacattcaaattgcactgctaccagacactgacagggatcaagtttgtggttctagcagatcctaggcaagctggaatagattctcttctccgaaagatttatgagatttactcagactttgccctcaagaatccattctattccttagaaatgcctatcaggtgtgagctctttgaccagaacctgaagctagctctggaggtggcagagaaggctggaacttttggacctgggtcataggctgaacctgttatggacccccaaattctgagagttcctgcaacaagaatactgctgttgacactccagtggaaatcccagcagccttgttagtgcacttgaaagtgggagaatgctgaccctgatgacttgtactgattcctgagccttaacactgtgctctttccttctgtatataccatggtcttactttccaactctgtacagatttatttatggaggagctaggtccataaatgttgtaataaatattcctttgatcttggtgtttgcaatctgtcttaatcgatggttttgggggaaagatacaggaagtgagtcaaaaatggttagggaattctgggaagatgattatgtgctagtaaaaaacataacaaatatgtgttcattaaataaatgaacataagattttgaagcatgagcattggatctagtcccagaattgctgctgatttcctggggtcctggggtggtggcagcagtggtggtggctgttatgatgatgatgatgatggaacatatttcaagcacttacagccaggcattcctgctttatctcacttgatcttcaccctaactccagggggtacattctgttacagataagagatttagcagactttctgcctcaaagtttccaagctagttactgacagtctgggtttgaaccaggctttctggctacacactcagtaaaccactgttacacttcttccctccatcaagttatttaat

SEQ ID NO: 191920 - DNA, 817 bp, Homo sapiens
  Payload ID: 17919
  Gene Name: trafficking protein particle complex 4
  ENST ID: ENST00000533012
  CDS Start-End: 2-382
gatggcgatttttagtgtgtatgtggtgaacaaagctggcggcttgatttaccagttggacagctacgcgccacgggctgaggctgagaaaactttcagttatccgctggatctgctgctcaagctacacgatgagcgtgtgttggttgctttcggccagcgggacggcatccgagtgggtcatgcagtgctggccatcaatggcatggacgtgaatggcaggtacacggccgacgggaaagaggtgctggagtatctgggtaaccctgctaattacccggtgtccattcgatttggccggccccgcctcacttctaatgagaagcttatgctggcctccatgttccactcggatcaagtttgtggttctagcagatcctaggcaagctggaatagattctcttctccgaaagatttatgagatttactcagactttgccctcaagaatccattctattccttagaaatgcctatcaggtgtgagctctttgaccagaacctgaagctagctctggaggtggcagagaaggctggaacttttggacctgggtcataggctgaacctgttatggacccccaaattctgagagttcctgcaacaagaatactgctgttgacactccagtggaaatcccagcagccttgttagtgcacttgaaagtgggagaatgctgaccctgatgacttgtactgattcctgagccttaacactgtgctctttccttctgtatataccatggtcttactttccaactctgtacagatttatttatggaggagctaggtccataaatgttgtaataaatattcctttga

SEQ ID NO: 191921 - DNA, 583 bp, Homo sapiens
  Payload ID: 17919
  Gene Name: trafficking protein particle complex 4
  ENST ID: ENST00000528230
  CDS Start-End: 31-561
gaataccagtttccgagcggcaaggcagcgatggcgatttttagtgtgtatgtggtgaacaaagctggcggcttgatttaccagttggacagctacgcgccacgggctgaggctgagaaaactttcagttatccgctggatctgctgctcaagctacacgatgagcgtgtgttggttgctttcggccagcgggacggcatccgagtgggtcatgcagtgctggccatcaatggcatggacgtgaatggcaggctctttgccatcggctcccagctgtctcctgaacagggaagctcaggcattgagatgctggagacagacacattcaaattgcactgctaccagacactgacagggatcaagtttgtggttctagcagatcctaggcaagctggaatagattctcttctccgaaagatttatgagatttactcagactttgccctcaagaatccattctattccttagaaatgcctatcaggtgtgagctctttgaccagaacctgaagctagctctggaggtggcagagaaggctggaacttttggacctgggtcataggctgaacctgttatggaccccc

SEQ ID NO: 191922 - DNA, 849 bp, Homo sapiens; identical to SEQ ID NO: 191914
  Payload ID: 17919
  Gene Name: trafficking protein particle complex 4
  ENST ID: ENST00000625526
  CDS Start-End: 31-576

SEQ ID NO: 191923 - DNA, 1209 bp, Homo sapiens; identical to SEQ ID NO: 191916
  Payload ID: 17919
  Gene Name: trafficking protein particle complex 4
  ENST ID: ENST00000625680
  CDS Start-End: 31-804

SEQ ID NO: 191924 - DNA, 654 bp, Homo sapiens; identical to SEQ ID NO: 191918
  Payload ID: 17919
  Gene Name: trafficking protein particle complex 4
  ENST ID: ENST00000630169
  CDS Start-End: 31-411

SEQ ID NO: 191925 - DNA, 768 bp, Homo sapiens; identical to SEQ ID NO: 191917
  Payload ID: 17919
  Gene Name: trafficking protein particle complex 4
  ENST ID: ENST00000626820
  CDS Start-End: 7-360

SEQ ID NO: 191926 - DNA, 794 bp, Homo sapiens; identical to SEQ ID NO: 191915
  Payload ID: 17919
  Gene Name: trafficking protein particle complex 4
  Uniprot ID: Q9Y296
  ENST ID: ENST00000629713
  CDS Start-End: 31-528

SEQ ID NO: 191927 - DNA, 583 bp, Homo sapiens; identical to SEQ ID NO: 191921
  Payload ID: 17919
  Gene Name: trafficking protein particle complex 4
  ENST ID: ENST00000627703
  CDS Start-End: 31-561

SEQ ID NO: 191928 - DNA, 1759 bp, Homo sapiens; identical to SEQ ID NO: 191919
  Payload ID: 17919
  Gene Name: trafficking protein particle complex 4
  Uniprot ID: Q9Y296
  ENST ID: ENST00000629243
  CDS Start-End: 365-1024

SEQ ID NO: 191929 - DNA, 817 bp, Homo sapiens; identical to SEQ ID NO: 191920
  Payload ID: 17919
  Gene Name: trafficking protein particle complex 4
  ENST ID: ENST00000630040
  CDS Start-End: 2-382

SEQ ID NO: 191930 - DNA, 790 bp, Homo sapiens
  Payload ID: 17920
  Gene Name: trafficking protein particle complex 5
  Uniprot ID: Q8IUR0
  ENST ID: ENST00000317378
  CDS Start-End: 188-754
cctggtgagaccctacccacccccctgcccgcgccgggcctcgtccgctccccggccccttccccgcgggcgtgtgggtcccgggctggggtctcggcgtccgcgatcccgagcccgctcgcttcggcccccctcaggaggctgcgaggagggtgggtttctccccagtgtagagggtggcggcggcatggaggcgcgcttcacgcgcgggaagtcggcgctgctggagcgcgcgctggcgcggccgcgcaccgaggtgagcctgagcgccttcgcactgctgttctccgagctggtacagcactgccagagccgcgtcttctccgtggccgagctgcagtcgcgcctggccgcgctgggccgccaggtgggcgcgcgcgtgctggatgcgctggtggcgcgcgaaaagggtgcccggcgtgagaccaaggtgctaggcgcgttgctcttcgtcaagggcgccgtgtggaaggcgctcttcggcaaggaggcggacaagctggagcaggccaacgatgacgcgcgcaccttctacatcatcgagcgcgagccgctcatcaacacctacatctccgtgcccaaggagaacagcacgctcaactgcgccagcttcacggcgggcatcgtggaggcggtgctcacacacagcggcttccctgccaaggtcacggcgcactggcacaagggcaccacgctcatgatcaagttcgaggaggcagtcatcgctcgagaccgggccctggagggccgctgaccctgccggagataaaggatacagagagcccctccc

SEQ ID NO: 191931 - DNA, 765 bp, Homo sapiens
  Payload ID: 17920
  Gene Name: trafficking protein particle complex 5
  Uniprot ID: Q8IUR0
  ENST ID: ENST00000426877
  CDS Start-End: 161-727
gtgagaccctacccacccccctgcccgcgccgggcctcgtccgctccccggccccttccccgcgggcgtgtgggtcccgggctggggtctcggcgtccgcgatcccgagcccgctcgcttcggcccccctcaggaggctgcgaggaggggtggcggcggcatggaggcgcgcttcacgcgcgggaagtcggcgctgctggagcgcgcgctggcgcggccgcgcaccgaggtgagcctgagcgccttcgcactgctgttctccgagctggtacagcactgccagagccgcgtcttctccgtggccgagctgcagtcgcgcctggccgcgctgggccgccaggtgggcgcgcgcgtgctggatgcgctggtggcgcgcgaaaagggtgcccggcgtgagaccaaggtgctaggcgcgttgctcttcgtcaagggcgccgtgtggaaggcgctcttcggcaaggaggcggacaagctggagcaggccaacgatgacgcgcgcaccttctacatcatcgagcgcgagccgctcatcaacacctacatctccgtgcccaaggagaacagcacgctcaactgcgccagcttcacggcgggcatcgtggaggcggtgctcacacacagcggcttccctgccaaggtcacggcgcactggcacaagggcaccacgctcatgatcaagttcgaggaggcagtcatcgctcgagaccgggccctggagggccgctgaccctgccggagataaaggatacagagagcccctcccca

SEQ ID NO: 191932 - DNA, 5498 bp, Homo sapiens
  Payload ID: 17920
  Gene Name: trafficking protein particle complex 5
  Uniprot ID: Q8IUR0
  ENST ID: ENST00000596148
  CDS Start-End: 49-615
aaagcagctcggccgagcagactgctgcggttcctgggtggcggcggcatggaggcgcgcttcacgcgcgggaagtcggcgctgctggagcgcgcgctggcgcggccgcgcaccgaggtgagcctgagcgccttcgcactgctgttctccgagctggtacagcactgccagagccgcgtcttctccgtggccgagctgcagtcgcgcctggccgcgctgggccgccaggtgggcgcgcgcgtgctggatgcgctggtggcgcgcgaaaagggtgcccggcgtgagaccaaggtgctaggcgcgttgctcttcgtcaagggcgccgtgtggaaggcgctcttcggcaaggaggcggacaagctggagcaggccaacgatgacgcgcgcaccttctacatcatcgagcgcgagccgctcatcaacacctacatctccgtgcccaaggagaacagcacgctcaactgcgccagcttcacggcgggcatcgtggaggcggtgctcacacacagcggcttccctgccaaggtcacggcgcactggcacaagggcaccacgctcatgatcaagttcgaggaggcagtcatcgctcgagaccgggccctggagggccgctgaccctgccggagataaaggatacagagagcccctccccacgtgtgtcttgtgtcttgtgtggcggccttagatccactcagtaccttgagccacagccctgccccaggctggggagggaggccaggtccgaatgtgtttacagtagagtgggggcgggtctggccatagggttggggggttgagtgagaccaggagtggtggggagaaataaacccggcaaaaggagttggtgggaaatgctggcaggttctggaatcacggttggaggctgtctgcaggctggagggggcatggggtcctgggagacgcatcaggctgagacagacgcctttagactgggggtgggcaaactgcgcaaagtgccagatgggcaatattttatgccatgtggtctttattattattttttttatttgttgagatagagtcttgctctgtcgcccaggctggagtgcagtggcaccatctcacctcactgcaaacctccaccttgggttcacgtgattctcctgcctcagcttcccaagtagctgggattacaggtgcctcccaccacacccggctaatttttgtatttttagtagagatggggtttcaccatgttggtcaggctggtctcgaactcctcatctcaggtgatccgcccacttcagcctcccaaagtgctgggattacaggcgtgagccactgctgtgccgccatgtgctcttgccccattactccgctgatgtactgaatgcaaccacagacaacatgtaaaggagtgggtgtcaccgtgtgcctagaaaacaggcagagggagattgtttgccttcttccctcatttattatatttttcagagacagggttttgttctgtcgcccaggctggagtgcagtggcagcatctcggcttcggctcactgcaagctccgcctcccgggttcatgtcattctcctgccccagcctcccgagtagctggaactacaggtgcccaccaccacacctggctaatttttcgtatttttagtagagacggggtttcaccatgttagccaggatggtctcgatctcctcacctcgtgatctgcccacctcggcttcccaaagtgctgggattacaggcgtgagccatggcgcccagccatgcccagctaatttttaaaaaatttttgtagagatgggggctcttattaggttgcccaggctggtctcaaactcttggcctcaagcaatccttccaccttggcctccgtaagtgctggggttacaggcgtgagccaaatcaaagtgtgttctgtagatcagcagtagcagcatcaactgggagttggtccataatgcagtctcaggcccaccccagagctgctgaatctgagggtgcattttagcgaggcccccaggggattcctggggaccttagattgagatgcaggctttagggtatcagaatcaccaggaggggccacgtgcggtggctcacgcctgtaatcccagcactttgggaggctgaggcaggtggatcacctgaagtcaggagttcgagaccagcctggctaacatggcaaaaccccgtctctactaaaaatagaaaacattagccgggtgtggtggcacatgcctgtaatcccagctacttgggaggctgaggcaggagaatcgctccaacccgggaggtggaggttgcagtgagccgagattgcaccattgcactccagcctgggcaacaagagcgaaactccatctaaaaaacaaaaaggtcaggcgcggtggctcacgcctataatcccagcactttgggaggccgaggcaggcggatcacgaggtcaggagttcgagccagcctggccaatatggtgaaaccctgtctctactaaaaatacaaaaattagctgggcatggaggtgcattcctgtagtcccagctacctaattttttgtatttttagtagagatgaggtttcactgtgttggccagtctggtcaatactttaaagttaattttaaagtccaggatgatacaaacacatttcccttgttaaaaaaattttaaaataagtggggtgcagtggtgcacacctggagtcccagctattcaggaggccgaggcagaaggatcgcttgaggccaggggttggtgtccagcctgggcaacatagtgagaccttgtctaaaagaatttgaaataaggccaggcgtggcgacttatgtctgtaatcccagcactttgagaggccgaggtgggcagatcacttgaggccggaagtttgagaccaacctggtcaacatggcaaaacccatctttactaaaaatacaaaaattagctgggcgtggtggcaggcacctgtaatcccagctacttgggaggctaaggcaggaggatcacttaaacctgggaggcggaggttgaagtgagccaagatcacaccactggcactccagcctgagcaacagagtgagaccctgtcttaaaaaagaaaaaaaaagtaatgtattacacctcaggcaattttcctttccctttttgttcaccacacttggttcctgataactcctcctctcccccaaggaaagttcttccagattttttgggggaaccatgatccaatcttccctgcttcctttccaccgccccccagaatgtgaacagacaggtctgttcagaaaaggaactgcagggactgtcagctgggctcccctcactggttatgagaagggccaaaggggtcggtgtcacctctagatttgtttaggatgctctgttggactgcctggtggaccagggctgagggcttggtcagggcagtctcagccatcctagcaagaggcattgagcagggtgggcttcagcacactggggagaaggtggcgtctctaggatgaatgaaaccattgagcaaccaccacacatagccccagggctgatcctggaatagctgttggctgttggaggtggagggaggcgccgggagagggcttgggcaggatgatagcctgaatctggaatgagggggaggcgtctagggggccagcagatgcacaggtcttggggtttggggtctggagttctggagggaggtctgggcgtctgcacagacacagaaaccacagtcctggatgggggacggagggaggggaacatggtgtctgagaagctggatttcagagcaaaatgcaggacgctttgggctaagcagccccaggcaggtcctctgagaccctggcgagaggggcttccagggccggccagggcaggggccattcttctgtccagaggcggggctgtgagggatgtcagagaaatcgggagggaggaagaggggctgcgggaatttgtaagctgggagtgcagggcccagggtctgttcccacgccccatccccaccggccaccgagggtgagttagggggcttgaggagaagggaaaacgtttgaacaagctgtagggttatgaggctgggcccggggttggggcaagggaggatgaagagaaagaagagcctgtggttcggcagcttctgatcacagcagctctaacttacggtgctctgggctgcaaggaaggtcttcccctggaccctccaggtgggtgggtgagaggaagaggaggaggaggagccaggcaccagcccttggtgagctgggcaagcagcatcagctcatttcacaggcaggttccaaaagaagtcatgtgcccatggtcacacagattaattattattattattattatttagagatggagtctcactctgtcgcccaggctggagtgcagtggtgcgatctcagatctcagcctcctgggttcaagcaattctcctgcttcagcctcctgaatagttgggactataggcatccgccaccacacccagctaatttttgtatttttagtggagacggggtttcaccatgttggccaggctggtctggaactcctgacctcaagtgatctgcccgccttggcctcccaaagtgctaggattacaggcgtgagccaccgcacctggctggctttttctcttttcttcttctttttttttgagacaggttctcactgtcgcccaggctgagagcaggggcacaatcctcccacctcggcctcccaagcagctgggaccaagttgcccatcactacacctctagtttttgtattttttgtagagatggggcctcactatgttgcccaggctggcctcaaactcctgaactcaagcagtcctcccacctcagcctcccaaagcgctgggatgacaggcatgagccactgtgcgcagctggctttggccttttatctgagctggaggaaacttctggaaagggggcagtgaagagagagccccgggcggaggtgactgctccagtcgaggcagtggcagaaggggtgagcagtgagtgattgtgagcgccgtttgacagcagagcccactggcatttcttatggtcttggacctggaggtgttgtcaggggaaagggaagaggtgcaatgaccccagtgttggcctgagccactggtagaggagtgtggagaggggaccctgtgctcctggcctccctcccgtggcctccggcatgggtcgaccttggccgagcgtgaggctggtgccacctcagcctcccagaccctgagtagggttaacacctccagacccgaaatggcctccggttgaccgggcccactccccatcagcctgtccagccagccagcacttactgagtgccttctgtgtactaagccctgctctgggtacttccatgagtcaactcacgccctcccggcctcagggtgatccaccgccttcccctacagtattccaaggggccattggacctcagaggcttcatgtcctgcacattctccgtgtcatagagcaggaaaaaataaaaacgggagatcgaattcta

SEQ ID NO: 191933 - DNA, 411 bp, Homo sapiens
  Payload ID: 17920
  Gene Name: trafficking protein particle complex 5
  ENST ID: ENST00000595985
  CDS Start-End: 12-377
gtggcggcggcatggaggcgcgcttcacgcgcgggaagtcggcgctgctggagcgcgcgctggcgcggccgcgcaccgagggcgccgtgtggaaggcgctcttcggcaaggaggcggacaagctggagcaggccaacgatgacgcgcgcaccttctacatcatcgagcgcgagccgctcatcaacacctacatctccgtgcccaaggagaacagcacgctcaactgcgccagcttcacggcgggcatcgtggaggcggtgctcacacacagcggcttccctgccaaggtcacggcgcactggcacaagggcaccacgctcatgatcaagttcgaggaggcagtcatcgctcgagaccgggccctggagggccgctgaccctgccggagataaaggatacagagagcccctc

SEQ ID NO: 191934 - DNA, 805 bp, Homo sapiens
  Payload ID: 17921
  Gene Name: trafficking protein particle complex 6A
  Uniprot ID: O75865
  ENST ID: ENST00000006275
  CDS Start-End: 20-541
aggcgtgcgaggagggggcatggcggatactgtgttgtttgagtttcttcacacggagatggtggctgagctgtgggctcacgaccccgaccccggcccgggggtgagcgccgggctccgtggggaggaagcgggggccaccaagggacagaagatgagcctgtcggtcctggagggtatggggttccgtgtgggccaggctctaggcgagaggctgccccgggagacgctggccttcagggaggagctggatgtcctcaagttcttgtgcaaagacctgtgggtggcggtgttccagaagcagatggacagcctgcgcaccaatcaccaggggacctacgtcctgcaagacaacagcttccccctcctcctcccgatggcctctggcctgcagtatctggaggaagcacccaagttcctggccttcacctgcggcctcctgcgcggcgccctctataccctgggcattgagagcgtggtcaccgcctccgtggcagccctgcccgtctgtaagttccaggtggtgattccgaaatcctaagcctgcctcgcacctgctgagccgcactgctgcccctggcctcaccggcctcaggagacggtggggccgctgcatttcggggtggtcttgggaatcccaggccctaggggtcacatttgctcaggaagtgggtatcaaattgaggtgggggtgtcagaggaggcaaaggggtcccagctgcggtcaggactgtggtgggattcccgcctcggcagcgtcactgcccagtagctgctcaataaaggctgtgtgtgtggaatctga

SEQ ID NO: 191935 - DNA, 514 bp, Homo sapiens
  Payload ID: 17921
  Gene Name: trafficking protein particle complex 6A
  Uniprot ID: O75865
  ENST ID: ENST00000592647
  CDS Start-End: 10-393
ggagggggcatggcggatactgtgttgtttgagtttcttcacacggagatggtggctgagctgtgggctcacgaccccgaccccggcccgggggtgagcgccgggctccgtggggaggaagcgggggccaccaaggctgccccgggagacgctggccttcagggaggagctggatgtcctcaagttcttgtgcaaagacctgtgggtggcggtgttccagaagcagatggacagcctgcgcaccaatcaccaggggacctacgtcctgcaagacaacagcttccccctcctcctcccgatggcctctggcctgcagtatctggaggaagcacccaagttcctggccttcacctgcggcctcctgcgcggcgccctctataccctgggcattgagagcgtggtcaccgcctccgtggcagccctgcccgtctgtaagttccaggtggtgattccgaaatcctaagcctgcctcgcacctgctgagccgcactgctgcccctggcctcaccggcct

SEQ ID NO: 191936 - DNA, 695 bp, Homo sapiens
  Payload ID: 17921
  Gene Name: trafficking protein particle complex 6A
  Uniprot ID: O75865
  ENST ID: ENST00000588062
  CDS Start-End: 20-361
aggcgtgcgaggagggggcatggcggatactgtgttgtttgagtttcttcacacggagatggtggctgagctgtgggctcacgaccccgaccccggcccgggggctgccccgggagacgctggccttcagggaggagctggatgtcctcaagttcttgtgcaaagacctgtgggtggcggtgttccagaagcagatggacagcctgcgcaccaatcaccaggggacctacgtcctgcaagacaacagcttccccctcctcctcccgatggcctctggcctgcagtatctggaggaagcacccaagttcctggccttcacctgcggcctcctgcgcggcgccctctataccctgggcattgagagcgtggtcaccgcctccgtggcagccctgcccgtctgtaagttccaggtggtgattccgaaatcctaagcctgcctcgcacctgctgagccgcactgctgcccctggcctcaccggcctcaggagacggtggggccgctgcatttcggggtggtcttgggaatcccaggccctaggggtcacatttgctcaggaagtgggtatcaaattgaggtgggggtgtcagaggaggcaaaggggtcccagctgcggtcaggactgtggtgggattcccgcctcggcagcgtcactgcccagtagctgctcaataaaggctgtgtgtgtggaatctga

SEQ ID NO: 191937 - DNA, 758 bp, Homo sapiens
  Payload ID: 17921
  Gene Name: trafficking protein particle complex 6A
  Uniprot ID: O75865
  ENST ID: ENST00000585934
  CDS Start-End: 20-499
aggcgtgcgaggagggggcatggcggatactgtgttgtttgagtttcttcacacggagatggtggctgagctgtgggctcacgaccccgaccccggcccggggggacagaagatgagcctgtcggtcctggagggtatggggttccgtgtgggccaggctctaggcgagaggctgccccgggagacgctggccttcagggaggagctggatgtcctcaagttcttgtgcaaagacctgtgggtggcggtgttccagaagcagatggacagcctgcgcaccaatcaccaggggacctacgtcctgcaagacaacagcttccccctcctcctcccgatggcctctggcctgcagtatctggaggaagcacccaagttcctggccttcacctgcggcctcctgcgcggcgccctctataccctgggcattgagagcgtggtcaccgcctccgtggcagccctgcccgtctgtaagttccaggtggtgattccgaaatcctaagcctgcctcgcacctgctgagccgcactgctgcccctggcctcaccggcctcaggagacggtggggccgctgcatttcggggtggtcttgggaatcccaggccctaggggtcacatttgctcaggaagtgggtatcaaattgaggtgggggtgtcagaggaggcaaaggggtcccagctgcggtcaggactgtggtgggattcccgcctcggcagcgtcactgcccagtagctgctcaataaaggctgtgtgtgtggaa

SEQ ID NO: 191938 - DNA, 3242 bp, Homo sapiens
  Payload ID: 17922
  Gene Name: trafficking protein particle complex 6B
  Uniprot ID: Q86SZ2
  ENST ID: ENST00000330149
  CDS Start-End: 228-704
cggccctaggatttggtagccccgaagtgtgggctctctccagtaccagactcatttcagtaccagcctttgggaagtcgtgtgaatacctcggtctcttagccacagggatagaatggcggcctgacggagccgcggcgccggcgaagtcgctgaggcgcgagctggaacccccagaccagctcaaacgggagccaaaactcgaagcttggaagaattagcaggaaatggcggatgaggcgttgtttttgcttctccataacgagatggtgtctggagtgtacaagtccgcggagcagggggaggtggaaaacggacgatgtattactaagctggaaaacatggggtttcgagtgggacaaggattgatagaaaggtttacaaaagatactgcaaggttcaaggatgagttagatatcatgaagttcatttgtaaagatttttggactacggtattcaagaaacaaatcgacaatctaaggacaaatcatcagggcatctatgtacttcaggacaacaaatttcgcctgcttactcagatgtctgcaggaaaacagtatttagaacatgcatctaagtatttagcatttacgtgtggcttaatcagaggtggcttatcaaacttgggaataaaaagtattgtaacagctgaagtgtcttcaatgcctgcttgcaaatttcaggtgatgatacagaagctgtagaacatactgaaatgcaaggcttcaacagtgtaaagagataaattattcatgtaaaagtatttcaagtagtgatgatttaattacattgttcgatgtttgtacaggagtaagcatgtatttttatcaatttaacacagatcaaaggagatgaagggacattctgccatgacatacacttaaccaaaactattcaaaatgaaaaccggatttcaaataaccagacaccaagatgcagggcccttattttaaacctttttatttggttagagtgatatgtatttagccatagatggagaaacaaagctcagggtttgttgaattagcatgagagaaaattatgtaccaacagaattatttgtgagaagaatgaacaaattttgataaagtatgaatttgttttattttaaaaagcaaacatactaaattttttttattttattgcttataatttattaagaatgtttacacctgtataaggatttcatatatacattgtatgtgtgtatatataaatacatatatgactgcctaaattgtttataaatttaatttttctttaataggtttcattccttcagagctccattaatgtaatcaaaatgaaatatagattagtttaaatgtgaattcagtgactctagggccaaagaatattaggtatgtttggaaagaatttttgtatttattcctgttacagttttgactttcaacttctctccccgtgcatggaagtcctggtaaaggatctaacatctttattcccttctttcctcttccagctgagcagagttggataattgaattagtcattctgacattctttggaccatatcatcttagtggtttggggtcagtgctcatctgatatatctttcttaccacctcttctacttactttctcttacttaaattatctggcataagcagttatctccagcttttgttagaatcttgcatgttgattactaaaactatactttgtttcccatttatttattacccttttgcatgtatttgtgtgacagggaactctgcagcagggggtgactgacacaccaaacaagatgtttcactgggtactctgccatagaaatggcagattaagaagattgactataccaaacattatattaaaaacacaaaataaaaactataaaaatgtactttaggacattaaagaaaactcaagttagaagcataccattttcctttcatggaagggtacagtattacaaagataatttgtttaacttgatttattaaattctagttatgtgccctataatgatgtttcagtcagtgacagacctcatatatggcagtggttccataagattacaatactgtatttttactgtaccttctttatgtttagatatgcaagtacttaccattgtgttacagtgtcctacagtattcactacaataatatgctgtacaggtttgtagcctaggagcaataggccatagcttaggtgtatagtagatcataccatctaggtttgtgtaagtacactctgtgattgtacaattttaaaatctcctaatgatgatgcatttctcagaatgtatcccctttgctaagcaatgcatgactgcaatcctaattctcacatgttttggggaaaaaattttaattttgaaaaaatttaggaaagttcctaccaaatatacatgtataaagtttattaaaagtcataatgacccaggaatagctaatgacacagaagtagatcaaaatagaacacaatagagaacttcaaaataaaacaggtgtgagaattgtgtgtgtgaaaaagctgggttcaaataagttggtttgttagacattcatatgcctacccatcagccatttcgttctcccttccttgctgacaaagccccattttttttttctttttttttggcctaaaactctgtatggctgccttgtgctatagaatagggtgcttccctagcctagagagggtgagtgttgattagattctgtgccaatcatggtaattggcttacttgatcatttgatggaatctaggctaacgagacaaaggaagtctgaaggctttgaataagaaattttctgttgctcttaacaattgatacaagttagggatttgccagcatccctcttctgcttctcagtgaagatatgtgatatggatgtttgaagctaatctgcaacagccttctgatggccatgaaaggacaagtatggagatgaaagctatcacactgagaatagtgggatgtagatagaaagcacctgaattgtgcttctgaattaaccaatccaggaactgctttacctttggactttttgttatgtgagatattctttatattgttccatttgctttgggtatatgtatattgttacttgtagccaaaaagaaacctctcttagtagaaacaaagggagagttaggttattcaaaaattagtatgggacaattgaatatgcctttttctgcgggagtaggtggggagaaacttaaaggttcacttgtaaaacaataaagtactaaagaaaatgtgata

SEQ ID NO: 191939 - DNA, 3229 bp, Homo sapiens
  Payload ID: 17922
  Gene Name: trafficking protein particle complex 6B
  Uniprot ID: Q86SZ2
  ENST ID: ENST00000347691
  CDS Start-End: 299-691
cgcccccgcccagcggccggatcgcatctcagctggttggctttggttagagctcccgtcagactttagttcggccctaggatttggtagccccgaagtgtgggctctctccagtaccagactcatttcagtaccagcctttgggaagtcgtgtgaatacctcggtctcttagccacagggatagaatggcggcctgacggagccgcggcgccggcgaagtcgctgaggcgcgagctggaacccccagaccagctcaaacgggagccaaaactcgaagcttggaagaattagcaggaaatggcggatgaggcgttgtttttgcttctccataacgagatggtgtctggagtgtacaagtccgcggagcagggggaggtggaaaacggacgatgtattactaagctggaaaacatggggtttcgagtgggacaaggattgatagaaaggtttacaaaagatactgcaaggttcaaggatgagttagatatcatgaagttcatttgtaaagatttttggactacggtattcaagaaacaaatcgacaatctaaggacaaatcatcagtatttagcatttacgtgtggcttaatcagaggtggcttatcaaacttgggaataaaaagtattgtaacagctgaagtgtcttcaatgcctgcttgcaaatttcaggtgatgatacagaagctgtagaacatactgaaatgcaaggcttcaacagtgtaaagagataaattattcatgtaaaagtatttcaagtagtgatgatttaattacattgttcgatgtttgtacaggagtaagcatgtatttttatcaatttaacacagatcaaaggagatgaagggacattctgccatgacatacacttaaccaaaactattcaaaatgaaaaccggatttcaaataaccagacaccaagatgcagggcccttattttaaacctttttatttggttagagtgatatgtatttagccatagatggagaaacaaagctcagggtttgttgaattagcatgagagaaaattatgtaccaacagaattatttgtgagaagaatgaacaaattttgataaagtatgaatttgttttattttaaaaagcaaacatactaaattttttttattttattgcttataatttattaagaatgtttacacctgtataaggatttcatatatacattgtatgtgtgtatatataaatacatatatgactgcctaaattgtttataaatttaatttttctttaataggtttcattccttcagagctccattaatgtaatcaaaatgaaatatagattagtttaaatgtgaattcagtgactctagggccaaagaatattaggtatgtttggaaagaatttttgtatttattcctgttacagttttgactttcaacttctctccccgtgcatggaagtcctggtaaaggatctaacatctttattcccttctttcctcttccagctgagcagagttggataattgaattagtcattctgacattctttggaccatatcatcttagtggtttggggtcagtgctcatctgatatatctttcttaccacctcttctacttactttctcttacttaaattatctggcataagcagttatctccagcttttgttagaatcttgcatgttgattactaaaactatactttgtttcccatttatttattacccttttgcatgtatttgtgtgacagggaactctgcagcagggggtgactgacacaccaaacaagatgtttcactgggtactctgccatagaaatggcagattaagaagattgactataccaaacattatattaaaaacacaaaataaaaactataaaaatgtactttaggacattaaagaaaactcaagttagaagcataccattttcctttcatggaagggtacagtattacaaagataatttgtttaacttgatttattaaattctagttatgtgccctataatgatgtttcagtcagtgacagacctcatatatggcagtggttccataagattacaatactgtatttttactgtaccttctttatgtttagatatgcaagtacttaccattgtgttacagtgtcctacagtattcactacaataatatgctgtacaggtttgtagcctaggagcaataggccatagcttaggtgtatagtagatcataccatctaggtttgtgtaagtacactctgtgattgtacaattttaaaatctcctaatgatgatgcatttctcagaatgtatcccctttgctaagcaatgcatgactgcaatcctaattctcacatgttttggggaaaaaattttaattttgaaaaaatttaggaaagttcctaccaaatatacatgtataaagtttattaaaagtcataatgacccaggaatagctaatgacacagaagtagatcaaaatagaacacaatagagaacttcaaaataaaacaggtgtgagaattgtgtgtgtgaaaaagctgggttcaaataagttggtttgttagacattcatatgcctacccatcagccatttcgttctcccttccttgctgacaaagccccattttttttttctttttttttggcctaaaactctgtatggctgccttgtgctatagaatagggtgcttccctagcctagagagggtgagtgttgattagattctgtgccaatcatggtaattggcttacttgatcatttgatggaatctaggctaacgagacaaaggaagtctgaaggctttgaataagaaattttctgttgctcttaacaattgatacaagttagggatttgccagcatccctcttctgcttctcagtgaagatatgtgatatggatgtttgaagctaatctgcaacagccttctgatggccatgaaaggacaagtatggagatgaaagctatcacactgagaatagtgggatgtagatagaaagcacctgaattgtgcttctgaattaaccaatccaggaactgctttacctttggactttttgttatgtgagatattctttatattgttccatttgctttgggtatatgtatattgttacttgtagccaaaaagaaacctctcttagtagaaacaaagggagagttaggttattcaaaaattagtatgggacaattgaatatgcctttttctgcgggagtaggtggggagaaacttaaaggttcacttgtaaaacaataaagtactaaagaaaatgtgata

SEQ ID NO: 191940 - DNA, 541 bp, Homo sapiens
  Payload ID: 17922
  Gene Name: trafficking protein particle complex 6B
  ENST ID: ENST00000554018
  CDS Start-End: 235-541
tttagttcggccctaggatttggtagccccgaagtgtgggctctctccagtaccagactcatttcagtaccagcctttgggaagtcgtgtgaatacctcggtctcttagccacagggatagaatggcggcctgacggagccgcggcgccggcgaagtcgctgaggcgcgagctggaacccccagaccagctcaaacgggagccaaaactcgaagcttggaagaattagcaggaaatggcggatgaggcgttgtttttgcttctccataacgagatggtgtctggagtgtacaagtccgcggagcagggggaggaaaacggacgatgtattactaagctggaaaacatggggtttcgagtgggacaaggattgatagaaaggtttacaaaagatactgcaaggttcaaggatgagttagatatcatgaagttcatttgtaaagatttttggactacggtattcaagaaacaaatcgacaatctaaggacaaatcatcagtatttagcatttacgtgtggcttaatcagaggtggcttatcaa

SEQ ID NO: 191941 - DNA, 664 bp, Homo sapiens
  Payload ID: 17922
  Gene Name: trafficking protein particle complex 6B
  ENST ID: ENST00000556765
  CDS Start-End: 336-488
gaatgccggggtagaggggaccggaagttgtttttttcgcccccgcccagcggccggatcgcatctcagctggttggctttggttagagctcccgtcagactttagttcggccctaggatttggtagccccgaagtgtgggctctctccagtaccagactcatttcagtaccagcctttgggaagtcgtgtgaatacctcggtctcttagccacagggatagaatggcggcctgacggagccgcggcgccggcgaagtcgctgaggcgcgagctggaacccccagaccagctcaaacgggagccaaaactcgaagcttggaagaattagcaggaaatggcggatgaggcgttgtttttgcttctccataacgagatggtgtctggagtgtacaagtccgcggagcagggggaggtggaaaacggacgatgtattactaagctggaaaacatggggtttcgagtgggacaaggattgatagaaaggtgagcaggttggatttgaaaattttcttgcaggtttacaaaagatactgcaaggttcaaggatgagttagatatcatgaagttcatttgtaaagatttttggactacggtattcaagaaacaaatcgacaatctaaggacaaatcatcagtatttagcatttacgtgtggcttaatcag

SEQ ID NO: 191942 - DNA, 1000 bp, Homo sapiens
  Payload ID: 17922
  Gene Name: trafficking protein particle complex 6B
  ENST ID: ENST00000555269
  CDS Start-End: 259-411
ctttggttagagctcccgtcagactttagttcggccctaggatttggtagccccgaagtgtgggctctctccagtaccagactcatttcagtaccagcctttgggaagtcgtgtgaatacctcggtctcttagccacagggatagaatggcggcctgacggagccgcggcgccggcgaagtcgctgaggcgcgagctggaacccccagaccagctcaaacgggagccaaaactcgaagcttggaagaattagcaggaaatggcggatgaggcgttgtttttgcttctccataacgagatggtgtctggagtgtacaagtccgcggagcagggggaggtggaaaacggacgatgtattactaagctggaaaacatggggtttcgagtgggacaaggattgatagaaaggtgagcaggttggatttgaaaattttcttgcaggtttacaaaagatactgcaaggttcaaggatgagttagatatcatgaagttcatttgtaaagatttttggactacggtattcaagaaacaaatcgacaatctaaggacaaatcatcagggcatctatgtacttcaggacaacaaatttcgcctgcttactcagatgtctgcaggaaaacagtatttagaacatgcatctaagtatttagcatttacgtgtggcttaatcagaggtggcttatcaaacttgggaataaaaagtattgtaacagctgaagtgtcttcaatgcctgcttgcaaatttcaggtgatgatacagaagctgtagaacatactgaaatgcaaggcttcaacagtgtaaagagataaattattcatgtaaaagtatttcaagtagtgatgatttaattacattgttcgatgtttgtacaggagtaagcatgtatttttatcaatttaacacagatcaaaggagatgaagggacattctgccatgacatacacttaaccaaaactattcaaaatgaaaaccggatttcaaataaccagacaccaagatg

SEQ ID NO: 191943 - DNA, 6226 bp, Homo sapiens
  Payload ID: 17923
  Gene Name: trafficking protein particle complex 8
  Uniprot ID: Q9Y2L5
  ENST ID: ENST00000283351
  CDS Start-End: 337-4644
ggcctcaacatggcggttccggccgggcagtgaccaaggttttgccgtccgaaggactaagtggtgactgtcggcgtctccacctatcggggtggaatgcgagcacgcggggacgagcgctgagaagcggcggtgacgggaaggggggggtcagtggattgtgccccagaaaccgaagcggcggcgtctgttccttcttgtttctaggctccagtgcgttcggggccccgcccggccgggccaggccggcgggcggcggcggtagctgctgcagccgcaggataacctcgcagggtgggccggagggcgggcgccgccgctgcctgtgctgcggcgatggcccagtgtgtacaatcagtgcaggagctaatcccggactccttcgtcccctgtgtcgctgcgctgtgcagcgacgaagccgagcggctcactcgtctcaatcacctcagcttcgcggagctgcttaagcccttctcccgcctcacttccgaggttcacatgagagatcctaataatcaacttcacgtaattaaaaatttgaagatagcagtaagcaacattgtcacccagccacctcagcctggagccatccggaagcttttgaatgatgttgtttctggcagtcagcctgcagaaggattagtagctaatgtgattacagcaggagattatgaccttaacatcagtgccactactccatggtttgagtcttacagagaaacctttcttcagtcgatgccagcattggatcatgaatttctgaaccactatttagcatgtatgttggtagcgtcatctagtgaagctgaacctgtggaacagttttcaaagttgtcacaagaacagcatcgaattcagcacaacagtgattattcctaccccaagtggtttataccaaatacacttaaatactatgtacttttacatgatgtaagtgcaggagatgaacagagagctgaatcaatttatgaagaaatgaaacagaaatatggaactcagggttgctatttacttaaaattaattctcgaacatctaatcgagcatcagatgaacagataccagatccttggagtcagtatctccagaaaaatagtattcaaaaccaggaatcatatgaagatggcccttgtactataacttcaaataagaattctgataataacttgctttcattggatggattagataacgaagtcaaagatggcttaccaaataactttagagctcacccacttcagttggagcaatccagtgacccttctaacagtattgatggcccagatcatctaagatctgcttcatcgttacatgaaacaaagaaaggaaatactggaataattcatggtgcatgtttaacacttactgatcatgatagaattcgacagtttatacaagagttcacatttcggggccttttgccacatatagagaaaacaattaggcaattaaacgatcagctaatatcaagaaaaggtttgagtcgatctctattttctgcaactaaaaaatggtttagtggcagtaaagttccagaaaagagcattaatgacctgaaaaatacatctggcttgctgtatccgccggaagcaccagaacttcaaatcaggaaaatggctgacttatgttttttggtgcagcattatgatttggcttacagttgctatcatactgcaaagaaagattttcttaatgatcaagcaatgctttatgcagctggtgccttggaaatggcagcagtgtctgcttttcttcaaccaggagcacctaggccatatcctgctcattacatggatacagcaattcagacatacagagatatctgcaagaatatggtgttggctgaaagatgtgtgttgcttagtgctgaacttttaaaaagccaaagcaaatattcagaggctgcagctctcctaatacggttgaccagtgaggattctgatcttcgaagtgcacttcttttggaacaggcagcacattgctttataaacatgaaaagtcccatggttagaaaatatgcatttcatatgatattggcaggccatcgatttagtaaagcagggcagaaaaagcatgctttacgctgttattgtcaagccatgcaagtttacaaaggaaaaggctggtctcttgcagaggatcacattaatttcactattgggcgccagtcctatactcttagacagctggataatgctgtgtctgcttttaggcatattctaattaatgaaagtaaacaatctgctgctcaacagggggctttcctcagagaatatctttatgtttacaagaatgtaagtcagctgtcaccagatggtcctttgccacagcttcctttaccgtatattaacagttcagcaacacgggttttttttggccatgacagacgaccagcggatggtgaaaaacaagcagctactcatgtaagtcttgatcaagaatatgattctgaatcctctcagcagtggcgagaacttgaggaacaagttgtttctgtggttaacaaaggagtaattccatccaattttcatcccacacaatactgtttgaacagttactcagataattcaagatttccacttgcagttgtagaagaaccaattacagtggaagtggcttttagaaaccctttgaaagttctacttttgttgactgatttgtcattgctttggaagtttcatcctaaagatttcagtggaaaggataatgaagaagttaaacaactagttacaagtgaacctgaaatgattggagctgaagttatttcagagttcttaattaatggcgaagaatcaaaagtggcaagactaaagctctttccccatcacataggggagctgcatattctgggagttgtttataatcttggcactattcagggctctatgacagtagatggcattggtgctcttcccggatgtcacacaggaaaatattccttgagtatgtcagtccgagggaagcaggatttagaaattcaaggtcctcgacttaacaacacaaaagaagagaaaacatctgttaaatatggccctgatcgacgtttagatcccataatcacagaagaaatgccactgttggaggtgttctttatacattttcctacagggcttctctgtggagaaatccgaaaagcatatgtagaatttgtcaatgtcagcaaatgtccacttactggattgaaggttgtttctaaacgtccagagttctttactttcggtggtaatactgctgttctaacaccactaagtccctcagcttctgagaattgtagtgcttacaagactgttgtgacagatgctacctctgtgtgtacagcactcatatcatcagcttcttctgtagactttggcattggcacaggaagtcaaccagaggtgattcctgttccccttcctgacactgttcttctacccggagcctcagtgcagctgccaatgtggttacgtgggcctgatgaagaaggtgtccatgaaattaactttttgttttactatgaaagtgtcaaaaagcagccaaaaatacggcacagaatattaagacacactgcaattatttgtaccagtcggtctttaaatgtacgggccactgtctgcagaagtaattctcttgaaaatgaagaaggcagaggaggcaatatgctagtctttgtggatgtggaaaataccaatactagtgaagcaggcgttaaggaattccacatagtgcaagtatcaagtagtagcaaacactggaagttacagaaatctgtaaatctttctgaaaacaaagataccaaacttgccagtagggagaagggaaagttttgctttaaggcaataagatgtgagaaagaagaagcggccacacagtcctctgaaaaatatacctttgcagatatcatctttggaaatgaacagataataagttcagcaagcccatgtgcagacttcttttatcgaagtttatcttctgaattgaaaaaaccacaagctcacttgcctgtgcatacagaaaaacagtcaacagaggatgctgtgagattgattcaaaaatgcagtgaggtagatttgaatattgtcatattatggaaggcatacgttgtggaagacagtaaacagcttattttggaaggtcaacatcatgttattcttcgcactataggaaaagaagccttttcatatcctcagaaacaggagccaccagaaatggaactattgaaatttttcaggccagaaaacattacagtttcctcaaggccatcagtagagcagctttctagtctcattaaaacgagtcttcactacccagaatcatttaatcatccatttcatcaaaaaagcctttgtttagtaccagtcactcttttactttccaattgttctaaggctgatgtagatgtcatagttgatcttcggcataaaacaacaagtccagaagcactggaaatccatggatcattcacatggcttggacaaacacagtataaacttcaacttaaaagccaggagattcacagtctgcagctgaaagcatgctttgttcatacaggtgtttataaccttggaactcctagggtatttgccaagttatcggaccaagttacagtgtttgaaacaagtcagcagaattccatgcctgccctgatcatcatcagtaatgtgtgacaacttggaaatttgtactgaaatccacaataatcagtttttgctggatgggttttacagcagtatttgatatacctaacttgttatggaggttgattgatatctgatccctgcaaaatactttgacttgtcattttgttgatgatgcaaagcacgttggactgagaatacttaacattctttttctgtatttctttaaaccctgagaataatttacatgctcataatacaggatatcagcatatttgtgcaccttattaagccccatcttaagaaaacacaaagtctaagtctgctgttacaacttgtcaatggtatacgaatattaggagatgattctgagaaaggaaaggccttgttggcagtactcctgttaagccattagtctctaaattccagctttactgtgaagttctatagagtgttaaatacaaattttcctgtcttgcttcacacagttccttaaaatcagttttgaactttggtcatagagtcttcatatttcagtatttggtggtccctatgacttatacataactttgtaaaaagaaaaaaaaattttttctgatgctttgaatatagttttgaaaggagttttgacttttttcccctcattcatctcagtatagagtgcgctatttcacaatacgatttttgtcattaaaattaccatattctttattatataacgttaactattgagttgatctgtttaaaatataaatctcaagttaattaaaaataagcttttcaaaaatgtattatatttataacaaatatactgtaaatagaataaagacatgctattcactgtatagcgtattagtatctgttgattagaaagtctggtttcaaaatatttttttattcagagaatgggcatttggacataagaaatttcaattcagccctgctgcagatagagaaatgggagcaaggttgtttcaatgaatatctcttgtcattggagaaggagggaagacagggtgtaggagtgggtggcagggagtacaagagccagggtcagtcaagtctggagcagatggggtccttgtgccattgacagctaccatggtttgttccagtctcaatctcggcactaatcggagcagactgcaccaaagtggggagagatcaaaagaccccgttttcagactgaagattccaaacctgtacttggaacaactcttcttgagagatgggtggctagtctgtgtgcctctctgcaactgctgcttatgcttctggatcttaagtgggtctctggcttttcagctccttccactctgtgtcttagcaggtgtgggacaagttggagaggaaggtcacattctaaggacactcatttccttcttgagagtttagggccatgggcttataaaaagtctgaggaggaaagacaagaatgaggaggcataatcacagtggtatctcatatttaaaccactcagctgaatattaaattgaaccgattgttaaacagacactaataaaaaaattaaactatataaacctacaactgaatatattaaaaataaaggtaataaagcactcaaaattacttcctgaatattactcagga

SEQ ID NO: 191944 - DNA, 5014 bp, Homo sapiens
  Payload ID: 17923
  Gene Name: trafficking protein particle complex 8
  ENST ID: ENST00000580104
  CDS Start-End: 152-2932
gcagctgggagtagtactgccggctccagtgcgttcggggccccgcccggccgggccaggccggcgggcggcggcggtagctgctgcagccgcaggataacctcgcagggtgggccggagggcgggcgccgccgctgcctgtgctgcggcgatggcccagtgtgtacaatcagtgcaggagctaatcccggactccttcgtcccctgtgtcgctgcgctgtgcagcgacgaagccgagcggctcactcgtctcaatcacctcagcttcgcggagctgcttaagcccttctcccgcctcacttccgaggttcacatgagagatcctaataatcaacttcacgtaattaaaaatttgaagatagcagtaagcaacattgtcacccagccacctcagcctggagccatccggaagcttttgaatgatgttgtttctggcagtcagcctgcagaaggattagtagctaatgtgattacagcaggagattatgaccttaacatcagtgccactactccatggtttgagtcttacagagaaacctttcttcagtcgatgccagcattggatcatgaatttctgaaccactatttagcatgtatgttggtagcgtcatctagtgaagctgaacctgtggaacagttttcaaagttgtcacaagaacagcatcgaattcagcacaacagtgattattcctaccccaagtggtttataccaaatacacttaaatactatgtacttttacatgatgtaagtgcaggagatgaacagagagctgaatcaatttatgaagaaatgaaacagaaatatggaactcagggttgctatttacttaaaattaattctcgaacatctaatcgagcatcagatgaacagataccagatccttggagtcagtatctccagaaaaatagtattcaaaaccaggaatcatatgaagatggcccttgtactataacttcaaataagaattctgataataacttgctttcattggatggattagataacgaagtcaaagatggcttaccaaataactttagagctcacccacttcagttggagcaatccagtgacccttctaacagtattgatggcccagatcatctaagatctgcttcatcgttacatgaaacaaagaaaggaaatactggaataattcatggtgcatgtttaacacttactgatcatgatagaattcgacagtttatacaagagttcacatttcggggccttttgccacatatagagaaaacaattaggcaattaaacgatcagctaatatcaagaaaaggtttgagtcgatctctattttctgcaactaaaaaatggtttagtggcagtaaagttccagaaaagagcattaatgacctgaaaaatacatctggcttgctgtatccgccggaagcaccagaacttcaaatcaggaaaatggctgacttatgttttttggtgcagcattatgatttggcttacagttgctatcatactgcaaagaaagattttcttaatgatcaagcaatgctttatgcagctggtgccttggaaatggcagcagtgtctgcttttcttcaaccaggagcacctaggccatatcctgctcattacatggatacagcaattcagacatacagagatatctgcaagaatatggtgttggctgaaagatgtgtgttgcttagtgctgaacttttaaaaagccaaagcaaatattcagaggctgcagctctcctaatacggttgaccagtgaggattctgatcttcgaagtgcacttcttttggaacaggcagcacattgctttataaacatgaaaagtcccatggttagaaaatatgcatttcatatgatattggcaggccatcgatttagtaaagcagggcagaaaaagcatgctttacgctgttattgtcaagccatgcaagtttacaaaggaaaaggctggtctcttgcagaggatcacattaatttcactattgggcgccagtcctatactcttagacagctggataatgctgtgtctgcttttaggcatattctaattaatgaaagtaaacaatctgctgctcaacagggggctttcctcagagaatatctttatgtttacaagaatgtaagtcagctgtcaccagatggtcctttgccacagcttcctttaccgtatattaacagttcagcaacacgggttttttttggccatgacagacgaccagcggatggtgaaaaacaagcagctactcatgtaagtcttgatcaagaatatgattctgaatcctctcagcagtggcgagaacttgaggaacaagttgtttctgtggttaacaaaggagtaattccatccaattttcatcccacacaatactgtttgaacagttactcagataattcaagatttccacttgcagttgtagaagaaccaattacagtggaagtggcttttagaaaccctttgaaagttctacttttgttgactgatttgtcattgctttggaagtttcatcctaaagatttcagtggaaaggataatgaagaagttaaacaactagttacaagtgaacctgaaatgattggagctgaagttatttcagagttcttaattaatggcgaagaatcaaaagtggcaagactaaagctctttccccatcacataggggagctgcatattctgggagttgtttataatcttggcactattcagggctctatgacagtagatggcattggtgctcttcccggatgtcacacaggaaaatattccttgagtatgtcagtccgagggaagcaggatttagaaattcaaggtcctcgacttaacaacacaaaagaagagaaaacatctgttaaatatggccctgatcgacgtttagatcccataatcacagaagaaatgccactgttggagactttggcattggcacaggaagtcaaccagaggtgattcctgttccccttcctgacactgttcttctacccggagcctcagtgcagctgccaatgtggttacgtgggcctgatgaagaaggtgtccatgaaattaactttttgttttactatgaaagtgtcaaaaagcagccaaaaatacggcacagaatattaagacacactgcaattatttgtaccagtcggtctttaaatgtacgggccactgtctgcagaagtaattctcttgaaaatgaagaaggcagaggaggcaatatgctagtctttgtggatgtggaaaataccaatactagtgaagcaggcgttaaggaattccacatagtgcaagtatcaagtagtagcaaacactggaagttacagaaatctgtaaatctttctgaaaacaaagataccaaacttgccagtagggagaagggaaagttttgctttaaggcaataagatgtgagaaagaagaagcggccacacagtcctctgaaaaatatacctttgcagatatcatctttggaaatgaacagataataagttcagcaagcccatgtgcagacttcttttatcgaagtttatcttctgaattgaaaaaaccacaagctcacttgcctgtgcatacagaaaaacagtcaacagaggatgctgtgagattgattcaaaaatgcagtgaggtagatttgaatattgtcatattatggaaggcatacgttgtggaagacagtaaacagcttattttggaaggtcaacatcatgttattcttcgcactataggaaaagaagccttttcatatcctcagaaacaggagccaccagaaatggaactattgaaatttttcaggccagaaaacattacagtttcctcaaggccatcagtagagcagctttctagtctcattaaaacgagtcttcactacccagaatcatttaatcatccatttcatcaaaaaagcctttgtttagtaccagtcactcttttactttccaattgttctaaggctgatgtagatgtcatagttgatcttcggcataaaacaacaagtccagaagcactggaaatccatggatcattcacatggcttggacaaacacagtataaacttcaacttaaaagccaggagattcacagtctgcagctgaaagcatgctttgttcatacaggtgtttataaccttggaactcctagggtatttgccaagttatcggaccaagttacagtgtttgaaacaagtcagcagaattccatgcctgccctgatcatcatcagtaatgtgtgacaacttggaaatttgtactgaaatccacaataatcagtttttgctggatgggttttacagcagtatttgatatacctaacttgttatggaggttgattgatatctgatccctgcaaaatactttgacttgtcattttgttgatgatgcaaagcacgttggactgagaatacttaacattctttttctgtatttctttaaaccctgagaataatttacatgctcataatacaggatatcagcatatttgtgcaccttattaagccccatcttaagaaaacacaaagtctaagtctgctgttacaacttgtcaatggtatacgaatattaggagatgattctgagaaaggaaaggccttgttggcagtactcctgttaagccattagtctctaaattccagctttactgtgaagttctatagagtgttaaatacaaattttcctgtcttgcttcacacagttccttaaaatcagttttgaactttggtcatagagtcttcatatttcagtatttggtggtccctatgacttatacataactttgtaaaaagaaaaaaaaattttttctgatgctttgaatatagttttgaaaggagttttgacttttttcccctcattcatctcagtatagagtgcgctatttcacaatacgatttttgtcattaaaattaccatattctttattatataacgttaactattgagttgatctgtttaaaatataaatctcaagttaattaaaaataagcttttcaaaaatgtattatatttataacaaatatactgtaaatagaataaagacatgctattcactgtata

SEQ ID NO: 191945 - DNA, 4391 bp, Homo sapiens
  Payload ID: 17923
  Gene Name: trafficking protein particle complex 8
  ENST ID: ENST00000582539
  CDS Start-End: 81-4226
cgtctccacctatcggggtggaatgcgagcacgcggggacgagcgctgagaagcggcggtgacgggaagggggggttcacatgagagatcctaataatcaacttcacgtaattaaaaatttgaagatagcagtaagcaacattgtcacccagccacctcagcctggagccatccggaagcttttgaatgatgttgtttctggcagtcagcctgcagaaggattagtagctaatgtgattacagcaggagattatgaccttaacatcagtgccactactccatggtttgagtcttacagagaaacctttcttcagtcgatgccagcattggatcatgaatttctgaaccactatttagcatgtatgttggtagcgtcatctagtgaagctgaacctgtggaacagttttcaaagttgtcacaagaacagcatcgaattcagcacaacagtgattattcctaccccaagtggtttataccaaatacacttaaatactatgtacttttacatgatgtaagtgcaggagatgaacagagagctgaatcaatttatgaagaaatgaaacagaaatatggaactcagggttgctatttacttaaaattaattctcgaacatctaatcgagcatcagatgaacagataccagatccttggagtcagtatctccagaaaaatagtattcaaaaccaggaatcatatgaagatggcccttgtactataacttcaaataagaattctgataataacttgctttcattggatggattagataacgaagtcaaagatggcttaccaaataactttagagctcacccacttcagttggagcaatccagtgacccttctaacagtattgatggcccagatcatctaagatctgcttcatcgttacatgaaacaaagaaaggaaatactggaataattcatggtgcatgtttaacacttactgatcatgatagaattcgacagtttatacaagagttcacatttcggggccttttgccacatatagagaaaacaattaggcaattaaacgatcagctaatatcaagaaaaggtttgagtcgatctctattttctgcaactaaaaaatggtttagtggcagtaaagttccagaaaagagcattaatgacctgaaaaatacatctggcttgctgtatccgccggaagcaccagaacttcaaatcaggaaaatggctgacttatgttttttggtgcagcattatgatttggcttacagttgctatcatactgcaaagaaagattttcttaatgatcaagcaatgctttatgcagctggtgccttggaaatggcagcagtgtctgcttttcttcaaccaggagcacctaggccatatcctgctcattacatggatacagcaattcagacatacagagatatctgcaagaatatggtgttggctgaaagatgtgtgttgcttagtgctgaacttttaaaaagccaaagcaaatattcagaggctgcagctctcctaatacggttgaccagtgaggattctgatcttcgaagtgcacttcttttggaacaggcagcacattgctttataaacatgaaaagtcccatggttagaaaatatgcatttcatatgatattggcaggccatcgatttagtaaagcagggcagaaaaagcatgctttacgctgttattgtcaagccatgcaagtttacaaaggaaaaggctggtctcttgcagaggatcacattaatttcactattgggcgccagtcctatactcttagacagctggataatgctgtgtctgcttttaggcatattctaattaatgaaagtaaacaatctgctgctcaacagggggctttcctcagagaatatctttatgtttacaagaatgtaagtcagctgtcaccagatggtcctttgccacagcttcctttaccgtatattaacagttcagcaacacgggttttttttggccatgacagacgaccagcggatggtgaaaaacaagcagctactcatgtaagtcttgatcaagaatatgattctgaatcctctcagcagtggcgagaacttgaggaacaagttgtttctgtggttaacaaaggagtaattccatccaattttcatcccacacaatactgtttgaacagttactcagataattcaagatttccacttgcagttgtagaagaaccaattacagtggaagtggcttttagaaaccctttgaaagttctacttttgttgactgatttgtcattgctttggaagtttcatcctaaagatttcagtggaaaggataatgaagaagttaaacaactagttacaagtgaacctgaaatgattggagctgaagttatttcagagttcttaattaatggcgaagaatcaaaagtggcaagactaaagctctttccccatcacataggggagctgcatattctgggagttgtttataatcttggcactattcagggctctatgacagtagatggcattggtgctcttcccggatgtcacacaggaaaatattccttgagtatgtcagtccgagggaagcaggatttagaaattcaaggtcctcgacttaacaacacaaaagaagagaaaacatctgttaaatatggccctgatcgacgtttagatcccataatcacagaagaaatgccactgttggaggtgttctttatacattttcctacagggcttctctgtggagaaatccgaaaagcatatgtagaatttgtcaatgtcagcaaatgtccacttactggattgaaggttgtttctaaacgtccagagttctttactttcggtggtaatactgctgttctaacaccactaagtccctcagcttctgagaattgtagtgcttacaagactgttgtgacagatgctacctctgtgtgtacagcactcatatcatcagcttcttctgtagactttggcattggcacaggaagtcaaccagaggtgattcctgttccccttcctgacactgttcttctacccggagcctcagtgcagctgccaatgtggttacgtgggcctgatgaagaaggtgtccatgaaattaactttttgttttactatgaaagtgtcaaaaagcagccaaaaatacggcacagaatattaagacacactgcaattatttgtaccagtcggtctttaaatgtacgggccactgtctgcagaagtaattctcttgaaaatgaagaaggcagaggaggcaatatgctagtctttgtggatgtggaaaataccaatactagtgaagcaggcgttaaggaattccacatagtgcaagtatcaagtagtagcaaacactggaagttacagaaatctgtaaatctttctgaaaacaaagataccaaacttgccagtagggagaagggaaagttttgctttaaggcaataagatgtgagaaagaagaagcggccacacagtcctctgaaaaatatacctttgcagatatcatctttggaaatgaacagataataagttcagcaagcccatgtgcagacttcttttatcgaagtttatcttctgaattgaaaaaaccacaagctcacttgcctgtgcatacagaaaaacagtcaacagaggatgctgtgagattgattcaaaaatgcagtgaggtagatttgaatattgtcatattatggaaggcatacgttgtggaagacagtaaacagcttattttggaaggtcaacatcatgttattcttcgcactataggaaaagaagccttttcatatcctcagaaacaggagccaccagaaatggaactattgaaatttttcaggccagaaaacattacagtttcctcaaggccatcagtagagcagctttctagtctcattaaaacgagtcttcactacccagaatcatttaatcatccatttcatcaaaaaagcctttgtttagtaccagtcactcttttactttccaattgttctaaggctgatgtagatgtcatagttgatcttcggcataaaacaacaagtccagaagcactggaaatccatggatcattcacatggcttggacaaacacagtataaacttcaacttaaaagccaggagattcacagtctgcagctgaaagcatgctttgttcatacaggtgtttataaccttggaactcctagggtatttgccaagttatcggaccaagttacagtgtttgaaacaagtcagcagaattccatgcctgccctgatcatcatcagtaatgtgtgacaacttggaaatttgtactgaaatccacaataatcagtttttgctggatgggttttacagcagtatttgatatacctaacttgttatggaggttgattgatatctgatccctgcaaaatactttgacttgtcattttgttgatgatgcaaagcacgttggactga

SEQ ID NO: 191946 - DNA, 623 bp, Homo sapiens
  Payload ID: 17923
  Gene Name: trafficking protein particle complex 8
  ENST ID: ENST00000581057
  CDS Start-End: 1-288
gagccaccagaaatggaactattgaaatttttcaggccagaaaacattacagtttcctcaaggccatcagtagagcagctttctagtctcattaaaacgagtcttcactacccagaatcatttaatcatccatttcatcaaaaaagcctttgtttagtaccagtcactcttttactttccaattgttctaaggctgatgtagatgtcatagttgatcttcggcataaaacaacaagaagcactggaaatccatggatcattcacatggcttggacaaacacagtataaacttcaacttaaaagccaggagattcacagtctgcagctgaaagcatgctttgttcatacaggtgtttataaccttggaactcctagggtatttgccaagttatcggaccaagttacagtgtttgaaacaagtcagcagaattccatgcctgccctgatcatcatcagtaatgtgtgacaacttggaaatttgtactgaaatccacaataatcagtttttgctggatgggttttacagcagtatttgatatacctaacttgttatggaggttgattgatatctgatccctgcaaaatactttgacttgtcattttgttgatgatgcaaagcacgt

SEQ ID NO: 191947 - DNA, 563 bp, Homo sapiens
  Payload ID: 17923
  Gene Name: trafficking protein particle complex 8
  ENST ID: ENST00000578658
  CDS Start-End: 1-563
agagtagtaagaggatgcttagataaagggaggaccttgaattctaggaaagggatttgcgattttatgtctaatggtaaatttcacatgagagatcctaataatcaacttcacgtaattaaaaatttgaagatagcagtaagcaacattgtcacccagccacctcagcctggagccatccggaagcttttgaatgatgttgtttctggcagtcagcctgcagaaggattagtagctaatgtgattacagcaggagattatgaccttaacatcagtgccactactccatggtttgagtcttacagagaaacctttcttcagtcgatgccagcattggatcatgaatttctgaaccactatttagcatgtatgttggtagcgtcatctagtgaagctgaacctgtggaacagttttcaaagttgtcacaagaacagcatcgaattcagcacaacagtgattattcctaccccaagtggtttataccaaatacacttaaatactatgtacttttacatgatgtaagtgcaggagatgaacagagagctgaatcaatttatgaaga

SEQ ID NO: 191948 - DNA, 3205 bp, Homo sapiens
  Payload ID: 17923
  Gene Name: trafficking protein particle complex 8
  ENST ID: ENST00000582513
  CDS Start-End: 343-2343
gggttcggcctcaacatggcggttccggccgggcagtgaccaaggttttgccgtccgaaggactaagtggtgactgtcggcgtctccacctatcggggtggaatgcgagcacgcggggacgagcgctgagaagcggcggtgacgggaaggggggggtcagtggattgtgccccagaaaccgaagcggcggcgtctgttccttcttgtttctaggctccagtgcgttcggggccccgcccggccgggccaggccggcgggcggcggcggtagctgctgcagccgcaggataacctcgcagggtgggccggagggcgggcgccgccgctgcctgtgctgcggcgatggcccagtgtgtacaatcagtgcaggagctaatcccggactccttcgtcccctgtgtcgctgcgctgtgcagcgacgaagccgagcggctcactcgtctcaatcacctcagcttcgcggagctgcttaagcccttctcccgcctcacttccgaggttcacatgagagatcctaataatcaacttcacgtaattaaaaatttgaagatagcagtaagcaacattgtcacccagccacctcagcctggagccatccggaagcttttgaatgatgttgtttctggcagtcagcctgcagaaggattagtagctaatgtgattacagcaggagattatgaccttaacatcagtgccactactccatggtttgagtcttacagagaaacctttcttcagtcgatgccagcattggatcatgaatttctgaaccactatttagcatgtatgttggtagcgtcatctagtgaagctgaacctgtggaacagttttcaaagttgtcacaagaacagcatcgaattcagcacaacagtgattattcctaccccaagtggtttataccaaatacacttaaatactatgtacttttacatgatgtaagtgcaggagatgaacagagagctgaatcaatttatgaagaaatgaaacagaaatatggaactcagggttgctatttacttaaaattaattctcgaacatctaatcgagcatcagatgaacagataccagatccttggagtcagtatctccagaaaaatagtattcaaaaccaggaatcatatgaagatggcccttgtactataacttcaaataagaattctgataataacttgctttcattggatggattagataacgaagtcaaagatggcttaccaaataactttagagctcacccacttcagttggagcaatccagtgacccttctaacagtattgatggcccagatcatctaagatctgcttcatcgttacatgaaacaaagaaaggaaatactggaataattcatggtgcatgtttaacacttactgatcatgatagaattcgacagtttatacaagagttcacatttcggggccttttgccacatatagagaaaacaattaggcaattaaacgatcagctaatatcaagaaaaggtttgagtcgatctctattttctgcaactaaaaaatggtttagtggcagtaaagttccagaaaagagcattaatgacctgaaaaatacatctggcttgctgtatccgccggaagcaccagaacttcaaatcaggaaaatggctgacttatgttttttggtgcagcattatgatttggcttacagttgctatcatactgcaaagaaagattttcttaatgatcaagcaatgctttatgcagctggtgccttggaaatggcagcagtgtctgcttttcttcaaccaggagcacctaggccatatcctgctcattacatggatacagcaattcagacatacagagatatctgcaagaatatggtgttggctgaaagatgtgtgttgcttagtgctgaacttttaaaaagccaaagcaaatattcagaggctgcagctctcctaatacggttgaccagtgaggattctgatcttcgaagtgcacttcttttggaacaggcagcacattgctttataaacatgaaaagtcccatggttagaaaatatgcatttcatatgatattggcaggccatcgatttagtaaagcagggcagaaaaagcatgctttacgctgttattgtcaagccatgcaagtttacaaaggaaaaggctggtctcttgcagaggatcacattaatttcactattgggcgccagtcctatactcttagacagctggataatgctgtgtctgcttttaggcatattctaattaatgaaagtaaacaatctgctgctcaacagggggctttcctcagagaatatctttatgtttacaaggtgactgcttattttcattcaggaatagatattaaaactgtattttagtgtgaaagtatttatttattaccatatcttacgatagttttattagaatatatgtagttatcagtcataaaaaagctgtggcaggctaggctttttggctatagatcttggttacattgccccttccacagttcttgaaaagagaattttaatattacaatgaacacttgatttgtggctgttcttagaatcttaaaaaaaaaaaagattccacaggttttctggattctttattcatcatgcttttatagactcacaactgattttacagttggttttaagtgggttctctttaccatcctttggagatggacattctatgttcttttccttgtgaaagatgagggggtatggatctgtggaaagtagacaggctattatggtgcaatggagaaaaattaacaggaagaaggactgtttcactgaggcaagcagataaacatataaagcattgttttatggaaaaaatgggaagttgtaaattttttcccaaggcctatgaatagtgcatattatatctatcgtgcagaaaataactacctttagggtctagactttattaatttgaaattatatgggttagaattttggcagataggatgctataatgagtcataagaagtaaaacgcttactaaaataagttttgcatatttaacatccaggtaattagctgagtaacctcagtaagattcttttgaggcagaataaatatctgaagtgcttctgagttgtaaaattttatgactgatatgagaaataaaactagtaattacatatcttaatattcttgcttaacatatttttaatgccttgtgtattaagaaacgaggaaacaaataaaaataccattttcacaaaaa

SEQ ID NO: 191949 - DNA, 4474 bp, Homo sapiens
  Payload ID: 17924
  Gene Name: trafficking protein particle complex 9
  Uniprot ID: Q96Q05
  ENST ID: ENST00000389328
  CDS Start-End: 16-3756
aaagtcgggagtgccatggtgccagctggggatcaagaccgcgcgccacacagggggaagccggcccaggctggggctcgcacctcacgtgcctcccgggccctgcgatcctggaggcgctcccaggccgcgcgcgccacggtcacccacccacgtggggggcacgaccgtgggagtcacggggggtaccgtgagggtcacagggggtgccgcagggatccacagtgggcttccgcggggcctccacccctgagcttcacagaggaagtgaaatttgagctgcgcgccctgaaggactgggacttcaaaatgagcgtccctgactacatgcagtgtgctgaggaccaccagacgctgctcgtggtggtccagcctgtgggcatcgtctccgaggagaacttcttcaggatctataagaggatttgctctgtgagtcagatcagcgtgcgggactcccagcgagtcctctacatccgctacaggcaccactacccacccgagaacaacgagtggggtgacttccagacccaccgcaaagtcgtgggcctcatcaccatcacagactgcttctcggccaaggactggccacagacctttgagaagttccacgtgcagaaggagatctacggctccacactgtatgactcccggctctttgtcttcgggctgcagggggagatcgtggagcagccgcgcaccgacgtggctttctaccccaactacgaggactgccagacggtggagaagagaatcgaggacttcatcgagtcactgttcatcgtgctggagtccaagcgtctggacagagccacagacaagtctggggataagatcccccttctctgtgtcccgtttgagaaaaaggactttgtaggactggacacagacagcagacattacaagaagcggtgccaaggccgcatgcggaagcacgtgggggacctgtgcctgcaggcagggatgctgcaggactccctggtgcattaccacatgtcggtggagctgctgcgttctgtgaatgactttctgtggcttggagctgccctggaaggattgtgttcagcttctgtcatctatcactatcctggtggaactggtgggaagagtggagctcggaggttccagggcagcacccttcctgctgaagcagccaatagacaccggccaggggcacaggaagttctcattgatccaggtgccctcaccaccaatggcatcaaccctgacaccagtactgagatcggacgtgctaagaactgccttagccctgaagacataattgacaagtataaagaggcgatttcctattacagcaagtataagaatgcgggagtgattgagttggaagcgtgcatcaaggctgtacgtgtccttgcaattcagaaacggagcatggaagcatcagaatttcttcagaatgcagtttacattaaccttcgacagctttctgaggaagagaaaattcagcgctacagcatcctctccgagctctatgagctgatcggcttccatcgcaagtctgcgttcttcaagcgcgtggccgccatgcagtgcgtggccccaagcatcgcggagcctgggtggagggcctgctacaaactcctcctggaaacgctgcccggctacagtctgtcgctggatcccaaagatttcagcagaggcacgcacagaggctgggctgcggtccagatgcgtttgctccatgaattggtctacgcctcccgaaggatggggaaccctgccctctctgtcagacacctgtccttccttctacagaccatgctggacttcttgtcggatcaggaaaagaaagatgtggcccaaagcctagagaactatacgtccaagtgtcctgggaccatggagcccatcgccctccctggcggcctcaccctgccaccggtgcccttcaccaagcttcccatcgtcaggcatgtgaaactattgaaccttcctgctagcctccggccacacaaaatgaaaagcttgctgggtcagaacgtgtcaaccaaaagtcctttcatctattcaccaattatcgcacacaaccgtggagaagagcggaacaagaaaatagatttccagtgggttcaaggagatgtgtgtgaagttcagctgatggtatataacccaatgccgtttgaacttcgagttgaaaacatggggctgctcaccagcggagtggagttcgagtctctccctgcggcgctttctcttccggctgaatctggtctgtacccagtgacgctcgtcggggtcccgcagacgactggaacgattactgtgaacggttaccataccacggtcttcggtgtgttcagtgactgtttgctggataacctgccgggaataaaaaccagtggctccacagtggaagtcattcccgcgttgccaagactgcagatcagcacctctctgcccagatctgcacattcattgcaaccttcttctggtgatgaaatatctactaatgtatctgtccagctttacaatggagaaagtcagcaactaatcattaaattggaaaatattggaatggaaccattggagaaactggaggtcacctcgaaagttctcaccactaaagaaaaattgtatggcgacttcttgagctggaagctagaggaaacccttgcccagttccctttgcagcctgggaaggtggccacgttcacaatcaacatcaaagtgaagctggatttctcctgccaggagaatctcctgcaggatctcagtgatgatggaatcagtgtgagtggctttcccctgtccagtccttttcggcaggtcgttcggccccgagtggagggcaaacctgtgaacccacccgagagcaacaaagcaggcgactacagccacgtgaagaccctggaagctgtcctgaatttcaaatactctggaggcccgggccacactgaaggatattacaggaatctctccctggggctgcatgtagaagtcgagccgtctgtatttttcacccgagtcagcaccctcccagcaaccagtacccggcagtgtcacctgctcctggatgtcttcaactccaccgagcatgagctgaccgtcagcaccaggagcagcgaggcactcatcctgcacgccggtgagtgccagcgaatggctattcaagtggacaagttcaactttgagagtttcccggagtcccctggggagaaggggcaatttgcaaaccccaagcagctggaggaagagcggcgggaagcccgaggcctggagatccacagcaagctgggcatctgctggagaatcccctccctgaagcgcagtggcgaggcgagtgtggaaggactcctgaaccagctcgtcctggagcacctgcagctggcgcctctgcagtgggatgtgctggtggacggacagccatgtgaccgcgaggctgtggcggcctgccaggtgggcgaccccgtgcgcctggaggtgcggctgaccaaccggagcccgcgcagcgtagggcccttcgccctcactgtggtccccttccaggaccaccagaacggcgtgcacaactacgacctgcacgacaccgtctccttcgtgggctccagcaccttctacctcgacgcggtgcagccgtccggccagtcggcctgcctcggggccctcctcttcctctacacgggagacttcttcctccacatccggttccacgaggacagcaccagcaaggagctgccaccctcttggttctgcctgcccagtgtgcacgtgtgtgccctggaggcgcaggcctgagcccgcctacttccgtccctctttctgcagggccagaggtgaccctgcctggcctcccacaccccctgcaatgagcaaggccttcactgcagccccatctcctcctcctcccccagacccctcccagccctctcctcctgttcctcctgtagcatctttgctgggctacgcagaagccccggacatggcagccccaccccatgccacgccccttcctacactgttccctggaccatacacaggctgaagcagaggaaatcccaaagcgggtgcccatccagcccaggtcccaggatccctgcacccatttctgtgacctggggccccagccgtgctgtgctgctcatcccagcagagggacctccctcgtccagcgacttccctttggccatagaaagaaatggtgagcatgagactgggcacagcctgagggcgtgggcagcttcccaccctccctgggccttggaatcccccaaggctggttttcttcctggagacccccatgggcaacttggcaggagagatggtgccgtaggaggtcgtggatggttgatgccaagagaggccctccacccgtggtgggcaaatgtccaggcctgggctggcagcccagggctgtttctgggtgctccctggccccagggtggcgtctggttaccatggctgtgtgtgtccatgtctgcaagcagttcttcaataaatggcctgcctccccctc

SEQ ID NO: 191950 - DNA, 4297 bp, Homo sapiens
  Payload ID: 17924
  Gene Name: trafficking protein particle complex 9
  Uniprot ID: Q96Q05
  ENST ID: ENST00000438773
  CDS Start-End: 135-3581
agcgccggctcggccgccagtaggaagcgccagcccagagcctgggaagtggccgcagaggctgctcggccccgctgcccgccaggtcgtgggctcccgctccgggcccggggccaccggctgtggacttcaaaatgagcgtccctgactacatgcagtgtgctgaggaccaccagacgctgctcgtggtggtccagcctgtgggcatcgtctccgaggagaacttcttcaggatctataagaggatttgctctgtgagtcagatcagcgtgcgggactcccagcgagtcctctacatccgctacaggcaccactacccacccgagaacaacgagtggggtgacttccagacccaccgcaaagtcgtgggcctcatcaccatcacagactgcttctcggccaaggactggccacagacctttgagaagttccacgtgcagaaggagatctacggctccacactgtatgactcccggctctttgtcttcgggctgcagggggagatcgtggagcagccgcgcaccgacgtggctttctaccccaactacgaggactgccagacggtggagaagagaatcgaggacttcatcgagtcactgttcatcgtgctggagtccaagcgtctggacagagccacagacaagtctggggataagatcccccttctctgtgtcccgtttgagaaaaaggactttgtaggactggacacagacagcagacattacaagaagcggtgccaaggccgcatgcggaagcacgtgggggacctgtgcctgcaggcagggatgctgcaggactccctggtgcattaccacatgtcggtggagctgctgcgttctgtgaatgactttctgtggcttggagctgccctggaaggattgtgttcagcttctgtcatctatcactatcctggtggaactggtgggaagagtggagctcggaggttccagggcagcacccttcctgctgaagcagccaatagacaccggccaggggcacaggaagttctcattgatccaggtgccctcaccaccaatggcatcaaccctgacaccagtactgagatcggacgtgctaagaactgccttagccctgaagacataattgacaagtataaagaggcgatttcctattacagcaagtataagaatgcgggagtgattgagttggaagcgtgcatcaaggctgtacgtgtccttgcaattcagaaacggagcatggaagcatcagaatttcttcagaatgcagtttacattaaccttcgacagctttctgaggaagagaaaattcagcgctacagcatcctctccgagctctatgagctgatcggcttccatcgcaagtctgcgttcttcaagcgcgtggccgccatgcagtgcgtggccccaagcatcgcggagcctgggtggagggcctgctacaaactcctcctggaaacgctgcccggctacagtctgtcgctggatcccaaagatttcagcagaggcacgcacagaggctgggctgcggtccagatgcgtttgctccatgaattggtctacgcctcccgaaggatggggaaccctgccctctctgtcagacacctgtccttccttctacagaccatgctggacttcttgtcggatcaggaaaagaaagatgtggcccaaagcctagagaactatacgtccaagtgtcctgggaccatggagcccatcgccctccctggcggcctcaccctgccaccggtgcccttcaccaagcttcccatcgtcaggcatgtgaaactattgaaccttcctgctagcctccggccacacaaaatgaaaagcttgctgggtcagaacgtgtcaaccaaaagtcctttcatctattcaccaattatcgcacacaaccgtggagaagagcggaacaagaaaatagatttccagtgggttcaaggagatgtgtgtgaagttcagctgatggtatataacccaatgccgtttgaacttcgagttgaaaacatggggctgctcaccagcggagtggagttcgagtctctccctgcggcgctttctcttccggctgaatctggtctgtacccagtgacgctcgtcggggtcccgcagacgactggaacgattactgtgaacggttaccataccacggtcttcggtgtgttcagtgactgtttgctggataacctgccgggaataaaaaccagtggctccacagtggaagtcattcccgcgttgccaagactgcagatcagcacctctctgcccagatctgcacattcattgcaaccttcttctggtgatgaaatatctactaatgtatctgtccagctttacaatggagaaagtcagcaactaatcattaaattggaaaatattggaatggaaccattggagaaactggaggtcacctcgaaagttctcaccactaaagaaaaattgtatggcgacttcttgagctggaagctagaggaaacccttgcccagttccctttgcagcctgggaaggtggccacgttcacaatcaacatcaaagtgaagctggatttctcctgccaggagaatctcctgcaggatctcagtgatgatggaatcagtgtgagtggctttcccctgtccagtccttttcggcaggtcgttcggccccgagtggagggcaaacctgtgaacccacccgagagcaacaaagcaggcgactacagccacgtgaagaccctggaagctgtcctgaatttcaaatactctggaggcccgggccacactgaaggatattacaggaatctctccctggggctgcatgtagaagtcgagccgtctgtatttttcacccgagtcagcaccctcccagcaaccagtacccggcagtgtcacctgctcctggatgtcttcaactccaccgagcatgagctgaccgtcagcaccaggagcagcgaggcactcatcctgcacgccggtgagtgccagcgaatggctattcaagtggacaagttcaactttgagagtttcccggagtcccctggggagaaggggcaatttgcaaaccccaagcagctggaggaagagcggcgggaagcccgaggcctggagatccacagcaagctgggcatctgctggagaatcccctccctgaagcgcagtggcgaggcgagtgtggaaggactcctgaaccagctcgtcctggagcacctgcagctggcgcctctgcagtgggatgtgctggtggacggacagccatgtgaccgcgaggctgtggcggcctgccaggtgggcgaccccgtgcgcctggaggtgcggctgaccaaccggagcccgcgcagcgtagggcccttcgccctcactgtggtccccttccaggaccaccagaacggcgtgcacaactacgacctgcacgacaccgtctccttcgtgggctccagcaccttctacctcgacgcggtgcagccgtccggccagtcggcctgcctcggggccctcctcttcctctacacgggagacttcttcctccacatccggttccacgaggacagcaccagcaaggagctgccaccctcttggttctgcctgcccagtgtgcacgtgtgtgccctggaggcgcaggcctgagcccgcctacttccgtccctctttctgcagggccagaggtgaccctgcctggcctcccacaccccctgcaatgagcaaggccttcactgcagccccatctcctcctcctcccccagacccctcccagccctctcctcctgttcctcctgtagcatctttgctgggctacgcagaagccccggacatggcagccccaccccatgccacgccccttcctacactgttccctggaccatacacaggctgaagcagaggaaatcccaaagcgggtgcccatccagcccaggtcccaggatccctgcacccatttctgtgacctggggccccagccgtgctgtgctgctcatcccagcagagggacctccctcgtccagcgacttccctttggccatagaaagaaatggtgagcatgagactgggcacagcctgagggcgtgggcagcttcccaccctccctgggccttggaatcccccaaggctggttttcttcctggagacccccatgggcaacttggcaggagagatggtgccgtaggaggtcgtggatggttgatgccaagagaggccctccacccgtggtgggcaaatgtccaggcctgggctggcagcccagggctgtttctgggtgctccctggccccagggtggcgtctggttaccatggctgtgtgtgtccatgtctgcaagcagttcttcaataaatggcctgcctccccc

SEQ ID NO: 191951 - DNA, 3693 bp, Homo sapiens
  Payload ID: 17924
  Gene Name: trafficking protein particle complex 9
  ENST ID: ENST00000520857
  CDS Start-End: 1-2977
cgaggacttcatcgagtcactgttcatcgtgctggagtccaagcgtctggacagagccacagacaagtctggggataagatcccccttctctgtgtcccgtttgagaaaaaggactttgtaggactggacacagacagcagacattacaagaagcggtgccaaggccgcatgcggaagcacgtgggggacctgtgcctgcaggcagggatgctgcaggactccctggtgcattaccacatgtcggtggagctgctgcgttctgtgaatgactttctgtggcttggagctgccctggaaggattgtgttcagcttctgtcatctatcactatcctggtggaactggtgggaagagtggagctcggaggttccagggcagcacccttcctgctgaagcagccaatagacaccggccaggtgccctcaccaccaatggcatcaaccctgacaccagtactgagatcggacgtgctaagaactgccttagccctgaagacataattgacaagtataaagaggcgatttcctattacagcaagtataagaatgcgggagtgattgagttggaagcgtgcatcaaggctgtacgtgtccttgcaattcagaaacggagcatggaagcatcagaatttcttcagaatgcagtttacattaaccttcgacagctttctgaggaagagaaaattcagcgctacagcatcctctccgagctctatgagctgatcggcttccatcgcaagtctgcgttcttcaagcgcgtggccgccatgcagtgcgtggccccaagcatcgcggagcctgggtggagggcctgctacaaactcctcctggaaacgctgcccggctacagtctgtcgctggatcccaaagatttcagcagaggcacgcacagaggctgggctgcggtccagatgcgtttgctccatgaattggtctacgcctcccgaaggatggggaaccctgccctctctgtcagacacctgtccttccttctacagaccatgctggacttcttgtcggatcaggaaaagaaagatgtggcccaaagcctagagaactatacgtccaagtgtcctgggaccatggagcccatcgccctccctggcggcctcaccctgccaccggtgcccttcaccaagcttcccatcgtcaggcatgtgaaactattgaaccttcctgctagcctccggccacacaaaatgaaaagcttgctgggtcagaacgtgtcaaccaaaagtcctttcatctattcaccaattatcgcacacaaccgtggagaagagcggaacaagaaaatagatttccagtgggttcaaggagatgtgtgtgaagttcagctgatggtatataacccaatgccgtttgaacttcgagttgaaaacatggggctgctcaccagcggagtggagttcgagtctctccctgcggcgctttctcttccggctgaatctggtctgtacccagtgacgctcgtcggggtcccgcagacgactggaacgattactgtgaacggttaccataccacggtcttcggtgtgttcagtgactgtttgctggataacctgccgggaataaaaaccagtggctccacagtggaagtcattcccgcgttgccaagactgcagatcagcacctctctgcccagatctgcacattcattgcaaccttcttctggtgatgaaatatctactaatgtatctgtccagctttacaatggagaaagtcagcaactaatcattaaattggaaaatattggaatggaaccattggagaaactggaggtcacctcgaaagttctcaccactaaagaaaaattgtatggcgacttcttgagctggaagctagaggaaacccttgcccagttccctttgcagcctgggaaggtggccacgttcacaatcaacatcaaagtgaagctggatttctcctgccaggagaatctcctgcaggatctcagtgatgatggaatcagtgtgagtggctttcccctgtccagtccttttcggcaggtcgttcggccccgagtggagggcaaacctgtgaacccacccgagagcaacaaagcaggcgactacagccacgtgaagaccctggaagctgtcctgaatttcaaatactctggaggcccgggccacactgaaggatattacaggaatctctccctggggctgcatgtagaagtcgagccgtctgtatttttcacccgagtcagcaccctcccagcaaccagtacccggcagtgtcacctgctcctggatgtcttcaactccaccgagcatgagctgaccgtcagcaccaggagcagcgaggcactcatcctgcacgccggtgagtgccagcgaatggctattcaagtggacaagttcaactttgagagtttcccggagtcccctggggagaaggggcaatttgcaaaccccaagcagctggaggaagagcggcgggaagcccgaggcctggagatccacagcaagctgggcatctgctggagaatcccctccctgaagcgcagtggcgaggcgagtgtggaaggactcctgaaccagctcgtcctggagcacctgcagctggcgcctctgcagtgggatgtgctggtggacggacagccatgtgaccgcgaggctgtggcggcctgccaggtgggcgaccccgtgcgcctggaggtgcggctgaccaaccggagcccgcgcagcgtagggcccttcgccctcactgtggtccccttccaggaccaccagaacggcgtgcacaactacgacctgcacgacaccgtctccttcgtgggctccagcaccttctacctcgacgcggtgcagccgtccggccagtcggcctgcctcggggccctcctcttcctctacacgggagacttcttcctccacatccggttccacgaggacagcaccagcaaggagctgccaccctcttggttctgcctgcccagtgtgcacgtgtgtgccctggaggcgcaggcctgagcccgcctacttccgtccctctttctgcagggccagaggtgaccctgcctggcctcccacaccccctgcaatgagcaaggccttcactgcagccccatctcctcctcctcccccagacccctcccagccctctcctcctgttcctcctgtagcatctttgctgggctacgcagaagccccggacatggcagccccaccccatgccacgccccttcctacactgttccctggaccatacacaggctgaagcagaggaaatcccaaagcgggtgcccatccagcccaggtcccaggatccctgcacccatttctgtgacctggggccccagccgtgctgtgctgctcatcccagcagagggacctccctcgtccagcgacttccctttggccatagaaagaaatggtgagcatgagactgggcacagcctgagggcgtgggcagcttcccaccctccctgggccttggaatcccccaaggctggttttcttcctggagacccccatgggcaacttggcaggagagatggtgccgtaggaggtcgtggatggttgatgccaagagaggccctccacccgtggtgggcaaatgtccaggcctgggctggcagcccagggctgtttctgggtgctccctggccccagggtggcgtctggttaccatggctgtgtgtgtccatgtctgcaagcagttcttcaataaatggcctgcctccccc

SEQ ID NO: 191952 - DNA, 455 bp, Homo sapiens
  Payload ID: 17924
  Gene Name: trafficking protein particle complex 9
  ENST ID: ENST00000634178
  CDS Start-End: 1-275
atggagaaagtcagcaactaatcattaaattggaaaatattggaatggaaccattggagaaactggaggtcacctcgaaagttctcaccactaaagaaaaattgtatggcgacttcttgagctggaagctagaggaaacccttgcccagttccctttgcagcctgggaaggtggccacgttcacaatcaacatcaaagtgaagctggatttctcctgccaggagaatctcctgcaggatctcagtgatggtaagcgctttcctaattttaattagcacgtcagggtcctagatactgtgtagcaacccccatcccttgatgcctgctgtttgctgtttgtaactcacttgtcattcattaactcaagctgcctgagacatctcctgggcactttgttaacagagtgtgttactgtatgtgtctgaaagtaataaaagtactttttatctaaatga

SEQ ID NO: 191953 - DNA, 732 bp, Homo sapiens
  Payload ID: 17925
  Gene Name: Trafficking protein particle complex subunit 2B  [Source:UniProtKB/Swiss-Prot
  Acc:P0DI82]
  Uniprot ID: P0DI82
  ENST ID: ENST00000543226
  CDS Start-End: 213-635
gtgacggagcggaaaagcgcgagaagcggcttggttccttgtacgcagaggcggtagtgacacaggcacaactgacagtggcagaagctcagctgacaaggactggggacggcggtgtccttgtcttgcctttgtcgcccccgcccctctcttccctggctggacttgcggagtccccgccgaagaacccgaggagccatatattgaagaccatgtctggaagcttctactttgtaattgttggtcaccatgataatccagtttttgaaatggagtttttgccagctgggaaggcagaatccaaagacgaccatcgtcatctgaaccagttcatagctcatgctgctctcgacctcgtagatgagaacatgtggctgtcgaacaacatgtacttgaaaactgtggacaagttcaacgagtggtttgtgtcagcatttgtcaccgcggggcatatgaggtttattatgcttcatgacataagacaagaagatggaataaagaacttctttactgatgtttatgatttatatataaaattttcaatgaatccattttatgaacccaattctcctattcgatcaagtgcatttgacagaaaagttcagtttcttgggaagaaacaccttttaagctgaatggagaaaattccaaaataaattatatcaccacaatggtgtatactcaggaatgtgtacattgtaaattacttgattaaatagcctggaaatcttt

SEQ ID NO: 191954 - DNA, 1743 bp, Homo sapiens
  Payload ID: 17925
  Gene Name: Trafficking protein particle complex subunit 2B  [Source:UniProtKB/Swiss-Prot
  Acc:P0DI82]
  Uniprot ID: P0DI82
  ENST ID: ENST00000596755
  CDS Start-End: 1268-1690
gtgacacaggcacaactgacagtggcagaagctcagctgacaaggactggggacggcggtgtccttgtcttgcctttgtcgcccccgcccctctcttccctggctggacttgcggagtccccgccgaagaacccgaggtgggtgccccgtcccaggcccccccccacctccgcccgacccctccttccagtgctgaagcccatagaaggggccctgcaggtcaggccccttgtctcgaagagaggggcgttcctgtgtggggtccccgtatcagctggtttgatgcagcctcagagctcccttcggggatctcaggttcagagcatggaggtgctgccaagtgggccgcgtcggggagcccggagtgtgggttgtttctgcgggaaagagagggttttgtgaattttctcttggaatggcagcctgagcagccggtataaccatggaaggttgtcaagggaagaccagtgggaggggcaggtccagagttagaacgagcaggatggggaattgacacagagagacccagaagaggccactgcagtggatcccagaggctgcaccagagccgtggtataagagggacaatgtgatgggattctggatagacctggaagatagagccaacaggttttcctgccgtatcagatatgtctgtgagcaaaaatagggagtgaagggtcatttttttttttttgcccgaacatctgaaagaatgaagttggggaagtcagcagcatgagaagtaggtttcatggagaagatcatgggttggagtttggccagtgtgattctcaggcgtctcaagttgaaaatgtcacatgggtagggggacagaaaggtgtggagtctacagaggagaactggtgtagattcttcaaaagaatagagggtggccgggcgtggtggctcacgccggtaatcccagcactttgggaggccaaggcgagcggatcacaaggtcaggcgttcaagaccagcctgaccaacatggtgaaaccccgtctttagtaaaaatacaaaaattagccgggggtggtgacgcgcgcctgtaatcccagctattcgggaggctgaggcaggagaattgcctgaacccaggaggtggagattgcagtgagccaagatcgcgccattgcactccagcctgggcgacagagcgagattccgtgtcaaaaaaaggtgcggagcgcgggtctcttccgcggaaactgacattgcgtttccgttgtcggcctcccgctgcaggagccatatattgaagaccatgtctggaagcttctactttgtaattgttggtcaccatgataatccagtttttgaaatggagtttttgccagctgggaaggcagaatccaaagacgaccatcgtcatctgaaccagttcatagctcatgctgctctcgacctcgtagatgagaacatgtggctgtcgaacaacatgtacttgaaaactgtggacaagttcaacgagtggtttgtgtcagcatttgtcaccgcggggcatatgaggtttattatgcttcatgacataagacaagaagatggaataaagaacttctttactgatgtttatgatttatatataaaattttcaatgaatccattttatgaacccaattctcctattcgatcaagtgcatttgacagaaaagttcagtttcttgggaagaaacaccttttaagctgaatggagaaaattccaaaataaattatatcaccacaatggtgtatactcaggaa

SEQ ID NO: 191955 - DNA, 5293 bp, Homo sapiens
  Payload ID: 17926
  Gene Name: trafficking protein, kinesin binding 1
  Uniprot ID: Q9UPV9
  ENST ID: ENST00000327628
  CDS Start-End: 401-3262
gataaattcactcctcccccagttcccagcaagccctgagatgaacagcagactttttgttccactttaatttttaggcaaaaccgaatgcccatcacaaagccccgttctccttgctactccccttcccccaacctagaggtatcacatttttgggtgcgtcattttctgtttggggtggcttaacaagatgagctgatagggttcccaggctgcctggagttacataacccattgtgcttccaggacagctcacaatcttaggatttgccctaacaagcaaactcagaaaactgctgaggaaggcacgggagggtggctgtgcgaggtactgccggggctgagctctcatggaggctctctctgttctctgaagtgcctttggagtttatgtctgcacatggcattggtttttcaattcgggcagcccgtcagggctcagcctctgccaggactctgccacggcaagctcattcggacaaacgcctgtgatgtgtgcaacagcaccgatcttccggaagtcgagatcattagcctgctggaggagcagctgccccattataagttaagagccgacaccatctacggttatgaccacgacgactggctccatacacctctcatttctccagatgccaacattgacctcacaaccgagcaaattgaagagacgttaaaatacttccttttatgtgctgaaagagttggccagatgactaagacatataatgacatagatgctgtcactcggcttcttgaggagaaagagcgggatttagaattggccgctcgcatcggccagtcgttgttgaagaagaacaagaccctaaccgagaggaacgagctgctggaggagcaggtggaacacatcagggaggaggtgtctcagctccggcatgagctgtccatgaaggatgagctgcttcagttctacaccagcgctgcggaggagagtgagcccgagtccgtttgctcaaccccgttgaagaggaatgagtcgtcctcctcagtccagaattactttcatttggattctcttcaaaagaagctgaaagaccttgaagaggagaatgttgtacttcgatccgaggccagccagctgaagacagagaccatcacctatgaggagaaggagcagcagctggtcaatgactgcgtgaaggagctgagggatgccaatgtccagattgctagtatctcagaggaactggccaagaagacggaagatgctgcccgccagcaagaggagatcacacacctgctatcgcaaatagttgatttgcagaaaaaggcaaaagcttgcgcagtggaaaatgaagaacttgtccagcatctgggggctgctaaggatgcccagcggcagctcacagccgagctgcgtgagctggaggacaagtacgcagagtgcatggagatgctgcatgaggcgcaggaggagctgaagaacctccggaacaaaaccatgcccaataccacgtctcggcgctaccactcactgggcctgtttcccatggattccttggcagcagagattgagggaacgatgcgcaaggagctgcagttggaagaggccgagtctccagacatcactcaccagaagcgtgtctttgagacagtaagaaacatcaaccaggttgtcaagcagagatctctgaccccttctcccatgaacatccccggctccaaccagtcctcggccatgaactccctcctgtccagctgcgtcagcaccccccggtccagcttctacggcagcgacataggcaacgtcgtcctcgacaacaagaccaacagcatcattctggaaacagaggcagccgacctgggaaacgatgagcggagtaagaagccggggacgccgggcaccccaggctcccacgacctggagacggcgctgaggcggctgtccctgcgccgggagaactacctctcggagaggaggttctttgaggaggagcaagagaggaagctccaggagctggcggagaagggcgagctgcgcagcggctccctcacacccactgagagcatcatgtccctgggcacgcactcccgcttctccgagttcaccggcttctctggcatgtccttcagcagccgctcctacctgcctgagaagctccagatcgtgaagccgctggaaggttccgccacacttcaccactggcagcagttggcccaacctcaccttgggggcatcctggacccccggcccggtgtggtcaccaagggcttccggacgctggatgttgacctggacgaagtgtactgccttaacgactttgaagaagatgacacaggtgaccacatttctctcccacgcctagctacctccactccagttcagcacccagagacctcagcgcaccatcctgggaagtgcatgtctcagaccaactccaccttcaccttcaccacctgtcgcatcctgcatccttcagatgagctcactcgggtcacaccaagccttaactcagccccaactccagcttgtggcagcaccagccacttgaaatccacgccggtggccacaccatgcactccacggagactgagcctggctgagtccttcactaacacccgtgagtccacgaccaccatgagcacatccctggggctcgtgtggctgttgaaggagcggggcatttctgctgccgtgtacgacccccagagctgggacagggccggccggggctccctcctgcactcctacacgcccaagatggctgtgatcccctctactccgccgaactcgcctatgcagacacccacatcctccccaccctcctttgagttcaagtgcacgagccctccctacgacaatttcctggcttccaagccagccagctccatcctgagggaagtgagagaaaagaacgtccgcagcagcgagagccagaccgacgtgtccgtctccaacctcaacctcgtggacaaagtcaggaggtttggggtggccaaagtggtgaactcagggcgagcccatgtccccaccttgactgaggagcagggacccctcctctgtgggcccccggggccagcaccagcccttgttcccagaggcctggtacctgagggcctgcccctcagatgccccactgtcaccagtgccatcggtgggctgcagctcaatagtggcatccggcggaatcgcagcttccccaccatggtgggatctagcatgcagatgaaagctcctgtgactctcacctcgggcatcttgatgggtgctaagctctccaaacaaactagcttacggtgaggactggaggggggccggttgccctagaggagacccacgttctcctctcttgctcccacctccctctcttccccccacagtgcactccctccctctgcccttctctgtccaccccctcctaagctagacaaatcaacctcgtgcctaatggaggaagtgtggaaactttgtaaaatgtgtacataggacttggagaccttgtgtccgccctgctctttcttccgatcccacaggaagtgcccctgcactgtcatcactctcacgaggacgtcacctgtgctaacctgggggaaggtggggtcctttcttctttccttttgagaagcactgaaactcccaagtgtgttcttatcccatggataggaaaccagtgaattccgtggctggcacaccacgagctgtcacgcggcacgggtcataacacatctgggtgtcatcggacacctcacctcgcccaccctgtaggagcgtaaggagcctccatcctcagccacgtgcagctgacgtggctttcctgatcggagggcttttcttttatgggtggcccagcttcttcaagaccttcactgctctgcctcagtggacagtcgtttcttttttgaggtgtgaccttttgttttcatgccttccccttgaagtcatcctgtgttttgtaatcagctgtcaggccaaatgtctgacccgaaagagaatgtatttacactcatgctgcgttgttcagcagcccctctgtgttctgtgtgatttgttttatttttccttttttttacatatatatgcagggaagtaatggtactggtagtgtatgttttctatgtggttcaaatatgaatttcgaacacaccaagccgctaatgagatagcagcttttttctgggacccagagtcacaaccaaattgatttaagaccggacccaagacacctttaacaataggactgaaaggaaaaaggatagggaaaaagcttattaaagaaatgtgtcaacaccaaatgtagaggggaagaaccacaaccaggcataataccaaaccggttccagggggaaacaaggctttggtattccgctggctccagcgctttttctgaaacccgaggctggccagggtgctgtcaccatgcggtctttgattgcagccattcaatgcccacatgcttttccttcttgtttcagaacagcacatggtcacaacaagatattttctttccctccaaagccttttgtctccttgtgcctctttttatccttaggaaaagatccaggtgcttgtgaaaagaatcatgaatgcaacaagggaggctggtcctgttgctgtcgccgattaagttttaaacttttatttattatttatgtctgccgtattttaaataaacattctcgttccttccagtttcagtcatagtgtgtctgtggcattccagtccaaccatgtgacttatttattctaatttgagggctgcactgtacaccatggtgtcctgtgacaccgtgttccagacatttatggaaggaaaacatcccatataaatgaaactgtcatgctgtgtcctccccggcagcagaagatgtgtccttccattgagtgagggtaaccttatgtccaccaaggatactttgagaaagcccctaaggaacaagcctcagtcccacggtttcagactatttattctctgaacacaagagtattggttaattatgttctcagctctccctgctgttgtatgtgtgcattcactgcaagtaacttatatctttttatttgaatgtattttaaagcagtagatagaataacaaaggaatatgaaaaccatggactgaatggaccattttatgtattcagagagagaagccactcatcattgccagaaataccatgtaaaaattggcagttcagaggttgcaatacttagtatagtaaataaataaacggtcaacattgtgcaaccactaccaaaaagtgtgttgtaatgcatcaaaaatcaacacaattttattcactaatgagtatcaataaaataagttcaaatgatgg

SEQ ID NO: 191956 - DNA, 4620 bp, Homo sapiens
  Payload ID: 17926
  Gene Name: trafficking protein, kinesin binding 1
  Uniprot ID: Q9UPV9
  ENST ID: ENST00000341421
  CDS Start-End: 194-2254
gggtgatgctgggccaggagctttgtgtacacccctccacttcagctgagccagggcatgtctgcggcccaggccagggcgcagtgtgtgccctgggggcccaggcctgcatggctcctctgggtagggggtcgggggcacccccaaggatggtcccttagggtgatgttttggctttggggtgacttcagcaatgtccctgcgagacaagggcggggaagaagaatgttttgaatacgactgccaggatgaagagaggaagccaacccacaggcagcatgacacccaggacctcttggaagaggttttatgtgctgaaagagttggccagatgactaagacatataatgacatagatgctgtcactcggcttcttgaggagaaagagcgggatttagaattggccgctcgcatcggccagtcgttgttgaagaagaacaagaccctaaccgagaggaacgagctgctggaggagcaggtggaacacatcagggaggaggtgtctcagctccggcatgagctgtccatgaaggatgagctgcttcagttctacaccagcgctgcggaggagagtgagcccgagtccgtttgctcaaccccgttgaagaggaatgagtcgtcctcctcagtccagaattactttcatttggattctcttcaaaagaagctgaaagaccttgaagaggagaatgttgtacttcgatccgaggccagccagctgaagacagagaccatcacctatgaggagaaggagcagcagctggtcaatgactgcgtgaaggagctgagggatgccaatgtccagattgctagtatctcagaggaactggccaagaagacggaagatgctgcccgccagcaagaggagatcacacacctgctatcgcaaatagttgatttgcagaaaaaggcaaaagcttgcgcagtggaaaatgaagaacttgtccagcatctgggggctgctaaggatgcccagcggcagctcacagccgagctgcgtgagctggaggacaagtacgcagagtgcatggagatgctgcatgaggcgcaggaggagctgaagaacctccggaacaaaaccatgcccaataccacgtctcggcgctaccactcactgggcctgtttcccatggattccttggcagcagagattgagggaacgatgcgcaaggagctgcagttggaagaggccgagtctccagacatcactcaccagaagcgtgtctttgagacagtaagaaacatcaaccaggttgtcaagcagagatctctgaccccttctcccatgaacatccccggctccaaccagtcctcggccatgaactccctcctgtccagctgcgtcagcaccccccggtccagcttctacggcagcgacataggcaacgtcgtcctcgacaacaagaccaacagcatcattctggaaacagaggcagccgacctgggaaacgatgagcggagtaagaagccggggacgccgggcaccccaggctcccacgacctggagacggcgctgaggcggctgtccctgcgccgggagaactacctctcggagaggaggttctttgaggaggagcaagagaggaagctccaggagctggcggagaagggcgagctgcgcagcggctccctcacacccactgagagcatcatgtccctgggcacgcactcccgcttctccgagttcaccggcttctctggcatgtccttcagcagccgctcctacctgcctgagaagctccagatcgtgaagccgctggaaggttccgccacacttcaccactggcagcagttggcccaacctcaccttgggggcatcctggacccccggcccggtgtggtcaccaagggcttccggacgctggatgttgacctggacgaagtgtactgccttaacgactttgaagaagatgacacaggtgaccacatttctctcccacgcctagctacctccactccagttcagcacccagagacctcaggtgagaggtcccaagcacgtgtgactgtctcaggcagcagaagttacccgagccggcctcaggcttccccagaggagatgcaggagccgccagcggccacggaggaggaggaggaggaggaggaggaggaggggtctggtgagggcaccacgataagtcctgtaaacttggcacctttcccggaggcagagttttgggccattctcacctctgttccaggcaccatccgtagtggttctctgtctgtagcttccgctcgtctgtgtgggtgatgattaaagcattctcattgcacagttctgtttttaaatacagagtctgatgcctcctatttgtaacaatgggtgtagctcccctgcccatcttggaggtgcatggcccatcagggatctttaaagtgggagcaggaaaggctgctaaaaaaaaaaaaaaaaaaaaaagtgggcttttgggtccctgaaaacatcagtgcccttcttcctggtctgggtgtctccctgagtctaaggggaagattctcaagtcccctggtgatttccaagtggagctgagcagttttagggaaattgagtgctgggtcattcagaaggtaaatgagatcatctgttacctgtacgctgtattaaaatagaaccaggaaaggctcaggatttcagacatttcatcagccttttcactttcccagcttcaatggaggtatatatgtcattttcttttcagcttacacatgtgttcaaagtggatttttaaaaagtgttttagcaatactccttaaccaaataaaccttcggagaacgtcactaagcttttccagagagaagaccctagatgaagttggaaaagagctctggctgactccacccactgtccccaagcattaaaggtgtggccatgagtttacagaattacccacattccagttgccactgggatgaaaagctttgtgctcagagctctgggaatcatgggatcacatggttactgtttaccccaacagcatgctctgtctagactggacctcccagccccttgtgttgggaaggcaaagcttttgtggagtcaggggggagactgagaaaaaatgaattaaccctgtgttgtcatcctcatgacattcctgaggattcaccaggttagaagtgaggacgtttatctttgtgattcataattttcatttgtgaaggccacaacactccccttgaaatacagggcaggaaagagctgaggttcttggtggtgtctcccattcccctggctaatttcagacagctgtggtcaagggattttacttgggatcaacttttccttttttccttgacattaattttagagaagtcatcaagtcatgtgatttgtttagcacataggtttatttatggtttgattttttttaggcagttatattactagattaagcttgtgagggaatgaaaatgttttttatttgttatctacacactcgaaaaagagaaaccagctgcggtactgtcccatttttgtcatcagcaccagtgtccgtcaggaaggcaggtggtggtgcagaaacatgatgcctggctgattttcgtggctaaaggggtaggccttatgttgattgggatgctcccctacagccttacaggtagaatagaaggtgagttctggaagtgcaaagaagcaccattaagtgcatcttctagaagttgtacagaaggactaaagcttatcaagtcaacaaagaacttaccttggaggatagagagagagaagggaccaattatgaggactgacatcctggccactctccttaaaataaacactgacatttttcttgcttgttctctctgtactcaaacctgtggcaaattcatcctagcaacgttatttgacgaggggcatgaacatttatagttgaaactgtagaaagggtcaggttggaggtgtgtaataaaaaagaattacctaggttgccaaaggtaatttaggaagggtctgatcatttagatgagagttctttggggcttattttctgggtaaggctcatctttaaaaactggcttcagaggggagaggggagaacaatgaattggctctattttctctattgggaattacaggaccattttgattcttagaatgtaaaaagcatatcgctaagtaaatcatcctggaggtcccaagtagctctatgcctgcaatcatggagacacaggcagacagataagcttcatggggaaggcatggggcatcctctgtcttgggatttgtatccatggtggtctggtccctgccttttaatccgtcctctacgcttgggcttttctgttaccaaacagcactatcccaggaactattgtctgcctgggaacactcagtagggagacactttggagacaggaggtgatgaacctttttatgtgcagctggtatgatagaaggaaattgggaaaacttgtatgctaggcacttttgtccagagcctgctgtcccatggagaaaaagttttaagcactgaaaaaatttgattaatgtatttaaatgtattatttgaagcatcattcacttgttgatttttacaatcccatgtcttaaaaaggatgaatccatgttattgtattgtaaataatttagatgattaaaatggattgtttaaaaagtt

SEQ ID NO: 191957 - DNA, 5033 bp, Homo sapiens
  Payload ID: 17926
  Gene Name: trafficking protein, kinesin binding 1
  ENST ID: ENST00000396175
  CDS Start-End: 194-2881
gggtgatgctgggccaggagctttgtgtacacccctccacttcagctgagccagggcatgtctgcggcccaggccagggcgcagtgtgtgccctgggggcccaggcctgcatggctcctctgggtagggggtcgggggcacccccaaggatggtcccttagggtgatgttttggctttggggtgacttcagcaatgtccctgcgagacaagggcggggaagaagaatgttttgaatacgactgccaggatgaagagaggaagccaacccacaggcagcatgacacccaggacctcttggaagaggttttatgtgctgaaagagttggccagatgactaagacatataatgacatagatgctgtcactcggcttcttgaggagaaagagcgggatttagaattggccgctcgcatcggccagtcgttgttgaagaagaacaagaccctaaccgagaggaacgagctgctggaggagcaggtggaacacatcagggaggaggtgtctcagctccggcatgagctgtccatgaaggatgagctgcttcagttctacaccagcgctgcggaggagagtgagcccgagtccgtttgctcaaccccgttgaagaggaatgagtcgtcctcctcagtccagaattactttcatttggattctcttcaaaagaagctgaaagaccttgaagaggagaatgttgtacttcgatccgaggccagccagctgaagacagagaccatcacctatgaggagaaggagcagcagctggtcaatgactgcgtgaaggagctgagggatgccaatgtccagattgctagtatctcagaggaactggccaagaagacggaagatgctgcccgccagcaagaggagatcacacacctgctatcgcaaatagttgatttgcagaaaaaggcaaaagcttgcgcagtggaaaatgaagaacttgtccagcatctgggggctgctaaggatgcccagcggcagctcacagccgagctgcgtgagctggaggacaagtacgcagagtgcatggagatgctgcatgaggcgcaggaggagctgaagaacctccggaacaaaaccatgcccaataccacgtctcggcgctaccactcactgggcctgtttcccatggattccttggcagcagagattgagggaacgatgcgcaaggagctgcagttggaagaggccgagtctccagacatcactcaccagaagcgtgtctttgagacagtaagaaacatcaaccaggttgtcaagcagagatctctgaccccttctcccatgaacatccccggctccaaccagtcctcggccatgaactccctcctgtccagctgcgtcagcaccccccggtccagcttctacggcagcgacataggcaacgtcgtcctcgacaacaagaccaacagcatcattctggaaacagaggcagccgacctgggaaacgatgagcggagtaagaagccggggacgccgggcaccccaggctcccacgacctggagacggcgctgaggcggctgtccctgcgccgggagaactacctctcggagaggaggttctttgaggaggagcaagagaggaagctccaggagctggcggagaagggcgagctgcgcagcggctccctcacacccactgagagcatcatgtccctgggcacgcactcccgcttctccgagttcaccggcttctctggcatgtccttcagcagccgctcctacctgcctgagaagctccagatcgtgaagccgctggaaggttccgccacacttcaccactggcagcagttggcccaacctcaccttgggggcatcctggacccccggcccggtgtggtcaccaagggcttccggacgctggatgttgacctggacgaagtgtactgccttaacgactttgaagaagatgacacaggtgaccacatttctctcccacgcctagctacctccactccagttcagcacccagagacctcagcgcaccatcctgggaagtgcatgtctcagaccaactccaccttcaccttcaccacctgtcgcatcctgcatccttcagatgagctcactcgggtcacaccaagccttaactcagccccaactccagcttgtggcagcaccagccacttgaaatccacgccggtggccacaccatgcactccacggagactgagcctggctgagtccttcactaacacccgtgagtccacgaccaccatgagcacatccctggggctcgtgtggctgttgaaggagcggggcatttctgctgccgtgtacgacccccagagctgggacagggccggccggggctccctcctgcactcctacacgcccaagatggctgtgatcccctctactccgccgaactcgcctatgcagacacccacatcctccccaccctcctttgagttcaagtgcacgagccctccctacgacaatttcctggcttccaagccagccagctccatcctgagggaagtgagagaaaagaacgtccgcagcagcgagagccagaccgacgtgtccgtctccaacctcaacctcgtggacaaagtcaggaggtttggggtggccaaagtggtgaactcagggcgagcccatgtccccaccttgactgaggagcagggacccctcctctgtgggcccccggggccagcaccagcccttgttcccagaggcctggtacctgagggcctgcccctcagatgccccactgtcaccagtgccatcggtgggctgcagctcaatagtggcatccggcggaatcgcagcttccccaccatggtgggatctagcatgcagatgaaagctcctgtgactctcacctcgggcatcttgatgggtgctaagctctccaaacaaactagcttacggtgaggactggaggggggccggttgccctagaggagacccacgttctcctctcttgctcccacctccctctcttccccccacagtgcactccctccctctgcccttctctgtccaccccctcctaagctagacaaatcaacctcgtgcctaatggaggaagtgtggaaactttgtaaaatgtgtacataggacttggagaccttgtgtccgccctgctctttcttccgatcccacaggaagtgcccctgcactgtcatcactctcacgaggacgtcacctgtgctaacctgggggaaggtggggtcctttcttctttccttttgagaagcactgaaactcccaagtgtgttcttatcccatggataggaaaccagtgaattccgtggctggcacaccacgagctgtcacgcggcacgggtcataacacatctgggtgtcatcggacacctcacctcgcccaccctgtaggagcgtaaggagcctccatcctcagccacgtgcagctgacgtggctttcctgatcggagggcttttcttttatgggtggcccagcttcttcaagaccttcactgctctgcctcagtggacagtcgtttcttttttgaggtgtgaccttttgttttcatgccttccccttgaagtcatcctgtgttttgtaatcagctgtcaggccaaatgtctgacccgaaagagaatgtatttacactcatgctgcgttgttcagcagcccctctgtgttctgtgtgatttgttttatttttccttttttttacatatatatgcagggaagtaatggtactggtagtgtatgttttctatgtggttcaaatatgaatttcgaacacaccaagccgctaatgagatagcagcttttttctgggacccagagtcacaaccaaattgatttaagaccggacccaagacacctttaacaataggactgaaaggaaaaaggatagggaaaaagcttattaaagaaatgtgtcaacaccaaatgtagaggggaagaaccacaaccaggcataataccaaaccggttccagggggaaacaaggctttggtattccgctggctccagcgctttttctgaaacccgaggctggccagggtgctgtcaccatgcggtctttgattgcagccattcaatgcccacatgcttttccttcttgtttcagaacagcacatggtcacaacaagatattttctttccctccaaagccttttgtctccttgtgcctctttttatccttaggaaaagatccaggtgcttgtgaaaagaatcatgaatgcaacaagggaggctggtcctgttgctgtcgccgattaagttttaaacttttatttattatttatgtctgccgtattttaaataaacattctcgttccttccagtttcagtcatagtgtgtctgtggcattccagtccaaccatgtgacttatttattctaatttgagggctgcactgtacaccatggtgtcctgtgacaccgtgttccagacatttatggaaggaaaacatcccatataaatgaaactgtcatgctgtgtcctccccggcagcagaagatgtgtccttccattgagtgagggtaaccttatgtccaccaaggatactttgagaaagcccctaaggaacaagcctcagtcccacggtttcagactatttattctctgaacacaagagtattggttaattatgttctcagctctccctgctgttgtatgtgtgcattcactgcaagtaacttatatctttttatttgaatgtattttaaagcagtagatagaataacaaaggaatatgaaaaccatggactgaatggaccattttatgtattcagagagagaagccactcatcattgccagaaataccatgtaaaaattggcagttcagaggttgcaatacttagtatagtaaataaataaacggtcaacattgtgcaaccactaccaaaaagtgtgttgtaatgcatcaaaaatcaacacaattttattcactaatgagtatcaataaaataagttcaaatgatggaaaccacactggtattctgatttgtattttgtttttatcttttcatcaaggagacgatctctttatgtaagacttgaaagtgtttagctctttgcaaaattaaatgaaaggcatatacttc

SEQ ID NO: 191958 - DNA, 489 bp, Homo sapiens
  Payload ID: 17926
  Gene Name: trafficking protein, kinesin binding 1
  ENST ID: ENST00000418790
  CDS Start-End: 178-312
attgcccactttactgttttggctccagactgtcgttaagaatgtacagcctaattctggtgtgtttcgggatattcttctgtccagtattctggaagggcggggaggcatggcagcgttttacttgacgttgatggtgctgtgaagtccattctttcctctgcaagactactgactatgcagaaatttatcgaagcggattattatgaactagactggtattatgaagaatgctcggatgcacttcctcagttgagtcttttggccctgagagaccctgatctgtcttcctctaagagcaaaggaaaatagaagaggagatggctcaactgttcaaggttttatgtgctgaaagagttggccagatgactaagacatataatgacatagatgctgtcactcggcttcttgaggagaaagagcgggatttagaattggccgctcgcatcggccagtcgttgttgaagaagaacaagaccctaaccgaga

SEQ ID NO: 191959 - DNA, 3260 bp, Homo sapiens
  Payload ID: 17926
  Gene Name: trafficking protein, kinesin binding 1
  Uniprot ID: Q9UPV9
  ENST ID: ENST00000449246
  CDS Start-End: 302-1972
attcagggctgctgtccagtgctgctttattggcagtgctgccagggtctccgttagctctctgcaaattgccttcctttctgctcctcctactccctccttcccccatagaatttttcttttcattgcccactttactgttttggctccagactgtcgttaagaatgtacagcctaattctggtgtgtttcgggatattcttctgtccagtattctggaagggcggggaggcatggcagcgttttacttgacgttgatggtgctgtgaagtccattctttcctctgcaagactactgactatgcagaaatttatcgaagcggattattatgaactagactggtattatgaagaatgctcggatgttttatgtgctgaaagagttggccagatgactaagacatataatgacatagatgctgtcactcggcttcttgaggagaaagagcgggatttagaattggccgctcgcatcggccagtcgttgttgaagaagaacaagaccctaaccgagaggaacgagctgctggaggagcaggtggaacacatcagggaggaggtgtctcagctccggcatgagctgtccatgaaggatgagctgcttcagttctacaccagcgctgcggaggagagtgagcccgagtccgtttgctcaaccccgttgaagaggaatgagtcgtcctcctcagtccagaattactttcatttggattctcttcaaaagaagctgaaagaccttgaagaggagaatgttgtacttcgatccgaggccagccagctgaagacagagaccatcacctatgaggagaaggagcagcagctggtcaatgactgcgtgaaggagctgagggatgccaatgtccagattgctagtatctcagaggaactggccaagaagacggaagatgctgcccgccagcaagaggagatcacacacctgctatcgcaaatagttgatttgcagaaaaaggcaaaagcttgcgcagtggaaaatgaagaacttgtccagcatctgggggctgctaaggatgcccagcggcagctcacagccgagctgcgtgagctggaggacaagtacgcagagtgcatggagatgctgcatgaggcgcaggaggagctgaagaacctccggaacaaaaccatgcccaataccacgtctcggcgctaccactcactgggcctgtttcccatggattccttggcagcagagattgagggaacgatgcgcaaggagctgcagttggaagaggccgagtctccagacatcactcaccagaagcgtgtctttgagacagtaagaaacatcaaccaggttgtcaagcagagatctctgaccccttctcccatgaacatccccggctccaaccagtcctcggccatgaactccctcctgtccagctgcgtcagcaccccccggtccagcttctacggcagcgacataggcaacgtcgtcctcgacaacaagaccaacagcatcattctggaaacagaggcagccgacctgggaaacgatgagcggagtaagaagccggggacgccgggcaccccaggctcccacgacctggagacggcgctgaggcggctgtccctgcgccgggagaactacctctcggagaggaggttctttgaggaggagcaagagaggaagctccaggagctggcggagaagggcgagctgcgcagcggctccctcacacccactgagagcatcatgtccctgggcacgcactcccgcttctccgagttcaccggcttctctggcatgtccttcagcagccgctcctacctgcctgagaagctccagatcgtgaagccgctggaaggtgatcacgcggggcctcggcccctctctgtcctcctgggggactccctttggtccctgatccacctgcggaaggcggggcacctctgtcacgcctactcctttttcttccgcgacagccacccgcgctgctggtttgagttcctctgagggtggtgctcagcctaggcctccgtccctcccctctggctggcaggtgtgacaatgcacacataggccatgaaactcgccgaggaaagacaagcatgtgcactgtggtcttctagttctttcctttgcctttagaaccttagaaataaaaacttttgtggcggtagaggcactgctaactgattcaaaaattaattaggttttgcctgtgggtgtgaggaatgcagaaaattaatgctttagcttttctgcagttttggtgtcggggagaggttccaagcaaactctattaaatggggatttttttttccccataaccacctgaatgtgatttgtgggcttatgtgttctgatttgaacttcatatagcaaggttgtggcttttggcagatgcagtatgttctgagcgcggctcctagagtctacaatttggagtccaggaaggggtggctgtggagacaagtgagttttgtacctccgtaagccaccctttttcagggtcagttcatgtgttagtatcaggggcatctcagatgattaaactcatgggaaaaacttcctccttccctctctccctcttgccctcctgcctctttttttttttttttttttttaatttaggcacttataaaatgttttccctctacctgctgctactctgccaagagccaccaagtgcttatatttttcattttttactcctttagtttggaaagccatatacgtttgagaaggtgttttaaaactctgtgttacacttacgatgcaaagccaaatcagaacttctgtaaggcagaactttcccaactttaaaaaaattattgtcccctctaaggagccttcttagacgttttttcctaatcaccccccaaagacattttaataccacatatatattgtttatgtactatatgtatatacataaacaatacataagcaatacatctgtggtattaaaattaaaaagaatccaattatgtttacctcaaaagaacctgtttttgcttcttgggagcaatattgcccctgtgagactgcatgctataaggtaaggttgtgcttgttaaagacccaagacatgactgggttccacagtctccaaaggaagagggtgggctagtttgtttttattattattttaaaattgtataattggggtctttcttagagttcagaaaaggtatagcttactcttttttaattgtttatttagttgtaagcttggtgattgttttctgatccacattgtgtgtgttcttcaataaaatctttcatttctgcaatttta

SEQ ID NO: 191960 - DNA, 900 bp, Homo sapiens
  Payload ID: 17926
  Gene Name: trafficking protein, kinesin binding 1
  ENST ID: ENST00000427771
  CDS Start-End: 1-900
gatgccaatgtccagattgctagtatctcagaggaactggccaagaagacggaagatgctgcccgccagcaagaggagatcacacacctgctatcgcaaatagttgatttgcagaaaaaggcaaaagctctgcgtgagctggaggacaagtacgcagagtgcatggagatgctgcatgaggcgcaggaggagctgaagaacctccggaacaaaaccatgcccaataccacgtctcggcgctaccactcactgggcctgtttcccatggattccttggcagcagagattgagggaacgatgcgcaaggagctgcagttggaagaggccgagtctccagacatcactcaccagaagcgtgtctttgagacagtaagaaacatcaaccaggttgtcaagcagagatctctgaccccttctcccatgaacatccccggctccaaccagtcctcggccatgaactccctcctgtccagctgcgtcagcaccccccggtccagcttctacggcagcgacataggcaacgtcgtcctcgacaacaagaccaacagcatcattctggaaacagaggcagccgacctgggaaacgatgagcggagtaagaagccggggacgccgggcaccccaggctcccacgacctggagacggcgctgaggcggctgtccctgcgccgggagaactacctctcggagaggaggttctttgaggaggagcaagagaggaagctccaggagctggcggagaagggcgagctgcgcagcggctccctcacacccactgagagcatcatgtccctgggcacgcactcccgcttctccgagttcaccggcttctctggcatgtccttcagcagccgctcctacctgcctgagaagctccagatcgtgaagccgctggaaggt

SEQ ID NO: 191961 - DNA, 4672 bp, Homo sapiens
  Payload ID: 17926
  Gene Name: trafficking protein, kinesin binding 1
  ENST ID: ENST00000613405
  CDS Start-End: 302-2314
attcagggctgctgtccagtgctgctttattggcagtgctgccagggtctccgttagctctctgcaaattgccttcctttctgctcctcctactccctccttcccccatagaatttttcttttcattgcccactttactgttttggctccagactgtcgttaagaatgtacagcctaattctggtgtgtttcgggatattcttctgtccagtattctggaagggcggggaggcatggcagcgttttacttgacgttgatggtgctgtgaagtccattctttcctctgcaagactactgactatgcagaaatttatcgaagcggattattatgaactagactggtattatgaagaatgctcggatgttttatgtgctgaaagagttggccagatgactaagacatataatgacatagatgctgtcactcggcttcttgaggagaaagagcgggatttagaattggccgctcgcatcggccagtcgttgttgaagaagaacaagaccctaaccgagaggaacgagctgctggaggagcaggtggaacacatcagggaggaggtgtctcagctccggcatgagctgtccatgaaggatgagctgcttcagttctacaccagcgctgcggaggagagtgagcccgagtccgtttgctcaaccccgttgaagaggaatgagtcgtcctcctcagtccagaattactttcatttggattctcttcaaaagaagctgaaagaccttgaagaggagaatgttgtacttcgatccgaggccagccagctgaagacagagaccatcacctatgaggagaaggagcagcagctggtcaatgactgcgtgaaggagctgagggatgccaatgtccagattgctagtatctcagaggaactggccaagaagacggaagatgctgcccgccagcaagaggagatcacacacctgctatcgcaaatagttgatttgcagaaaaaggcaaaagcttgcgcagtggaaaatgaagaacttgtccagcatctgggggctgctaaggatgcccagcggcagctcacagccgagctgcgtgagctggaggacaagtacgcagagtgcatggagatgctgcatgaggcgcaggaggagctgaagaacctccggaacaaaaccatgcccaataccacgtctcggcgctaccactcactgggcctgtttcccatggattccttggcagcagagattgagggaacgatgcgcaaggagctgcagttggaagaggccgagtctccagacatcactcaccagaagcgtgtctttgagacagtaagaaacatcaaccaggttgtcaagcagagatctctgaccccttctcccatgaacatccccggctccaaccagtcctcggccatgaactccctcctgtccagctgcgtcagcaccccccggtccagcttctacggcagcgacataggcaacgtcgtcctcgacaacaagaccaacagcatcattctggaaacagaggcagccgacctgggaaacgatgagcggagtaagaagccggggacgccgggcaccccaggctcccacgacctggagacggcgctgaggcggctgtccctgcgccgggagaactacctctcggagaggaggttctttgaggaggagcaagagaggaagctccaggagctggcggagaagggcgagctgcgcagcggctccctcacacccactgagagcatcatgtccctgggcacgcactcccgcttctccgagttcaccggcttctctggcatgtccttcagcagccgctcctacctgcctgagaagctccagatcgtgaagccgctggaaggttccgccacacttcaccactggcagcagttggcccaacctcaccttgggggcatcctggacccccggcccggtgtggtcaccaagggcttccggacgctggatgttgacctggacgaagtgtactgccttaacgactttgaagaagatgacacaggtgaccacatttctctcccacgcctagctacctccactccagttcagcacccagagacctcaggtgagaggtcccaagcacgtgtgactgtctcaggcagcagaagttacccgagccggcctcaggcttccccagaggagatgcaggagccgccagcggccacggaggaggaggaggaggaggaggaggaggaggggtctggtgagggcaccacgataagtcctgtaaacttggcacctttcccggaggcagagttttgggccattctcacctctgttccaggcaccatccgtagtggttctctgtctgtagcttccgctcgtctgtgtgggtgatgattaaagcattctcattgcacagttctgtttttaaatacagagtctgatgcctcctatttgtaacaatgggtgtagctcccctgcccatcttggaggtgcatggcccatcagggatctttaaagtgggagcaggaaaggctgctaaaaaaaaaaaaaaaaaaaaaagtgggcttttgggtccctgaaaacatcagtgcccttcttcctggtctgggtgtctccctgagtctaaggggaagattctcaagtcccctggtgatttccaagtggagctgagcagttttagggaaattgagtgctgggtcattcagaaggtaaatgagatcatctgttacctgtacgctgtattaaaatagaaccaggaaaggctcaggatttcagacatttcatcagccttttcactttcccagcttcaatggaggtatatatgtcattttcttttcagcttacacatgtgttcaaagtggatttttaaaaagtgttttagcaatactccttaaccaaataaaccttcggagaacgtcactaagcttttccagagagaagaccctagatgaagttggaaaagagctctggctgactccacccactgtccccaagcattaaaggtgtggccatgagtttacagaattacccacattccagttgccactgggatgaaaagctttgtgctcagagctctgggaatcatgggatcacatggttactgtttaccccaacagcatgctctgtctagactggacctcccagccccttgtgttgggaaggcaaagcttttgtggagtcaggggggagactgagaaaaaatgaattaaccctgtgttgtcatcctcatgacattcctgaggattcaccaggttagaagtgaggacgtttatctttgtgattcataattttcatttgtgaaggccacaacactccccttgaaatacagggcaggaaagagctgaggttcttggtggtgtctcccattcccctggctaatttcagacagctgtggtcaagggattttacttgggatcaacttttccttttttccttgacattaattttagagaagtcatcaagtcatgtgatttgtttagcacataggtttatttatggtttgattttttttaggcagttatattactagattaagcttgtgagggaatgaaaatgttttttatttgttatctacacactcgaaaaagagaaaccagctgcggtactgtcccatttttgtcatcagcaccagtgtccgtcaggaaggcaggtggtggtgcagaaacatgatgcctggctgattttcgtggctaaaggggtaggccttatgttgattgggatgctcccctacagccttacaggtagaatagaaggtgagttctggaagtgcaaagaagcaccattaagtgcatcttctagaagttgtacagaaggactaaagcttatcaagtcaacaaagaacttaccttggaggatagagagagagaagggaccaattatgaggactgacatcctggccactctccttaaaataaacactgacatttttcttgcttgttctctctgtactcaaacctgtggcaaattcatcctagcaacgttatttgacgaggggcatgaacatttatagttgaaactgtagaaagggtcaggttggaggtgtgtaataaaaaagaattacctaggttgccaaaggtaatttaggaagggtctgatcatttagatgagagttctttggggcttattttctgggtaaggctcatctttaaaaactggcttcagaggggagaggggagaacaatgaattggctctattttctctattgggaattacaggaccattttgattcttagaatgtaaaaagcatatcgctaagtaaatcatcctggaggtcccaagtagctctatgcctgcaatcatggagacacaggcagacagataagcttcatggggaaggcatggggcatcctctgtcttgggatttgtatccatggtggtctggtccctgccttttaatccgtcctctacgcttgggcttttctgttaccaaacagcactatcccaggaactattgtctgcctgggaacactcagtagggagacactttggagacaggaggtgatgaacctttttatgtgcagctggtatgatagaaggaaattgggaaaacttgtatgctaggcacttttgtccagagcctgctgtcccatggagaaaaagttttaagcactgaaaaaatttgattaatgtatttaaatgtattatttgaagcatcattcacttgttgatttttacaatcccatgtcttaaaaaggatgaatccatgttattgtattgtaaataatttagatgattaaaatggattgttt

SEQ ID NO: 191962 - DNA, 5536 bp, Homo sapiens
  Payload ID: 17926
  Gene Name: trafficking protein, kinesin binding 1
  ENST ID: ENST00000487159
  CDS Start-End: 835-3384
agagtggggccgcgcgcgggagagccggagcgcagccttagcgtccccgagagtctcgaacgccccgacgacccccgcgtctcggaaccccggactccgagcccaggagcgccagagcggcaggcgggcagcaggaggcggcggcgccagagcggagcccccgcgagtgcccccgtgccgcccggccggctgcagcggagggaaccgaagccgccgggcggccggggccgggccgagaacgacgcggaggaagcccccaccgaggccccccggcaccgcgcctgctgccgggttgcgctccgtgcacctcttgcggattccctataaggagcccctgctggtgcaccagaactaccgggggccatctgcccaactgccccagactctggcagtggggcccccgatggcagtgggcacctccccgtgaaacctgccaagctggacgccacagctctgcacgacgacactttggccaactccgtgcccccttcggaggcatgcaaccatgcagtcctagcctgcagcctgggcatccctgaggaacactacataagcgaggctgtggaagatgctcccagctacagagggtaccgggatgcctgcaccattactgatgtgtgcaacagcaccgatcttccggaagtcgagatcattagcctgctggaggagcagctgccccattataagttaagagccgacaccatctacggttatgaccacgacgactggctccatacacctctcatttctccagatgccaacattgacctcacaaccgagcaaattgaagagacgttaaaatacttccttttatgtgctgaaagagttggccagatgactaagacatataatgacatagatgctgtcactcggcttcttgaggagaaagagcgggatttagaattggccgctcgcatcggccagtcgttgttgaagaagaacaagaccctaaccgagaggaacgagctgctggaggagcaggtggaacacatcagggaggaggtgtctcagctccggcatgagctgtccatgaaggatgagctgcttcagttctacaccagcgctgcggaggagagtgagcccgagtccgtttgctcaaccccgttgaagaggaatgagtcgtcctcctcagtccagaattactttcatttggattctcttcaaaagaagctgaaagaccttgaagaggagaatgttgtacttcgatccgaggccagccagctgaagacagagaccatcacctatgaggagaaggagcagcagctggtcaatgactgcgtgaaggagctgagggatgccaatgtccagattgctagtatctcagaggaactggccaagaagacggaagatgctgcccgccagcaagaggagatcacacacctgctatcgcaaatagttgatttgcagaaaaaggcaaaagcttgcgcagtggaaaatgaagaacttgtccagcatctgggggctgctaaggatgcccagcggcagctcacagccgagctgcgtgagctggaggacaagtacgcagagtgcatggagatgctgcatgaggcgcaggaggagctgaagaacctccggaacaaaaccatgcccaataccacgtctcggcgctaccactcactgggcctgtttcccatggattccttggcagcagagattgagggaacgatgcgcaaggagctgcagttggaagaggccgagtctccagacatcactcaccagaagcgtgtctttgagacagtaagaaacatcaaccaggttgtcaagcagagatctctgaccccttctcccatgaacatccccggctccaaccagtcctcggccatgaactccctcctgtccagctgcgtcagcaccccccggtccagcttctacggcagcgacataggcaacgtcgtcctcgacaacaagaccaacagcatcattctggaaacagaggcagccgacctgggaaacgatgagcggagtaagaagccggggacgccgggcaccccaggctcccacgacctggagacggcgctgaggcggctgtccctgcgccgggagaactacctctcggagaggaggttctttgaggaggagcaagagaggaagctccaggagctggcggagaagggcgagctgcgcagcggctccctcacacccactgagagcatcatgtccctgggcacgcactcccgcttctccgagttcaccggcttctctggcatgtccttcagcagccgctcctacctgcctgagaagctccagatcgtgaagccgctggaaggttccgccacacttcaccactggcagcagttggcccaacctcaccttgggggcatcctggacccccggcccggtgtggtcaccaagggcttccggacgctggatgttgacctggacgaagtgtactgccttaacgactttgaagaagatgacacaggtgaccacatttctctcccacgcctagctacctccactccagttcagcacccagagacctcagcgcaccatcctgggaagtgcatgtctcagaccaactccaccttcaccttcaccacctgtcgcatcctgcatccttcagatgagctcactcgggtcacaccaagccttaactcagccccaactccagcttgtggcagcaccagccacttgaaatccacgccggtggccacaccatgcactccacggagactgagcctggctgagtccttcactaacacccgtgagtccacgaccaccatgagcacatccctggggctcgtgtggctgttgaaggagcggggcatttctgctgccgtgtacgacccccagagctgggacagggccggccggggctccctcctgcactcctacacgcccaagatggctgtgatcccctctactccgccgaactcgcctatgcagacacccacatcctccccaccctcctttgagttcaagtgcacgagccctccctacgacaatttcctggcttccaagccagccagctccatcctgagggaagtgagagaaaagaacgtccgcagcagcgagagccagaccgacgtgtccgtctccaacctcaacctcgtggacaaagtcaggaggtttggggtggccaaagtggtgaactcagggcgagcccatgtccccaccttgactgaggagcagggacccctcctctgtgggcccccggggccagcaccagcccttgttcccagaggcctggtacctgagggcctgcccctcagatgccccactgtcaccagtgccatcggtgggctgcagctcaatagtggcatccggcggaatcgcagcttccccaccatggtgggatctagcatgcagatgaaagctcctgtgactctcacctcgggcatcttgatgggtgctaagctctccaaacaaactagcttacggtgaggactggaggggggccggttgccctagaggagacccacgttctcctctcttgctcccacctccctctcttccccccacagtgcactccctccctctgcccttctctgtccaccccctcctaagctagacaaatcaacctcgtgcctaatggaggaagtgtggaaactttgtaaaatgtgtacataggacttggagaccttgtgtccgccctgctctttcttccgatcccacaggaagtgcccctgcactgtcatcactctcacgaggacgtcacctgtgctaacctgggggaaggtggggtcctttcttctttccttttgagaagcactgaaactcccaagtgtgttcttatcccatggataggaaaccagtgaattccgtggctggcacaccacgagctgtcacgcggcacgggtcataacacatctgggtgtcatcggacacctcacctcgcccaccctgtaggagcgtaaggagcctccatcctcagccacgtgcagctgacgtggctttcctgatcggagggcttttcttttatgggtggcccagcttcttcaagaccttcactgctctgcctcagtggacagtcgtttcttttttgaggtgtgaccttttgttttcatgccttccccttgaagtcatcctgtgttttgtaatcagctgtcaggccaaatgtctgacccgaaagagaatgtatttacactcatgctgcgttgttcagcagcccctctgtgttctgtgtgatttgttttatttttccttttttttacatatatatgcagggaagtaatggtactggtagtgtatgttttctatgtggttcaaatatgaatttcgaacacaccaagccgctaatgagatagcagcttttttctgggacccagagtcacaaccaaattgatttaagaccggacccaagacacctttaacaataggactgaaaggaaaaaggatagggaaaaagcttattaaagaaatgtgtcaacaccaaatgtagaggggaagaaccacaaccaggcataataccaaaccggttccagggggaaacaaggctttggtattccgctggctccagcgctttttctgaaacccgaggctggccagggtgctgtcaccatgcggtctttgattgcagccattcaatgcccacatgcttttccttcttgtttcagaacagcacatggtcacaacaagatattttctttccctccaaagccttttgtctccttgtgcctctttttatccttaggaaaagatccaggtgcttgtgaaaagaatcatgaatgcaacaagggaggctggtcctgttgctgtcgccgattaagttttaaacttttatttattatttatgtctgccgtattttaaataaacattctcgttccttccagtttcagtcatagtgtgtctgtggcattccagtccaaccatgtgacttatttattctaatttgagggctgcactgtacaccatggtgtcctgtgacaccgtgttccagacatttatggaaggaaaacatcccatataaatgaaactgtcatgctgtgtcctccccggcagcagaagatgtgtccttccattgagtgagggtaaccttatgtccaccaaggatactttgagaaagcccctaaggaacaagcctcagtcccacggtttcagactatttattctctgaacacaagagtattggttaattatgttctcagctctccctgctgttgtatgtgtgcattcactgcaagtaacttatatctttttatttgaatgtattttaaagcagtagatagaataacaaaggaatatgaaaaccatggactgaatggaccattttatgtattcagagagagaagccactcatcattgccagaaataccatgtaaaaattggcagttcagaggttgcaatacttagtatagtaaataaataaacggtcaacattgtgcaaccactaccaaaaagtgtgttgtaatgcatcaaaaatcaacacaattttattcactaatgagtatcaataaaataagttcaaatgatggaaaccacactggtattctgatttgtattttgtttttatcttttcatcaaggagacgatctctttatgtaagacttgaaagtgtttagctctttgcaaaattaaatgaaaggcatatacttc

SEQ ID NO: 191963 - DNA, 2008 bp, Homo sapiens
  Payload ID: 17926
  Gene Name: trafficking protein, kinesin binding 1
  ENST ID: ENST00000484786
  CDS Start-End: 423-2003
ggcacctccccgtgaaacctgccaagctggacgccacagctctgcacgacgacactttggccaactccgtgcccccttcggaggcatgcaaccatgcagtcctagcctgcagcctgggcatccctgaggaacactacataagcgaggctgtggaagatgctcccagctacagagggtaccgggatgcctgcaccattactgatgtgtgcaacagcaccgatcttccggaagtcgagatcattagcctgctggaggagcagctgccccattataagttaagagccgacaccatctacggttatgaccacgacgactggctccatacacctctcatttctccagatgccaacattgacctcacaaccgagcaaattgaagagacgttaaaatacttccttttatgtgctgaaagagttggccagatgactaagacatataatgacatagatgctgtcactcggcttcttgaggagaaagagcgggatttagaattggccgctcgcatcggccagtcgttgttgaagaagaacaagaccctaaccgagaggaacgagctgctggaggagcaggtggaacacatcagggaggaggtgtctcagctccggcatgagctgtccatgaaggatgagctgcttcagttctacaccagcgctgcggaggagagtgagcccgagtccgtttgctcaaccccgttgaagaggaatgagtcgtcctcctcagtccagaattactttcatttggattctcttcaaaagaagctgaaagaccttgaagaggagaatgttgtacttcgatccgaggccagccagctgaagacagagaccatcacctatgaggagaaggagcagcagctggtcaatgactgcgtgaaggagctgagggatgccaatgtccagattgctagtatctcagaggaactggccaagaagacggaagatgctgcccgccagcaagaggagatcacacacctgctatcgcaaatagttgatttgcagaaaaaggcaaaagcttgcgcagtggaaaatgaagaacttgtccagcatctgggggctgctaaggatgcccagcggcagctcacagccgagctgcgtgagctggaggacaagtacgcagagtgcatggagatgctgcatgaggcgcaggaggagctgaagaacctccggaacaaaaccatgcccaataccacgtctcggcgctaccactcactgggcctgtttcccatggattccttggcagcagagattgagggaacgatgcgcaaggagctgcagttggaagaggccgagtctccagacatcactcaccagaagcgtgtctttgagacagtaagaaacatcaaccaggttgtcaagcagagatctctgaccccttctcccatgaacatccccggctccaaccagtcctcggccatgaactccctcctgtccagctgcgtcagcaccccccggtccagcttctacggcagcgacataggcaacgtcgtcctcgacaacaagaccaacagcatcattctggaaacagaggcagccgacctgggaaacgatgagcggagtaagaagccggggacgccgggcaccccaggctcccacgacctggagacggcgctgaggcggctgtccctgcgccgggagaactacctctcggagaggaggttctttgaggaggagcaagagaggaagctccaggagctggcggagaagggcgagctgcgcagcggctccctcacacccactgagagcatcatgtccctgggcacgcactcccgcttctccgagttcaccggcttctctggcatgtccttcagcagccgctcctacctgcctgagaagctccagatcgtgaagccgctggaaggtgatcacgcggggcctcggcccctctctgtcctcctgggggactccctttggtccctgatccacctgcggaaggcggggcacctctgtcacgcctactcctttttcttccgcgacagccacccgcgctgctggtttgagttcctctgagggtg

SEQ ID NO: 191964 - DNA, 6510 bp, Homo sapiens
  Payload ID: 17927
  Gene Name: trafficking protein, kinesin binding 2
  Uniprot ID: O60296
  ENST ID: ENST00000332624
  CDS Start-End: 430-3174
cctttggcttccccaattgtgtgggggctgccattgacccggtgtcgccgcagaaccgaggtcgccgagtgatgatgttgtgaagtcgcccgcctgtccctgccacgcccgggcggttgctggcagtgggagcagcggcagcagcttcggctgctgctttcaggctgccgctgcattaggggcttcctgaggaagcgcgggcggacgacagaggatgccgaaccactccagtcatgactgtccaaagtatgataatcacatgagagtgctcgttgctacggatgtcatttgactcatcagagaaaatctgtctaaaagaaaatatccatgtgaccaaatccatttcattattgaatggcttgatggatttcctttactctgattcataccaaagctgtccttctcaaccaaagcaagaaaggatcctgcatgagtcaatcccagaatgcaatttttacatcaccaacaggtgaagaaaacctcatgaatagcaatcacagagactcggagagcatcactgatgtctgctccaatgaggatctccctgaagttgagctggtgagtctgctagaagaacaactaccacagtataggctaaaagtagacactctctttctatatgaaaatcaagactggactcagtctccacaccagcggcagcatgcatctgatgctctctctccagtccttgctgaagagactttccgttacatgattctaggcacagacagggtggagcagatgaccaaaacttacaatgacatcgacatggttacacatctcctggcagagagggatcgtgatctggaactcgctgctcgaattggacaagctctcttaaagcggaaccatgtcttatctgagcagaacgaatccctggaggagcaattgggacaagcctttgatcaagttaatcagctgcagcatgagctatgcaagaaagatgagttacttcgaatcgtctccattgcttctgaagaaagtgaaactgattccagctgttctacacctcttcggttcaatgagtcctttagcttatctcaagggttgctgcagttggaaatgctgcaagaaaagctcaaggaactggaagaagagaatatggctcttcgatccaaggcttgtcacataaagacagaaactgttacctatgaagaaaaggaacaacagcttgtcagcgactgtgttaaagaacttcgtgaaacaaatgctcagatgtccagaatgactgaagaattgtcagggaagagtgatgagctgattcgataccaagaagagctttcctctcttttgtcacagattgtagaccttcagcacaaacttaaagaacatgtgattgagaaggaagaactaaaacttcacctgcaagcttccaaagatgcccaacggcaactgacaatggagctgcacgagttacaagacaggaatatggagtgtctaggaatgttacatgaatcccaagaagaaataaaggaacttcgtagtagatctggccctactgctcatctctacttctcccaatcatatggagcttttactggggaatctttggcagctgagattgaggggactatgcgtaaaaagctgagtttggatgaggaatcttctctctttaaacaaaaagcccaacagaagcgggtatttgataccgtcaggattgccaatgacacacggggccgctctatctcattcccagctctgttacccattccaggctccaaccgttcaagtgtcatcatgacagcaaaaccttttgagtctggtcttcagcaaacagaggacaaatcactcctgaaccaggggagcagctcagaggaggttgcagggagctcccagaagatgggccaaccaggaccctcaggagatagtgatttggctacagcactgcatcgccttagcttgcgtcgacaaaactatttaagtgagaagcagttctttgctgaagaatggcagcggaagatccaggttctggcagaccagaaggaaggagttagtggctgtgtcaccccgacagagagccttgcctctctctgcaccacccagtcagagatcacagacctcagcagtgccagttgccttcgaggttttatgccagaaaaattacaaattgtcaagccccttgaaggatcacaaactctgtatcactggcagcagcttgctcaaccaaacttgggaaccatccttgatccacgaccaggtgtcattactaaaggctttacccagttgcccggggatgctatttatcacatctcagatttagaagaggatgaagaggagggtattacttttcaggttcagcaacctcttgaagtggaagagaaactttcaacatccaagccagtaacagggatcttcctgccacccattacttcagcaggtggaccagttacagttgcaaccgccaacccaggaaagtgcctgtcgtgcacaaactcaacattcactttcaccacctgtagaatattacatccctctgacatcactcaggttacccccagctctgggttcccttcattatcctgtggaagtagcggtagcagttcatccaacacggctgtgaattctcctgccttgtcctatagactcagcattggtgagtccatcaccaaccgacgagattccactacaaccttcagtagcaccatgagcttggccaaacttctacaagagcgaggcatctctgccaaagtgtaccacagcccaatttcagagaaccccctccagcctctccctaaatccctggctatcccttccacaccaccaaattcaccatctcactcaccttgcccttctcctttaccctttgagcctcgagtgcatctctctgaaaattttttggcctctcgaccagctgagacattcctccaggagatgtatggcttgagaccctcccggaaccctcctgatgttggccagttgaagatgaacttagtggacaggctgaagagactggggatagccagagtggtcaagaaccctggtgcccaagagaatggaagatgccaggaggcagaaattggtcctcaaaaaccagattctgctgtttatttaaattcaggtagcagtttattaggtggactaaggaggaatcagagtcttccagtcataatgggtagctttgctgccccagtttgcacatcctcacccaaaatgggtgtcctgaaggaggactgaggttcagcagttaactgaccttttatacaagttagcacatgaaggatagatatgcactgaaacatgtggtctggtctgacttgagagaaaaggaatgttgcacaagggttgtgaatgtgaaagggggaatggaggaatggaaataaaattgggatgagccctaatggaggaagtcgggcaaattgaaagtataaatgaatgggccatgagtgttcagagggagaaaagaaaggtttaatatactccttcagttgagttttcttgtcttgaacataaaaagtgaatacaaataaattcagtaatactaaaacatacagagatactgaacttgctggcacatttacttctggtaagcataaagcagagagaacccaggttagaaggatgggaagagaaaaggagcagttttattgcttatagaaagccgttctgaggggttggtggggtaagctcagtctattactgagacaatagtgagatggcttatatgtttcccctgttaatatctggttaaattatgtatccatcaaatggtatgctcgcagcattagcaaaattaggagtttcatctttttcattgaatcacaggtggagactcctattttcctttctgttttcaggcctttgagcccctgggagcccaaataccactcaattattttgtatttatgattaataaaagttcattttttaaatttgtatttttatacaacctccaaaaaaaaaaacaactgggtagagggtgggagggatttacttttaagaggcaaaatgtgagtaaattgaaaccaagaaaacttgtttttagaatatttcgtctgaataagtacagtagccaaggaatacaaacataattgcatgtttttaaaaattccttggaggctggaaggggttaagccagaagtgcaatcaataggaattagggaatgttgtatatttatatatgtaaactttttttgtaagaaaagttggtgacaactaaaccaactttttccaaagtgcgctatgcatatttttaatgaaagatgacatgtatttgcacaaaaattctcaggcacattaaattattgtaaactgaagtaaaacccgggtgcttgctttgagattgtggttttttcttcctaatgtaaaataaaataaaacacatctgccttcttgatatttatagaattagagaataaactttttaatgggggagtcaaagctttttctttttctctaaggttctttttttttattcaaactgtatgaaatggcaaagtgaggctctggggttagatttcagcattcagcagttgacacaggctaagaaatggaaagaagtagatctgttttttctcaatgttgctgagcaaagtctgcttctcatcagatgacgtggctttgtctagacagcacgcagttcagaaagaaatgtctttatacaaaagacatgatagagaaaagatgagagaggggactaattattttgtttatgaaaatggcaagtaaattacttgatctttttggtgcttaatttgcaaatgttttgttcctttgtcctgacttaaaggcagttttctgaagaactcttgactcttgctcctatggttcccataggcacacctattcccaggccaaggagagtccttcctctccccttttgaggcatccccgccatccccccacttagagctatgtgctcaaaaagccaacatgaatgcagtggtaaaaatttgttagtttcttatactttttagaatctctcaataaaatttttctaaataaattccacaaaaacaaagggtgaagatggtctctccctttcgttccccttcactcagttgtgctgaggtcaatagagtgtagagtttcagaaaggattccagcaggtttatatgtgaatataagtgtccctgaatggggcaggcattaaatagaagaatccctgctgtttaaatttcccgcatattccaattcacttttaaaaaataccatttgaatttgtatttcataaagtgactctggggtgcttactttagtcaattcttaaaattttttatttgttccctaagaaagtaattactgtttctgttgcctggacagttacagtttccaggaaacatcaggaagtaggaaactgtagggccagagagtagtacaacgttaaattgtccgatttatgtgtattacttaaagctataaattgaactagatcttgccgtgctctgtattgagtataatttgtatacttttttataattaatgactaaatgatcactttggaggcagggtggtgggggtgtattagcagccaaataagcacatctgatcaaaaagaaccaggcttagattttttttaagtacattgatgttgatgttccaccagaaacaccttaagtgtatactgttgtgtaatgtctctagaaaggaatcctgtcttaaaactgggttttgctgttttttgaagtttctacctaaaatcatttttggtatatcctgataatctctataatactagaattgtctgcaaaatatagtaagaagaattggagcctaatagctgattcctcccaatttatctgttatgttttgtcactattcacattttagtcttttctacgataaaaattgtatgtgtactttcatgccagtataggaaacctcaatcttttttttttttcgcctttaagaaggttttcagtgattatacctcaggtatttctgagtgtcctattgtctaataggagaaatatcttcccgagctcagaattaaaagttctcctaaattatgaagatcccaaatcttatgtaaataaccttaggcatgagtccttagggagaagttaatgaccattgttaaagtgcttttttagaaaatgttgtgctgtatgttcttgatttgacataaatgaatagactttggcaagggaggaaataagttaaaaggcagcttacaagagcctattccctataaagggtataattttacacagtactcaaagcttgttatcttttctgaccattttagtacagaattagtacttggtggttactaacatcaacttgtgacatctagaactagggctcttagtgtttagtgggccacttctctgatgtcagatgcatgcagacctgtactccacatgcaacccaacagcagtgcagtgtgataactgagcggtcgcatggcagaggacatccccctcagagtgggcacaagtgccctctagggcagccaggggaatactattgttcgatacctgggatttgactttgtcaaacagctctttgtgcccctatctttgttttgtcaaatgtagatcagttaataaacatgagtagcttgaattttca

SEQ ID NO: 191965 - DNA, 381 bp, Homo sapiens
  Payload ID: 17927
  Gene Name: trafficking protein, kinesin binding 2
  ENST ID: ENST00000440597
  CDS Start-End: 291-381
ggaaatactgaccccataaacctaaatctcacacacggttttggacgtttaaacgaatggatttaacagccttttggaattcagcctgtttgtcatgactgtccaaagtatgataatcacatgagagtgctcgttgctacggatgtcatttgactcatcagagaaaatctgtctaaaagaaaatatccatgtgaccaaatccatttcattattgaatggcttgatggatttcctttactctgattcataccaaagctgtccttctcaaccaaagcaagaaaggatcctgcatgagtcaatcccagaatgcaatttttacatcaccaacaggtgaagaaaacctcatgaatagcaatcacagagactcggagagcatcactg

SEQ ID NO: 191966 - DNA, 1436 bp, Homo sapiens
  Payload ID: 17927
  Gene Name: trafficking protein, kinesin binding 2
  Uniprot ID: O60296
  ENST ID: ENST00000430254
  CDS Start-End: 351-1286
gtgaagtcgcccgcctgtccctgccacgcccgggcggttgctggcagtgggagcagcggcagcagcttcggctgctgctttcaggctgccgctgcattaggggcttcctgaggaagcgcgggcggacgacagaggatgccgaaccactccagtcatgactgtccaaagtatgataatcacatgagagtgctcgttgctacggatgtcatttgactcatcagagaaaatctgtctaaaagaaaatatccatgtgaccaaatccatttcattattgaatggcttgatggatttcctttactctgattcataccaaagctgtccttctcaaccaaagcaagaaaggatcctgcatgagtcaatcccagaatgcaatttttacatcaccaacaggtgaagaaaacctcatgaatagcaatcacagagactcggagagcatcactgatgtctgctccaatgaggatctccctgaagttgagctggtgagtctgctagaagaacaactaccacagtataggctaaaagtagacactctctttctatatgaaaatcaagactggactcagtctccacaccagcggcagcatgcatctgatgctctctctccagtccttgctgaagagactttccgttacatgattctaggcacagacagggtggagcagatgaccaaaacttacaatgacatcgacatggttacacatctcctggcagagagggatcgtgatctggaactcgctgctcgaattggacaagctctcttaaagcggaaccatgtcttatctgagcagaacgaatccctggaggagcaattgggacaagcctttgatcaagttaatcagctgcagcatgagctatgcaagaaagatgagttacttcgaatcgtctccattgcttctgaagaaagtgaaactgattccagctgttctacacctcttcggttcaatgagtcctttagcttatctcaagggttgctgcagttggaaatgctgcaagaaaagctcaaggaactggaagaagagaatatggctcttcgatccaaggcttgtcacataaagacagaaactgttacctatgaagaaaaggaacaacagcttgtcagcgactgtgttaaagaacttcgtgaaacaaatgctcagatgtccagaatgactgaagaattgtcagggaagagtgatgagctgattcgataccaagaagagctttcctctcttttgtcacagattgtagaccttcagcacaaacttaaagaagtaggtttattcattcattcaacagatatttgttaagcactcacatagtatcttgcaccatgctaagtgctagatacaataaacaaaataaacattgtccctgcccttttaaaatgccctaatctgattgctgttttaatcatctttatgtcatataagatatcatgaataaatactttcaagtca

SEQ ID NO: 191967 - DNA, 3896 bp, Homo sapiens
  Payload ID: 17927
  Gene Name: trafficking protein, kinesin binding 2
  ENST ID: ENST00000620184
  CDS Start-End: 744-3083
ggggccgtggaggccgctgggagagtggctctcctttggcttccccaattgtgtgggggctgccattgacccggtgtcgccgcagaaccgaggtcgccgagtgatgatgttgtgaagtcgcccgcctgtccctgccacgcccgggcggttgctggcagtgggagcagcggcagcagcttcggctgctgctttcaggctgccgctgcattaggggcttcctgaggaagcgcgggcggacgacagaggatgccgaaccactccagtcatgactgtccaaagtatgataatcacatgagagtgctcgttgctacggatgtcatttgactcatcagagaaaatctgtctaaaagaaaatatccatgtgaccaaatccatttcattattgaatggcttgatggatttcctttactctgattcataccaaagctgtccttctcaaccaaagcaagaaaggatcctgcatgagtcaatcccagaatgcaatttttacatcaccaacaggtgaagaaaacctcatgaatagcaatcacagagactcggagagcatcactgatgtctgctccaatgaggatctccctgaagttgagctggtgagtctgctagaagaacaactaccacagtataggctaaaagtagacactctctttctatatgaaaatcaagactggactcagtctccacaccagcggcagcatgcatctgatgctctctctccagtccttgctgaagagactttccgttacatgattctaggcacagacagggtggagcagatgaccaaaacttacaatgacatcgacatggttacacatctcctggcagagagggatcgtgatctggaactcgctgctcgaattggacaagctctcttaaagcggaaccatgtcttatctgagcagaacgaatccctggaggagcaattgggacaagcctttgatcaagttaatcagctgcagcatgagctatgcaagaaagatgagttacttcgaatcgtctccattgcttctgaagaaagtgaaactgattccagctgttctacacctcttcggttcaatgagtcctttagcttatctcaagggttgctgcagttggaaatgctgcaagaaaagctcaaggaactggaagaagagaatatggctcttcgatccaaggcttgtcacataaagacagaaactgttacctatgaagaaaaggaacaacagcttgtcagcgactgtgttaaagaacttcgtgaaacaaatgctcagatgtccagaatgactgaagaattgtcagggaagagtgatgagctgattcgataccaagaagagctttcctctcttttgtcacagattgtagaccttcagcacaaacttaaagaacatgtgattgagaaggaagaactaaaacttcacctgcaagcttccaaagatgcccaacggcaactgacaatggagctgcacgagttacaagacaggaatatggagtgtctaggaatgttacatgaatcccaagaagaaataaaggaacttcgtagtagatctggccctactgctcatctctacttctcccaatcatatggagcttttactggggaatctttggcagctgagattgaggggactatgcgtaaaaagctgagtttggatgaggaatcttctctctttaaacaaaaagcccaacagaagcgggtatttgataccgtcaggattgccaatgacacacggggccgctctatctcattcccagctctgttacccattccaggctccaaccgttcaagtgtcatcatgacagcaaaaccttttgagtctggtcttcagcaaacagaggacaaatcactcctgaaccaggggagcagctcagaggaggttgcagggagctcccagaagatgggccaaccaggaccctcaggagatagtgatttggctacagcactgcatcgccttagcttgcgtcgacaaaactatttaagtgagaagcagttctttgctgaagaatggcagcggaagatccaggttctggcagaccagaaggaaggagttagtggctgtgtcaccccgacagagagccttgcctctctctgcaccacccagtcagagatcacagacctcagcagtgccagttgccttcgaggttttatgccagaaaaattacaaattgtcaagccccttgaaggatcacaaactctgtatcactggcagcagcttgctcaaccaaacttgggaaccatccttgatccacgaccaggtgtcattactaaaggctttacccagttgcccggggatgctatttatcacatctcagatttagaagaggatgaagaggagggtattacttttcaggttcagcaacctcttgaagtggaagagaaactttcaacatccaagccagtaacagggatcttcctgccacccattacttcagcaggtggaccagttacagttgcaaccgccaacccaggaaagtgcctgtcgtgcacaaactcaacattcactttcaccacctgtagaatattacatccctctgacatcactcaggttacccccagctctgggttcccttcattatcctgtggaagtagcggtagcagttcatccaacacggctgtgaattctcctgccttgtcctatagactcagcattggtgagtccatcaccaaccgacgagattccactacaaccttcagtagcaccatgagcttggccaaacttctacaagagcgaggcatctctgccaaagtgtaccacagcccaatttcagagaaccccctccagcctctccctaaatccctggctatcccttccacaccaccaaattcaccatctcactcaccttgcccttctcctttaccctttgagcctcgagtgcatctctctgaaaattttttggcctctcgaccagctgagacattcctccaggagatgtatggcttgagaccctcccggaaccctcctgatgttggccagttgaagatgaacttagtggacaggctgaagagactggggatagccagagtggtcaagaaccctgtgcccaagagaatggaagatgccaggaggcagaaattggtcctcaaaaaccagattctgctgtttatttaaattcaggtagcagtttattaggtggactaaggaggaatcagagtcttccagtcataatgggtagctttgctgccccagtttgcacatcctcacccaaaatgggtgtcctgaaggaggactgaggttcagcagttaactgaccttttatacaagttagcacatgaaggatagatatgcactgaaacatgtggtctggtctgacttgagagaaaaggaatgttgcacaagggttgtgaatgtgaaagggggaatggaggaatggaaataaaattgggatgagccctaatggaggaagtcgggcaaattgaaagtataaatgaatgggccatgagtgttcagagggagaaaagaaaggtttaatatactccttcagttgagttttcttgtcttgaacataaaaagtgaatacaaataaattcagtaatactaaaacatacagagatactgaacttgctggcacatttacttctggtaagcataaagcagagagaacccaggttagaaggatgggaagagaaaaggagcagttttattgcttatagaaagccgttctgaggggttggtggggtaagctcagtctattactgagacaatagtgagatggcttatatgtttcccctgttaatatctggttaaattatgtatccatcaaatggtatgctcgcagcattagcaaaattaggagtttcatctttttcattgaatcacaggtggagactcctattttcctttctgttttcaggcctttgagcccctgggagcccaaataccactcaattattttgtatttatgattaataaaagttcattttt

SEQ ID NO: 191968 - DNA, 4157 bp, Homo sapiens
  Payload ID: 17928
  Gene Name: TRAF-interacting protein with forkhead-associated domain
  Uniprot ID: Q96CG3
  ENST ID: ENST00000361717
  CDS Start-End: 283-837
tttacaaaggccccgggcgcgagaggacgtgctctgccagccagtgggaaggcaggccgcgcgcgcgggagcgcgggaggatcggcggctcgcggtcactggtccctggctcggttccccgcaccccggggctcacacttacccgcgcggaggagcagcggccgggtgtccacccccatcctgcgcccagtctcctcgattcccctcgctctgagccgggagagccgaacagctgaagagagttcactgactccccagccccaggtgggccttgtgcacatcatgaccagttttgaagatgctgacacagaagagacagtaacttgtctccagatgacggtttaccatcctggccagttgcagtgtggaatatttcagtcaataagttttaacagagagaaactcccttccagcgaagtggtgaaatttggccgaaattccaacatctgtcattatacttttcaggacaaacaggtttcccgagttcagttttctctgcagctgtttaaaaaattcaacagctcagttctctcctttgaaataaaaaatatgagtaaaaagaccaatctgatcgtggacagcagagagctgggctacctaaataaaatggacctgccatacaggtgcatggtcagattcggagagtatcagtttctgatggagaaggaagatggcgagtcattggaattttttgagactcaatttattttatctccaagatcactcttgcaagaaaacaactggccaccacacaggcccataccggagtatggcacttattcgctctgctcctcccaaagcagttctccgacagaaatggatgaaaatgagtcatgaacacagaaagtctaagaggagaaatatgatggatgaagagctctgtagatgctgtatagacactaaataagagttgattagggtagtatattatagtcatctgttatgctgtgaaatttggaattcagtattatcattttgaagtctgtaaattgtgttagtcattaacttagtcacctgttgtattctggatctacacaaaattattttaactgctcttattaatctgtgaggattaatatacaaaaagtatcctttgagatgaagtcgtgttctcaaaataaggttatattattttctttttctgcttgattttcatcttgtgttttgctttgtttttgtaaggaaccatctcttggtttggtcacatcagttcacaacagccatttgttttcaaggtcaaggctccaggcaggttgttactggtgtttgcagcctgtcagtacttgcagtactggaataggttctaggctagtgtctgcgcgtcactgtggttttagcatgggaggacttatttgagaaatactaccttacttttctatgatttctttttacagagttatagtgtgtttactcctaagatgacagttctctttgtctatattcagcatctaagacaaatatttaaacattttaaagaaccactgtgttaagtttaggattatttacttaccaaattagaagtttgacttttatgtgttatacacaatcttaaaatttcacgaattcacctttttaatagtatccatgtacataataaaatcaaagtttaattagccattttctttgaatttttttctaaataagggaaataactgttcttgggccactttacagagataaatgtatgtgaatgtttatgataaacgcttaaatatttctaaaatattaacttcaaaaaagtctttttcagttcttaaataaaaatttatttatttaagatacttattcgacttatcttaactaaggtagctatgaatgttaagtagatgaggtaaccattcagttaagttaaattgtagcattgccaggtagtgaggctcactgtacaattttccaggtaaatgaaatttcctgtagtaagaggtccgtatttttgtaacagccttttaaaaatgcttttgggaaccctccagcctcttaccaaaagaggctttaaacctcatcttgattcagactgtcagtctattcctgggcagtagtatgtgatgtccagcaccctaaccccgactccccagccctgggactattccagtagagtgaaatatttgtccctgtacaaagtggcctgaatgactgttggagttcctgtgtctggttttcctgtttattccctgtgatgcccagagtaatggcccatccaaagatgtccagatgtccatgtgctagtctccagaacttgtaactgtgttgttatgtggcaaaggggaatgaaggctgcagatggaagtaaaatagattatgctggattatctgggtgtgcccaattgatcaccggatccgtaaaagtggaagagaggcagatcaggatgtcagcgtgatgaggtgtgagacagacttgacttgctgttgctgggaggaaggggaggtcatgagccaaggaatgtggacagtctcttgaagctggaaagtgtgcattggacatctggaagccagaaaagacaaagaaatatccagaaaggaacaaagtcttgtggacaccttgattttggtccagtgagaatatgtttgacttgttaacctacaaaactttatgatgataaatttgtgttggtcgtaagccactaaatcacagtaatttgttatagcagcagatagaaaactaatatactccctttaatataaggttatctactattgattctttctaggattttagcttctggtctgatgtgggtttacagccagatcacccggcttgaattgcttacagtgtgtagtctcatggtaaaggcgttctatgagtgaagtgtatatactttaatgtgtgtatactgtcacattttgactattttggaagactttcacctctgtttcttgtctttgaggctgatgaatgtgtttctaagttataaatttaatattaagggattcatgtattattgttattgaatccaaacaatgtgttaagtaatatttagggccagaaaaatcttgtacagaataatgatttctcctaatgtaaatcttggaaagggttttgttcaacttgagaaatattaaattttttattctattttcttttcttcaaagattggcaaaggagagagtgggttgctaaaagtttatattgttctccaaagaatagaaacactttccatagcccaactccggtagtaaataataatgaacgctttaataatgaaagagcaattggttagtattagaattgttttgattacaaagttagcatctctgcctgagctacccaaccccaaagcggggttgttagaggaaagctaccatatttcatagaaccgaggaaggaatgcagcagacctcaggtgagattcgaatgctctggctctgaccctcaatgcatattggctccatggccacctgtagctcccaagttttacacgttattgatcccccaaagagacctgatctcttgatttcagttccagggacgggtcagcttgggtcaggtgcccaccccttcaccaatcaacttgtctcaggtaacgcagtcacattatataatggctgctctggtcagtgatcatgtggatagatacagcattttctcaaaaaaatggtcacaggggtgggggtggggcaaacaaaaatattggtgtttgatacaaggtactgaagctaagatgtgaaaccttccatatacactttaaggacttctttgtccctggaaagtgatttttctggggctccttaggtagagaggtgtattaatggtgccagtgttagaatccttggcagtctcttcttgaacctgcaactccagtggttaaatctcataggccatataaccattttctagagaattctgttcctactatctaatgcagtaactgacttaaaagtaagtattactgttagactctaacataagtggtggtatttgttttaatggaggtgggatcaggtatgtgttcacttaagctttacattaaaaaaaaatttatatgtgtaaataaatatatatgccttgtagaaaaattagccataatcttactaccagaagagaactactgttaactttgtgtgtgtgtatatgtggtggatggttttatgttacctcctggctctttttatgtttccaattctctaacacttgtttaattaattacttatattattaa

SEQ ID NO: 191969 - DNA, 769 bp, Homo sapiens
  Payload ID: 17928
  Gene Name: TRAF-interacting protein with forkhead-associated domain
  Uniprot ID: Q96CG3
  ENST ID: ENST00000500655
  CDS Start-End: 112-666
gactgagctgctccttgtgggaactgctgatgttttgacaaaagaaagagggaaggtggaactacacagtggcttttaagtttctgcttggaagtgggccttgtgcacatcatgaccagttttgaagatgctgacacagaagagacagtaacttgtctccagatgacggtttaccatcctggccagttgcagtgtggaatatttcagtcaataagttttaacagagagaaactcccttccagcgaagtggtgaaatttggccgaaattccaacatctgtcattatacttttcaggacaaacaggtttcccgagttcagttttctctgcagctgtttaaaaaattcaacagctcagttctctcctttgaaataaaaaatatgagtaaaaagaccaatctgatcgtggacagcagagagctgggctacctaaataaaatggacctgccatacaggtgcatggtcagattcggagagtatcagtttctgatggagaaggaagatggcgagtcattggaattttttgagactcaatttattttatctccaagatcactcttgcaagaaaacaactggccaccacacaggcccataccggagtatggcacttattcgctctgctcctcccaaagcagttctccgacagaaatggatgaaaatgagtcatgaacacagaaagtctaagaggagaaatatgatggatgaagagctctgtagatgctgtatagacactaaataagagttgattagggtagtatattatagtcatctg

SEQ ID NO: 191970 - DNA, 5923 bp, Homo sapiens
  Payload ID: 17929
  Gene Name: TRAF-interacting protein with forkhead-associated domain, family member B
  Uniprot ID: Q6ZNK6
  ENST ID: ENST00000537858
  CDS Start-End: 202-687
ctgcaatgaaaaattacacttctattttctttcctaaagggaaaaaggaagaatgcaacaaaactgaagtatgttctgccacgttcctgaactgcagccataggagccctcccagccctacccaaaccagcctactccctctcaagagctcacagctgcaggactagagccagatgtgccccggcaataaggacttcttccatggagaagcccctcaccgtcctgcgagtgagcctgtaccatcccacgctgggcccatctgcctttgccaatgtcccaccacggctgcagcatgataccagccctctgcttctcggacgggggcaggacgcccacctccagctgcagctccctcgcctctcccgccgtcacctgtccctggagccctacctggagaaaggcagtgccctgctggccttctgcctcaaggccctgagccgcaagggctgtgtgtgggtcaatgggctgacgctgaggtacctggagcaggtccccctgagcaccgtcaacagggtctccttctcaggcatccagatgctggttcgcgtagaagaaggcacatccctggaggcttttgtctgctatttccatgtcagcccttcacccctgatttacagacctgaggctgaggaaactgacgaatgggaaggcatctcccaggggcagcctccccctggttcagggtagcagatccaggttgcctggggtttctccacggcccttcccagacttgggacagccctctccagccaagacctggaggaggaacagaaatacagctccagagggaacccccagacagtgcactctgctagccctgccactagagcaagcctttgctagatgaaacaggatttgaaatacttgagctgcatcatgcaaggttgacaagcaaaacccactggctgccttgctcataatgaaccaattctgcaaacaccgaacaaacagcccaggggggagaagcaccctctgtggccagagctatgcaatgtaatgggaacatcatatacttttagaggccctgaggggttctggggagcctctctcagcatttccacacatttctccctgttgtctgactaggagttactttatgtggttcattttgtgtgctgcttaagagcaggagtttgaggttgcaccaggaatgcgtggacacatgtaacaattacatttgtggtagcttggggttaccttcagctttcaaatacccacaggcacgcggggcttaggaaagcctgagtgtaataaactgcaagtatttcattaagctggcatacccaataggattccctgatccccagatgggccacatgcacgccacgctgtcatgcagacgtgggggtgggaaatatagacgaggtgtaagaggaaattggaaaggtgggactcacatttctggaaaggatgcaggcagggctcagggtttcctgaggatgggagctgggagctgggcctgcctggaaattcattgtcccccttatcatcctcatcctcacactccgcattctctgtcacttctggatcaaggccttggttgacttgagggcaaggtctttagggaatgaggggatggggtgggggtttgtgtaagaactcagcccagcagttatttcgctcagggtgagtcacacaccaatgggggtgggggaattccttccaaataagggactcgttaggagccaggtacgccaagggcaggaggattttctcggtgaacaagggcagcagctatttgccacgccatgctgagaaggggagagtgtggtttagaaacaacgttcactagtgtgatgcagggagggatctacatggtcaccatgatcccagaccccactctccagggaatctgaggcaccaagggcacagccctgttcccctggctgactcgaatctctgggtctgtagctgtcaacaatttctgttttctgcccaaaaggatgatcgttttgcacccagggcaagctacaaggaggtccaacttcactcacaggccctgagcatcttctccatcaggaaaacagaggtgggcaagacccaggcttgccctggtgtgggaagcttcctctccaatagggatgaagcaaaaacactcagatcacagccacaaggcagggagagcagggctgctaggaaggggctctctgatgctgtgaatgaccccttgggacccccaaagcagttcctcattcattcagcaaaccttcaccaagcacccaccttgtgccagatctgtgcaaagccacggaactgaaccagaagtgaataaggcaaactccctcagggagtttaccttgcactcaggaaagtcaagcattcaggagtgcattacttatttgatcactactatgattagtgctatagtcattgtatttttctctctcctccagctgggctcacattctcttgttaagtggccttgcctgttgagtgcctaccatgtgcttagcactctgctaggtgctgtgtgtattaactgcacttaacagataaggaaactgagacttggaaaggttacatatcttgcccaacatcacaccatcagtagctatgcgatttgggcaagtgatttagtctgctcttgcctctatttctcccgctggaaaatgggtaagataatagtactacctgctagagttacgagggtcttagaaggtgacacctgtaaagcattcaatcagtgcccagcacacacttaataagggttagctactatcatgagacctgagagaggagggctcaccatccacacggagctaaggaagactcacaccccagtaagctggctccagaacccaagggcttacctgtgctctgtgattccccaactagggatttagttgtagccacggacctggtaggcaacagggaggggattttaatctgctccttgcatcagaaggtccaataggcagggttagtataatgggagatgccctggtagggctggcaaggagaagaagccacatgtattttggtctgatgaaaagcagcagtgatctgtcactgaccaaaatggtcccccaactatgcattacggagcagcaacccacatacagaactcgagaagccacggcctggagactgtacctggacaccaaagactggagagaggagctggtggggaaaccccagagttcccagggtgccactccccagctccaccagagaactttgggaatgagctgctgcccctgagtgcccctctccagggcctcagtgagggtctctaccctccagggaggaacaaaaccttgccagctggggtcctgcgagagggggcagttcaattcctccacaggggactctgcaactccaatctttcgagtgaagcatctgcgaggccctcagggacccaggatgaactgcatagcagcagaaggaagacaggccagaccaggcgggagggagcccggaaacatctggtttgtagtttcagactctacccgttcacagttcacacagtctcaccgggaaactcacaccttgccctgtaccaagtttttaaggcagttaagctctgcccatccgagacttcatttttcttgagtagaaaatcactgaaatcatcagatccatggcacccaccttcactttctcctaacagctggaaccgtcaggctggcttcagggcctggtcttcgcacttgatatcactatccctcacctgctcagacagccagagcaggcgggtgagttcctcccaacaacctccactgcattctctcagctcccaccgcagggcagcccacgtgcctgagtgaacatgtgtgcgtgtgcacacacgcaagtatgcacagacatacactaaacacgaacatacagtgcacatgaacgctgctcccagctagggccctctggtcagactgctgcctgggttagaattcttgtccccacccccacttactatagttctgtgatcctggacaagtaactgaatctctccgtgccacagtttcttcttgtagaaaacgggaaagttcacagtacttacctccttagagtcattgtgaaggtcagtttgaggcatcacaaatttaaggcacccagacataagggtcaacagggttagctatcactgtccagtttggtgggaggaactgaatgcatgtaggcacatggacccagtctacactcaggcacaaaaggagctacattagttacattcaggcataccccagagcactacaattctctgagacattgtctggaaatctagaaatcatctccttgccctttaaggtattttaaccctcgcattcctctgcttttccaagaatgtgaatcttgccaagctgtccgtgagagacacgggctcccctcgagggagacttgcaaatgctccataaacagccacagtgtggggctctgccatgaggaagtcacagcagacacgctagacagcatagtcctggatgcaacctggaggaagggaggcccatggtggagcactcactccgtgcctgtctgcccggtgagacctcaagttccttgcagacaaaggccatgggttgttggctcttgtgttcccggtggcctttccagagctgaacagaggacagatgcacagacgggggggctctggtggtcaaggcagcagtccccttggatactaaagtctgagccaggcccctcaggcccggcatgggcagtgcgaggcccatagtggtgggaagccagttggccagctggggtgagaaggccgcgaagccatgggcagacaggaagtggaggtgaatgtctctgcctcctgtaggcctcagcagggacagcacagaccctctggctggggcagcgcagaccctctagctggggcagaacaaggctggtgcttccttctagtccttgagactttgtagctctaactcaagcagaaccctggggttttgggattctgtgtggtgactgctgaggaaggtttatggatttgacagggtgcatgtcacagagagacagttctcagtcagcacttcctgtcccctgcagaggctcataggggacagcccctgccaaggagaccctggaggggctctgaggatagcaatcagaggttgggctggctggactgagcccaggcctgttgcccaccaagtctccataggttctagtctgacccctctctccacccctgggctatgcaggccagcccgtgcagaccacccccgacgcgtccacttgcaacacccgcctcactgtgccaacactccatccacacaggaaaggactgagaacgtgatgcttaacccaaaggagtgagtttcataggatgggtggctttaacagtttcacagcaggacactgagggaatatttccctatcccttcaaatggacggtcactacagaaacgtgtagagcaagactttgtcaaggggctgtttccaggtctcccggtgtctaaatagcagagctggaatgggaactgagaaccgattctttccacaaccgcccactgagcagcaaggctgcagccagcaaagaggtgcggaggcaagcaagctccatgtggtggggacagcgcattgcgacctccaccacccctgcagtgggctgccagctgagccacctgtcttccactgtatctactgtacgaacttctccagctctgctctgttttctcttcctcagcatccaccccgtgacacgtagtggtggctgatgtcgccacagtaccatgaggttaacaggtcctccctccagcttccctcatggtggcagcctaacctgcattgcagccgttcaccggacaccgcaccagaccctcaaaacccatccaagactgtgggaggagtaaacaacccagcccagttaagaggagatgccgaatttaatgaaccctatttgaattgcagggctgtgattcctcttacctttaacgtgaactcacaggcggattaaagtgaaataaaacctaccatttga

SEQ ID NO: 191971 - DNA, 3178 bp, Homo sapiens
  Payload ID: 17930
  Gene Name: TRAF-type zinc finger domain containing 1
  Uniprot ID: O14545
  ENST ID: ENST00000257604
  CDS Start-End: 618-2366
agtgcggggtctgacagaggaggctccgtgtctgcagctagtgtgtcaactcagcgtttctcctctcgtccctggtgaggtgtagcggcggcacgcggctggagatcccctgtggcctccagtttaggaagggtccagcatcccaagggaggggtgtgtgggcgaggggtctctgggcccggggtcgcggctgtgaggagaggatgcccgcgcggcggcatctcaggcacctggaggaggccgcgctttctcctcagggaaccggcgccttggcagcccccggcgacgccgcccccttcgcggcctaggttggtctggtgagccgggaagcgggcgtcgttcgcagcgccgctgtgaccaccgcgtcccgggcggagctgggctcagtgccggcctgggcctagagtccgagcctcgagctgccggcgtggggggtcgcgagtggcctaatgcggcctcgaagccgaaggacccgagtccgagctcgcactccgacccgctggtgctgtggaaaactcaggtggccttccgctttcgtagcctctaaagtggggaccaagactttcacctcttaggattgtagtcgggattaaaagattttcccggaagagctaaagatggctgaatttctagatgaccaggaaactcgactgtgtgacaactgcaaaaaagaaattcctgtgtttaactttaccatccatgagatccactgtcaaaggaacattggtatgtgtcctacctgtaaggaaccatttcccaaatctgacatggagactcacatggctgcagaacactgtcaggtgacctgcaaatgtaacaagaagttggagaagaggctgttaaagaagcatgaggagactgagtgccctttgcggcttgctgtctgccagcactgtgatttagaactttccattctcaaactgaaggaacatgaagattattgtggtgcccggacggaactatgtggcaactgtggtcgcaatgtccttgtgaaagatctgaagactcaccctgaagtttgtgggagagagggggaggaaaagagaaatgaggttgccatacctcctaatgcatatgatgaatcttggggtcaggatggaatctggattgcatcccaactcctcagacaaattgaggctctggacccacccatgaggctgccgcgaaggcccctgagagcctttgaatcagatgttttccacaatagaactaccaaccaaaggaacattacagcccaggtttcaattcagaataatctgtttgaagaacaagagaggcaggaaaggaatagaggccaacagccccccaaagagggtggtgaagagagtgcaaacttggacttcatgttggccctaagtctgcaaaatgaaggccaagcctccagtgtggcagagcaggacttctggagggccgtatgtgaggccgaccagtctcatggcggtcccaggtctctcagtgacataaagggtgcagctgacgagatcatgttgccttgtgaattttgtgaggagctctacccagaggaactgctgattgaccatcagacaagctgtaacccttcacgtgccttaccttcactcaatactggcagctcttcccccagaggggtggaggaacctgatgtcatcttccagaacttcttgcaacaggctgcaagtaaccagttagactctttgatgggcctgagcaattcacaccctgtggaggagagcatcattatcccatgtgaattctgtggggtacagctggaagaggaggtgctgttccatcaccaggaccagtgtgaccaacgcccagccactgcaaccaaccatgtgacagaggggattcctagactggattcccagcctcaagagacctcaccagagctgcccaggaggcgtgtcagacaccagggagacctgtcttctggttacctggatgatactaagcaggaaacagctaatgggcccacctcctgtctgcctcccagccgacccattaacaatatgacagctacctataaccagctatcgagatcaacatcaggccccagacctgggtgccagcccagctctccttgtgtgccgaagctcagcaactcagacagccaggacatccaggggcggaatcgagacagccagaatggggccatagcccctgggcacgtttcagtgattcgccctcctcaaaatctctacccagaaaacattgtgccctctttctcccctgggccttcagggagatacggagctagtggtaggagtgaaggtggcaggaattcccgggtcacccctgcagctgccaactaccgcagcagaactgcaaaggcaaagccttccaagcaacagggagctggggatgcagaagaggaagaggaggagtaatggtgtctccagagactttacatcggttcctgtcttctgtgcacagcagcacttgccgctgtgcaggcccacctctttggctctttgggtgggagagtttttccagattttagatttttctaggttatggccattttgtgtcttttgaggttgtgctgtgggggtttgggtttgagggaagggagcagggtggcggttgaggaacgcttcagccttagctgctacctttcggcagcagtgaaatacaagctgcagcctcggctgccagggctcccttttgacttattgtcgccactgccccttggtgctgtgtggtcccagtggaaggaggggaagattttggaaacctggtagccaccagtaaggtgattctctgccctgttggggcctaaatttgggggcttttgggcaacctctccgtgtactgcgtctgtccacactcgattgggccccaggtgtgtatgaggcgctctggtaaggtgctcaggccagttgcaatgtctgtcagtaacgaggcttttgatgtgttgagctggaggtgagtggaccgggggctgtgttttaagctgcttccttggcatttggcatcactgccttctgttcccgggggagcatggatcttttgtcctcactgctttctaatggggagggctgagggctccctgtccccacagcaggtatgttgggctctgccccagccccacacttgctctgaaaaccaagtgtcagagccccttccccttgtttttattttactgttataataattattaacttccttgtaatagaaataaagtttgtacttggagttc

SEQ ID NO: 191972 - DNA, 2697 bp, Homo sapiens
  Payload ID: 17930
  Gene Name: TRAF-type zinc finger domain containing 1
  Uniprot ID: O14545
  ENST ID: ENST00000412615
  CDS Start-End: 131-1879
cgcgatgggcggaagtggtgaggcagctctgagggccgttgttcagtgcggggtctgacagaggaggctccgtgtctgcagctagtgtgtcaactcagcgtttctcctctcgtccctggaagagctaaagatggctgaatttctagatgaccaggaaactcgactgtgtgacaactgcaaaaaagaaattcctgtgtttaactttaccatccatgagatccactgtcaaaggaacattggtatgtgtcctacctgtaaggaaccatttcccaaatctgacatggagactcacatggctgcagaacactgtcaggtgacctgcaaatgtaacaagaagttggagaagaggctgttaaagaagcatgaggagactgagtgccctttgcggcttgctgtctgccagcactgtgatttagaactttccattctcaaactgaaggaacatgaagattattgtggtgcccggacggaactatgtggcaactgtggtcgcaatgtccttgtgaaagatctgaagactcaccctgaagtttgtgggagagagggggaggaaaagagaaatgaggttgccatacctcctaatgcatatgatgaatcttggggtcaggatggaatctggattgcatcccaactcctcagacaaattgaggctctggacccacccatgaggctgccgcgaaggcccctgagagcctttgaatcagatgttttccacaatagaactaccaaccaaaggaacattacagcccaggtttcaattcagaataatctgtttgaagaacaagagaggcaggaaaggaatagaggccaacagccccccaaagagggtggtgaagagagtgcaaacttggacttcatgttggccctaagtctgcaaaatgaaggccaagcctccagtgtggcagagcaggacttctggagggccgtatgtgaggccgaccagtctcatggcggtcccaggtctctcagtgacataaagggtgcagctgacgagatcatgttgccttgtgaattttgtgaggagctctacccagaggaactgctgattgaccatcagacaagctgtaacccttcacgtgccttaccttcactcaatactggcagctcttcccccagaggggtggaggaacctgatgtcatcttccagaacttcttgcaacaggctgcaagtaaccagttagactctttgatgggcctgagcaattcacaccctgtggaggagagcatcattatcccatgtgaattctgtggggtacagctggaagaggaggtgctgttccatcaccaggaccagtgtgaccaacgcccagccactgcaaccaaccatgtgacagaggggattcctagactggattcccagcctcaagagacctcaccagagctgcccaggaggcgtgtcagacaccagggagacctgtcttctggttacctggatgatactaagcaggaaacagctaatgggcccacctcctgtctgcctcccagccgacccattaacaatatgacagctacctataaccagctatcgagatcaacatcaggccccagacctgggtgccagcccagctctccttgtgtgccgaagctcagcaactcagacagccaggacatccaggggcggaatcgagacagccagaatggggccatagcccctgggcacgtttcagtgattcgccctcctcaaaatctctacccagaaaacattgtgccctctttctcccctgggccttcagggagatacggagctagtggtaggagtgaaggtggcaggaattcccgggtcacccctgcagctgccaactaccgcagcagaactgcaaaggcaaagccttccaagcaacagggagctggggatgcagaagaggaagaggaggagtaatggtgtctccagagactttacatcggttcctgtcttctgtgcacagcagcacttgccgctgtgcaggcccacctctttggctctttgggtgggagagtttttccagattttagatttttctaggttatggccattttgtgtcttttgaggttgtgctgtgggggtttgggtttgagggaagggagcagggtggcggttgaggaacgcttcagccttagctgctacctttcggcagcagtgaaatacaagctgcagcctcggctgccagggctcccttttgacttattgtcgccactgccccttggtgctgtgtggtcccagtggaaggaggggaagattttggaaacctggtagccaccagtaaggtgattctctgccctgttggggcctaaatttgggggcttttgggcaacctctccgtgtactgcgtctgtccacactcgattgggccccaggtgtgtatgaggcgctctggtaaggtgctcaggccagttgcaatgtctgtcagtaacgaggcttttgatgtgttgagctggaggtgagtggaccgggggctgtgttttaagctgcttccttggcatttggcatcactgccttctgttcccgggggagcatggatcttttgtcctcactgctttctaatggggagggctgagggctccctgtccccacagcaggtatgttgggctctgccccagccccacacttgctctgaaaaccaagtgtcagagccccttccccttgtttttattttactgttataataattattaacttccttgtaatagaaataaagtttgtacttggagttcagctca

SEQ ID NO: 191973 - DNA, 1043 bp, Homo sapiens
  Payload ID: 17930
  Gene Name: TRAF-type zinc finger domain containing 1
  Uniprot ID: O14545
  ENST ID: ENST00000552890
  CDS Start-End: 72-566
agaggaggctccgtgtctgcagctagtgtgtcaactcagcgtttctcctctcgtccctggaagagctaaagatggctgaatttctagatgaccaggaaactcgactgtgtgacaactgcaaaaaagaaattcctgtgtttaactttaccatccatgagatccactgtcaaaggaacattggtatgtgtcctacctgtaaggaaccatttcccaaatctgacatggagactcacatggctgcagaacactgtcaggtgacctgcaaatgtaacaagaagttggagaagaggctgttaaagaagcatgaggagactgagtgccctttgcggcttgctgtctgccagcactgtgatttagaactttccattctcaaactgaaggaacatgaagattattgtggtgcccggacggaactatgtggcaactgtggtcgcaatgtccttgtgaaagatctgaagactcaccctgaattgaagaacaagagaggcaggaaaggaatagaggccaacagccccccaaagagggtggtgaagagagtgcaaacttggacttcatgttggccctaagtctgcaaaatgaaggccaagcctccagtgtggcagagcaggacttctggagggccgtatgtgaggccgaccagtctcatggcggtcccaggtctctcagtgacataaagggtgcagctgacgagatcatgttgccttgtgaattttgtgaggagctctacccagaggaactgctgattgaccatcagacaagctgtaacccttcacgtgccttaccttcactcaatactggcagctcttcccccagaggggtggaggaacctgatgtcatcttccagaacttcttgcaacaggctgcaagtaaccagttagactctttgatgggcctgagcaattcacaccctgtggaggagagcatcattatcccatgtgaattctgtggggtacagctggaagaggaggtgctgttccatcaccaggaccagtgtgaccaacgcccagccactgcaaccaaccatgtgacagaggggattccta

SEQ ID NO: 191974 - DNA, 867 bp, Homo sapiens
  Payload ID: 17930
  Gene Name: TRAF-type zinc finger domain containing 1
  ENST ID: ENST00000547063
  CDS Start-End: 78-362
tctgacagaggaggctccgtgtctgcagctagtgtgtcaactcagcgtttctcctctcgtccctggaagagctaaagatggctgaatttctagatgaccaggaaactcgactgtgtgacaactgcaaaaaagaaattcctgtgtttaactttaccatccatgagatccactgtcaaaggaacattggtatgtgtcctacctgtaaggaaccatttcccaaatctgacatggagactcacatggctgcagaacactgtcaggtgacctgcaaatgtaacaagaagttggagaagaggctgttaaagaagcatgaggtacttaagactgaattggaggccgggcgtggtggctcaagcctgtaatcccagcactttgggaggctgaggcgggcggatcacaaggagactgagtgccctttgcggcttgctgtctgccagcactgtgatttagaactttccattctcaaactgaaggaacatgaagattattgtggtgcccggacggaactatgtggcaactgtggtcgcaatgtccttgtgaaagatctgaagactcaccctgaagtttgtgggagagagggggaggaaaagagaaatgaggttgccatacctcctaatgcatatgatgaatcttggggtcaggatggaatctggattgcatcccaactcctcagacaaattgaggctctggacccacccatgaggctgccgcgaaggcccctgagagcctttgaatcagatgttttccacaatagaactaccaaccaaaggaacattacagcccaggtttcaattcagaataatctgtttgaagaacaagagaggcaggaaaggaatagaggccaacagccccccaaagagggtggtg

SEQ ID NO: 191975 - DNA, 532 bp, Homo sapiens
  Payload ID: 17930
  Gene Name: TRAF-type zinc finger domain containing 1
  ENST ID: ENST00000549358
  CDS Start-End: 128-532
agtgcggggtctgacagaggaggctccgtgtctgcagctagtgtgtcaactcagcgtttctcctctcgtccctgaaatgaaagagaaagttcatgtcttcctttgtggttttcaggaagagctaaagatggctgaatttctagatgaccaggaaactcgactgtgtgacaactgcaaaaaagaaattcctgtgtttaactttaccatccatgagatccactgtcaaaggaacattggtatgtgtcctacctgtaaggaaccatttcccaaatctgacatggagactcacatggctgcagaacactgtcaggtgacctgcaaatgtaacaagaagttggagaagaggctgttaaagaagcatgaggagactgagtgccctttgcggcttgctgtctgccagcactgtgatttagaactttccattctcaaactgaaggaacatgaagattattgtggtgcccggacggaactatgtggcaactgtggtcgcaatgtccttgtgaaagatctgaagactcaccctgaagtttgt

SEQ ID NO: 191976 - DNA, 983 bp, Homo sapiens
  Payload ID: 17930
  Gene Name: TRAF-type zinc finger domain containing 1
  ENST ID: ENST00000552896
  CDS Start-End: 134-983
ggaggctccgtgtctgcagctagtgtgtcaactcagcgtttctcctctcgtccctgcctctaaagtggggaccaagactttcacctcttaggattgtagtcgggattaaaagattttcccggaagagctaaagatggctgaatttctagatgaccaggaaactcgactgtgtgacaactgcaaaaaagaaattcctgtgtttaactttaccatccatgagatccactgtcaaaggaacattggtatgtgtcctacctgtaaggaaccatttcccaaatctgacatggagactcacatggctgcagaacactgtcaggtgacctgcaaatgtaacaagaagttggagaagaggctgttaaagaagcatgaggagactgagtgccctttgcggcttgctgtctgccagcactgtgatttagaactttccattctcaaactgaaggaacatgaagattattgtggtgcccggacggaactatgtggcaactgtggtcgcaatgtccttgtgaaagatctgaagactcaccctgaagtttgtgggagagagggggaggaaaagagaaatgaggttgccatacctcctaatgcatatgatgaatcttggggtcaggatggaatctggattgcatcccaactcctcagacaaattgaggctctggacccacccatgaggctgccgcgaaggcccctgagagcctttgaatcagatgttttccacaatagaactaccaaccaaaggaacattacagcccaggtttcaattcagaataatctgtttgaagaacaagagaggcaggaaaggaatagaggccaacagccccccaaagagggtggtgaagagagtgcaaacttggacttcatgttggccctaagtctgcaaaatgaaggccaagcctccagtgtggcagagcaggacttctggagggccgtatgtgaggccgaccagtctcatggcggtcccaggtctctcagtgacataaagg

SEQ ID NO: 191977 - DNA, 584 bp, Homo sapiens
  Payload ID: 17930
  Gene Name: TRAF-type zinc finger domain containing 1
  ENST ID: ENST00000548092
  CDS Start-End: 367-584
gacagaggaggctccgtgtctgcagctagtgtgtcaactcagcgtttctcctctcgtccctggaagagctaaagatggctgaatttctagatgaccaggaaactcgactgtgtgacaactgcttagatatgatctttgaaccactaaactaagtgagaaaggcaaaaatgaagtggagagaccagactggtggaggaaagggttcaggatttcatttttgtacagctttacagtgaagtttctaccaacccagccagagagcatgttcctgtagtcaggaagcatccagcctgcttcgaaagcaaaaaagaaattcctgtgtttaactttaccatccatgagatccactgtcaaaggaacattggtatgtgtcctacctgtaaggaaccatttcccaaatctgacatggagactcacatggctgcagaacactgtcaggtgacctgcaaatgtaacaagaagttggagaagaggctgttaaagaagcatgaggagactgagtgccctttgcggcttgctgtctgccagcactgtgatttagaactttccattctcaaactgaaggaacatgaagattattgtgg

SEQ ID NO: 191978 - DNA, 1171 bp, Homo sapiens
  Payload ID: 17931
  Gene Name: trans-2,3-enoyl-CoA reductase
  Uniprot ID: Q9NZ01
  ENST ID: ENST00000215567
  CDS Start-End: 138-1064
gcggcctggaggggcggggcggacgcagagccgcgtttagtctatcgctgcggttgcgagcgctgtagggagcctgtgctgtgccgcgcagttaggcagcagcagccgcggagcagtagccgccgtgggagggagccatgaagcattacgaggtggagattctggacgcaaagacaagggagaagctgtgtttcttggacaaggtggagccccacgccaccattgcggagatcaagaacctcttcactaagacccatccgcagtggtaccccgcccgccagtccctccgcctggaccccaagggcaagtccctgaaggatgaggatgttctgcagaagctgcccgtgggcaccacggccacactgtacttccgggacctgggggcccagatcagctgggtgacggtcttcctaacagagtacgcggggccccttttcatctacctgctcttctacttccgagtgcccttcatctatggccacaaatatgactttacgtccagtcggcatacagtggtgcacctcgcctgcatctgtcactcattccactacatcaagcgcctgctggagacgctcttcgtgcaccgcttctcccatggcactatgcctttgcgcaacatcttcaagaactgcacctactactggggcttcgccgcgtggatggcctattacatcaatcaccctctctacactccccctacctacggagctcagcaggtgaaactggcgctcgccatctttgtgatctgccagctcggcaacttctccatccacatggccctgcgggacctgcggcccgctgggtccaagacgcggaagatcccataccccaccaagaaccccttcacgtggctcttcctgctggtgtcctgccccaactacacctacgaggtggggtcctggatcggtttcgccatcatgacgcagtgtctcccagtggccctgttctccctggtgggcttcacccagatgaccatctgggccaagggcaagcaccgcagctacctgaaggagttccgggactacccgcccctgcgcatgcccatcatccccttcctgctctgagcgctcacccctgctgaggctcagcccctcaacccggtggcattctgggggaggagtggggcccacagctctccagcacccggaataaagcccgcctgccccagtcg

SEQ ID NO: 191979 - DNA, 541 bp, Homo sapiens
  Payload ID: 17931
  Gene Name: trans-2,3-enoyl-CoA reductase
  ENST ID: ENST00000598715
  CDS Start-End: 147-541
gacagacacccctgcacacggttgagccctttgtaggtctccgtgtgacaagtacatccctgctgtgcttgggaaagggctgcggcttgggaaagggctgtgtgggttccctggcttcttcctgctgtccccgaggagcatcggaaatgggtcacaacgcagcaggtggagattctggacgcaaagacaagggagaagctgtgtttcttggacaagagctgacgtccctgcgcctgtgcttcccccaggtggagccccacgccaccattgcggagatcaagaacctcttcactaagacccatccgcagtggtaccccgcccgccagtccctccgcctggaccccaagggcaagtccctgaaggatgaggatgttctgcagaagctgcccgtgggcaccacggccacactgtacttccgggacctgggggcccagatcagctgggtgacggtcttcctaacagagtacgcggggccccttttcatctacctgctcttctacttccgagtgcccttcatctatggccacaaatatgactttac

SEQ ID NO: 191980 - DNA, 735 bp, Homo sapiens
  Payload ID: 17931
  Gene Name: trans-2,3-enoyl-CoA reductase
  ENST ID: ENST00000594545
  CDS Start-End: 606-735
gctctgtgcagggcgggggctgggaggtgttgtcatgcctgcccctggggctttccctgtgctggtgccgttgagggttttgaggtgaccactcaaaagctgctttcagggcagcctggctccccggggagactcccaagcccccctcagagaaggtggagattctggacgcaaagacaagggagaagctgtgtttcttggacaaggtggagccccacgccaccattgcggagatcaagaacctcttcactaagacccatccgcagtggtaccccgcccgccagtccctccgcctggaccccaagggcaagtccctgaaggatgaggatgttctgcagaagctgcccgtgggcaccacggccacactgtacttccgggacctgggggcccagatcagctgggtgacggtcttcctaacagagtacgcggggccccttttcatctacctgctcttctacttccgagtgcccttcatctatggccacaaatatgactttacgtccagtcggcatacagtggtgcacctcgcctgcatctgtcactcattccactacatcaagcgcctgctggagacgctcttcgtgcaccgcttctcccatggcactatgcctttgcgcaacatcttcaagaactgcacctactactggggcttcgccgcgtggatggcctattacatcaatcaccctctctacactccccctacctacggagctcagcaggtgaaactggcgctcg

SEQ ID NO: 191981 - DNA, 868 bp, Homo sapiens
  Payload ID: 17931
  Gene Name: trans-2,3-enoyl-CoA reductase
  ENST ID: ENST00000598298
  CDS Start-End: 728-868
cggacgcagagccgcgtttagtctatcgctgcggttgcgagcgctgtagggagcctgtgctgtgccgcgcagttaggcagcagcagccgcggagcagtagccgccgtgggagggagccatgaagcattacgagatgagactcaaagcaatgagcccagcagcaactggaaaaacagctactacatcttgtaattgagcctgttaattcctgagaaaatcagtctgtcttcagcctccagcagtccagggatatcaggctgacatctctaagtcacaggtggagattctggacgcaaagacaagggagaagctgtgtttcttggacaaggtggagccccacgccaccattgcggagatcaagaacctcttcactaagacccatccgcagtggtaccccgcccgccagtccctccgcctggaccccaagggcaagtccctgaaggatgaggatgttctgcagaagctgcccgtgggcaccacggccacactgtacttccgggacctgggggcccagatcagctgggtgacggtcttcctaacagagtacgcggggccccttttcatctacctgctcttctacttccgagtgcccttcatctatggccacaaatatgactttacgtccagtcggcatacagtggtgcacctcgcctgcatctgtcactcattccactacatcaagcgcctgctggagacgctcttcgtgcaccgcttctcccatggcactatgcctttgcgcaacatcttcaagaactgcacctactactggggcttcgccgcgtggatggcctattacatcaatcaccctctctacactccccctacctacggagctcagcaggtgaaactggcgctcgccatctttgtg

SEQ ID NO: 191982 - DNA, 1204 bp, Homo sapiens
  Payload ID: 17931
  Gene Name: trans-2,3-enoyl-CoA reductase
  ENST ID: ENST00000600083
  CDS Start-End: 634-1095
gtttagtctatcgctgcggttgcgagcgctgtagggagcctgtgctgtgccgcgcagttaggcagcagcagccgcggagcagtagccgccgtgggagggagccatgaagcattacgaggtggagattctggacgcaaagacaagggagaagctgtgtttcttggacaagtacctccccatcctgagtctgggctccccgcagagctgacgtccctgcgcctgtgcttcccccaggtggagccccacgccaccattgcggagatcaagaacctcttcactaagacccatccgcagtggtaccccgcccgccagtccctccgcctggaccccaagggcaagtccctgaaggatgaggatgttctgcagaagctgcccgtgggcaccacggccacactgtacttccgggacctgggggcccagatcagctgggtgacggtcttcctaacagagtacgcggggccccttttcatctacctgctcttctacttccgagtgcccttcatctatggccacaaatatgactttacgtccagtcggcatacagtggtgcacctcgcctgcatctgtcactcattccactacatcaagcgcctgctggagacgctcttcgtgcaccgcttctcccatggcactatgcctttgcgcaacatcttcaagaactgcacctactactggggcttcgccgcgtggatggcctattacatcaatcaccctctctacactccccctacctacggagctcagcaggtgaaactggcgctcgccatctttgtgatctgccagctcggcaacttctccatccacatggccctgcgggacctgcggcccgctgggtccaagacgcggaagatcccataccccaccaagaaccccttcacgtggctcttcctgctggtgtcctgccccaactacacctacgaggtggggtcctggatcggtttcgccatcatgacgcagtgtctcccagtggccctgttctccctggtgggcttcacccagatgaccatctgggccaagggcaagcaccgcagctacctgaaggagttccgggactacccgcccctgcgcatgcccatcatccccttcctgctctgagcgctcacccctgctgaggctcagcccctcaacccggtggcattctgggggaggagtggggcccacagctctccagcacccggaataaagcccgcctgccccagtcgga

SEQ ID NO: 191983 - DNA, 1202 bp, Homo sapiens
  Payload ID: 17931
  Gene Name: trans-2,3-enoyl-CoA reductase
  ENST ID: ENST00000598987
  CDS Start-End: 103-282
tttagtctatcgctgcggttgcgagcgctgtagggagcctgtgctgtgccgcgcagttaggcagcagcagccgcggagcagtagccgccgtgggagggagccatgaagcattacgagcagagagatgattcttcaagaaaccaaagcagcctgtggcattccagcgattcctcattgctcaagggtggagattctggacgcaaagacaagggagaagctgtgtttcttggacaaggtggagccccacgccaccattgcggagatcaagaacctcttcactaagacccatccgcagtggtaccccgcccgccagtccctccgcctggaccccaagggcaagtccctgaaggatgaggatgttctgcagaagctgcccgtgggcaccacggccacactgtacttccgggacctgggggcccagatcagctgggtgacggtcttcctaacagagtacgcggggccccttttcatctacctgctcttctacttccgagtgcccttcatctatggccacaaatatgactttacgtccagtcggcatacagtggtgcacctcgcctgcatctgtcactcattccactacatcaagcgcctgctggagacgctcttcgtgcaccgcttctcccatggcactatgcctttgcgcaacatcttcaagaactgcacctactactggggcttcgccgcgtggatggcctattacatcaatcaccctctctacactccccctacctacggagctcagcaggtgaaactggcgctcgccatctttgtgatctgccagctcggcaacttctccatccacatggccctgcgggacctgcggcccgctgggtccaagacgcggaagatcccataccccaccaagaaccccttcacgtggctcttcctgctggtgtcctgccccaactacacctacgaggtggggtcctggatcggtttcgccatcatgacgcagtgtctcccagtggccctgttctccctggtgggcttcacccagatgaccatctgggccaagggcaagcaccgcagctacctgaaggagttccgggactacccgcccctgcgcatgcccatcatccccttcctgctctgagcgctcacccctgctgaggctcagcccctcaacccggtggcattctgggggaggagtggggcccacagctctccagcacccggaataaagcccgcctgccccagtc

SEQ ID NO: 191984 - DNA, 1170 bp, Homo sapiens
  Payload ID: 17931
  Gene Name: trans-2,3-enoyl-CoA reductase
  ENST ID: ENST00000596073
  CDS Start-End: 603-1064
gcgtttagtctatcgctgcggttgcgagcgctgtagggagcctgtgctgtgccgcgcagttaggcagcagcagccgcggagcagtagccgccgtgggagggagccatgaagcattacgaggtggagattctggacgcaaagacaagggagaagctgtgtttcttggacaagagctgacgtccctgcgcctgtgcttcccccaggtggagccccacgccaccattgcggagatcaagaacctcttcactaagacccatccgcagtggtaccccgcccgccagtccctccgcctggaccccaagggcaagtccctgaaggatgaggatgttctgcagaagctgcccgtgggcaccacggccacactgtacttccgggacctgggggcccagatcagctgggtgacggtcttcctaacagagtacgcggggccccttttcatctacctgctcttctacttccgagtgcccttcatctatggccacaaatatgactttacgtccagtcggcatacagtggtgcacctcgcctgcatctgtcactcattccactacatcaagcgcctgctggagacgctcttcgtgcaccgcttctcccatggcactatgcctttgcgcaacatcttcaagaactgcacctactactggggcttcgccgcgtggatggcctattacatcaatcaccctctctacactccccctacctacggagctcagcaggtgaaactggcgctcgccatctttgtgatctgccagctcggcaacttctccatccacatggccctgcgggacctgcggcccgctgggtccaagacgcggaagatcccataccccaccaagaaccccttcacgtggctcttcctgctggtgtcctgccccaactacacctacgaggtggggtcctggatcggtttcgccatcatgacgcagtgtctcccagtggccctgttctccctggtgggcttcacccagatgaccatctgggccaagggcaagcaccgcagctacctgaaggagttccgggactacccgcccctgcgcatgcccatcatccccttcctgctctgagcgctcacccctgctgaggctcagcccctcaacccggtggcattctgggggaggagtggggcccacagctctccagcacccggaataaagcccgcctgccccagtc

SEQ ID NO: 191985 - DNA, 559 bp, Homo sapiens
  Payload ID: 17931
  Gene Name: trans-2,3-enoyl-CoA reductase
  ENST ID: ENST00000601187
  CDS Start-End: 1-453
agacgctcttcgtgcaccgcttctcccatggcactatgcctttgcgcaacatcttcaagaactgcacctactactggggcttcgccgcgtggatggcctattacatcaatcaccctctctacactccccctaatctgccagctcggcaacttctccatccacatggccctgcgggacctgcggcccgctgggtccaagacgcggaagatcccataccccaccaagaaccccttcacgtggctcttcctgctggtgtcctgccccaactacacctacgaggtggggtcctggatcggtttcgccatcatgacgcagtgtctcccagtggccctgttctccctggtgggcttcacccagatgaccatctgggccaagggcaagcaccgcagctacctgaaggagttccgggactacccgcccctgcgcatgcccatcatccccttcctgctctgagcgctcacccctgctgaggctcagcccctcaacccggtggcattctgggggaggagtggggcccacagctctccagcacccggaataaagcccgcctgccccagtc

SEQ ID NO: 191986 - DNA, 314 bp, Homo sapiens
  Payload ID: 17931
  Gene Name: trans-2,3-enoyl-CoA reductase
  ENST ID: ENST00000598918
  CDS Start-End: 112-228
ggtctccgtgtgacaagtacatccctgctgtgcttgggaaagggctgcggcttgggaaagggctgtgtgggttccctggcttcttcctgctgtccccgaggagcatcggaaatgggtcacaacgcagcaggtggagattctggacgcaaagacaagggagaagctgtgtttcttggacaaggtggagccccacgccaccattgcggagatcaagaacctcttcactaagacccatccgcagtggtaccccgcccgccagtccctccgcctggaccccaccctggcccgcctctctgcagagggcaagtccctga

SEQ ID NO: 191987 - DNA, 822 bp, Homo sapiens
  Payload ID: 17931
  Gene Name: trans-2,3-enoyl-CoA reductase
  ENST ID: ENST00000598333
  CDS Start-End: 62-379
tgctgtgccgcgcagttaggcagcagcagccgcggagcagtagccgccgtgggagggagccatgaagcattacgaggtggagattctggacgcaaagacaagggagaagctgtgtttcttggacaaggtggagccccacgccaccattgcggagatcaagaacctcttcactaagacccatccgcagtggtaccccgcccgccagtccctccgcctggaccccaaagctgcccgtgggcaccacggccacactgtacttccgggacctgggggcccagatcagctgggtgacggtcttcctaacagagtacgcggggccccttttcatctacctgctcttctacttccgagtgcccttcatctatggccacaaatatgactttacgtccagtcggcatacagtggtgcacctcgcctgcatctgtcactcattccactacatcaagcgcctgctggagacgctcttcgtgcaccgcttctcccatggcactatgcctttgcgcaacatcttcaagaactgcacctactactggggcttcgccgcgtggatggcctattacatcaatcaccctctctacactccccctacctacggagctcagcaggtgaaactggcgctcgccatctttgtgatctgccagctcggcaacttctccatccacatggccctgcgggacctgcggcccgctgggtccaagacgcggaagatcccataccccaccaagaaccccttcacgtggctcttcctgctggtgtcctgccccaactacacctacgaggtggggtcctggatcggtttcgccatcatgacgcagtgtctcc

SEQ ID NO: 191988 - DNA, 3573 bp, Homo sapiens
  Payload ID: 17932
  Gene Name: trans-2,3-enoyl-CoA reductase-like
  Uniprot ID: Q5HYJ1
  ENST ID: ENST00000381210
  CDS Start-End: 112-1203
gcataccatttgacctttcaaaggttctccagcagtatttaactgatgcaaaaggaacacacttgcaattttctacttttgacatgacagaccctcctcttagttcacacaatgttcaaaaggcacaagtccctcgcttcggaacgcaagagagcattactttcccaaagagctacacggttcatactgaaggatgatatgagaaattttcactttttgtcaaaacttgtactctcagcgggccctctaagaccaactccagcagtcaaacattcaaaaacgactcactttgagattgaaatatttgatgctcaaacaaggaaacagatatgtattctggataaggtgacacaatcatctactattcatgatgttaagcaaaagtttcacaaagcatgtccaaagtggtacccttctcgagttggtctgcagctagaatgtggcgggccttttttgaaggactacattaccattcaaagtattgcagcttcctccattgtcacactgtatgctacagacctaggtcaacaagtcagttggaccacagtgtttttggctgaatacacaggacctctgctaatatacctcctcttttatttgaggatcccatgtatatatgatggaaaagagagtgctagaagattacgccacccagtggtacacttggcttgcttctgtcattgtatacactacatccgataccttttggaaaccttatttgttcacaaagtttctgcaggacacacacctttgaaaaatttgataatgagttgtgccttttactggggatttacttcttggattgcctactacattaatcatccactatatacaccaccatcatttggaaacaggcaaatcacagtatctgctatcaattttctgatttgtgaagctgggaatcatttcatcaatgtaatgttgtctcatcccaatcacacaggaaacaatgcctgtttcccaagtccaaattataaccccttcacatggatgtttttcctggtttcatgtcctaactacacctatgagattggatcatggattagtttcacagtcatgacacaaacactgccagttggaatttttacacttctgatgagtatccagatgtctttgtgggcacaaaagaaacataagatttatctgagaaaattcaattcatatattcatagaaaatcagcaatgattccattcatattgtaaaaaaagaatcttatctcctatagaaaacagcaacatataaattcaataaataagacttagttaaggatagttaactattatactccaacaattcatgagcaacagtatatacactgagtaaaaatataaaatagtaaaatttcactaaatttagagaaatgcacatggtaataaaaagtataaattataaatgcaattaactaagaacagctctgaatgtatttgcatgggattggtccttgaataaaattgtcttacttcattaatacttcacaatactatttgcataagacaaaataccacagcaaaaaaaaaaatctgattaacaaatgaaaaagcgatctgaacagacatttcccaaaggaagacatatacatggtcaataagtatatttttaaaatgctcaacattaactattcatacagaaatgcaaatcaaaaccacaatgagatatcatctcatcctaattaaggtgactattttcaaaaagacaaaaaatatgacagccgtggtggttcatatctgtaatcctaacactttgacaggccaaggcaggggaattgcttgagttcagaagtttgagatctgggcaacatattgagactctgtctctaaaaagcatattgagactctgtctctacaaaaaaattttaaaaagtaaaaattagctgggcgtggtggcacatgccagtaggtagtcccagctactcgaggttgctccagctcaggcgttcaaggctacagagagccatgattaaaccaaggcactccagcctgggtgacagagtgagactgtctcaaaataaaataaaaataacatattggtgaagatgcgggaaaaaaaaaagaactcttagacactgctggtgggaatgtaaactagagcagccatgtggagaacaacatggactttcttcaaaaattacaaatagaactatcatatgatccagcaataccattactggaaaaaggaaatctgtatattaaagagacatttgaaccctatgtttactgcagcactattcacaatagccaagatataggagcaacctaggtgtccaacaacagatgaatggataaagaaaatgtggtatatatacacaatagaatactatgcagccataaaaactgaattcctgtcattcaggacaacatggatggaattggagggcatatgttaagtgaaacaagccaggaacagaaagttaaacattgcatgttattacttatatgtggaagctaaaaaaattgatatcatagaagtaaaaaataaaacagaggatactacaggctgggaaagctgcagcaaagggagactagagagagatttgttaaaggatacaaagttacagcttggtaggaggaataatttctggtgttctataccactgtaggacgactatagttaagaacattatattccatttagtttcaaatagctaaaaggagattttgtccccaacaaaaagaaatgataaatatttgaaaccatggatactctaatttctctgatctgaccactataaattatatgtattgaaacattattatgtatctcccaaatatgttcaattcttatgtcgctcaaaaaataaaatttaatttaaaaagtatctgatttttaaagtaaatattttttaaagttttgacatttaaattacttgaatctcattattttgacaataatttaattcttttattgttcaatctgttagtgagatgtgtcataggtattatgtcattagttcaaattcttgcggaaattatagctatattaaaagtgtaacatttttatttagttgtgtacttatttgttaataatacagacattgtatgttatcatactgaaatttacaattaaaatattttctgtagattatttgaaaatcattctaaatatatattttgaaatatatagattatatttgtatgtaaattatatttatacatcttctgaaatatatttcaaaatatgtgtgtacgtgtgtatatgtgtatatatatacacatatatatacacatacacaaatatatgcatatttcaaatggattgtatgcacttgcaaagcaaaagtacattggtaatttgggcacattcagagtggaaaaaatttgttctatttttacatctttaaatacctatcttctatgaaagcctatgtgcatgtgtgtgtgtgtatgagtttctatgtgagcatgcatatatacttcacaaagagatgacctatataaatcaaagtacacattatttaaaatatttaaaaaaattttcagtttcttcatttttaaattgtgatttttagatttgttagtctatggagtattttcaattctcagattatacatatgttataaaatatgttcattaaa

SEQ ID NO: 191989 - DNA, 484 bp, Homo sapiens
  Payload ID: 17932
  Gene Name: trans-2,3-enoyl-CoA reductase-like
  ENST ID: ENST00000509536
  CDS Start-End: 48-484
gcaattttctacttttgacatgacagaccctcctcttagttcacacaatgttcaaaaggcacaagtccctcgcttcggaacgcaagagagcattactttcccaaagagctacacggttcatactgaaggatgatatgagaaattttcactttttgtcaaaacttgtactctcagcgggccctctaagaccaactccagcagtcaaacattcaaaaacgactcactttgagattgaaatatttgatgctcaaacaaggaaacagatatgtattctggataaggtgacacaatcatctactattcatgatgttaagcaaaagtttcacaaagcatgtccaaagtggtacccttctcgagttggtctgcagctagaatgtggcgggccttttttgaaggactacattaccattcaaagtattgcagcttcctccattgtcacactgtatgctacagacctaggtcaacaagtcagttggaccacagt

SEQ ID NO: 191990 - DNA, 188 bp, Homo sapiens
  Payload ID: 17932
  Gene Name: trans-2,3-enoyl-CoA reductase-like
  ENST ID: ENST00000511997
  CDS Start-End: 1-84
ccaaattataaccccttcacatggatgtttttcctggtttcatgtcctaactacacctatgagttggaatttttacacttctgatgagtatccagatgtctttgtgggcacaaaagaaacataagatttatctgagaaaattcaattcatatattcatagaaaatcagcaatgattccattcatattg

SEQ ID NO: 191991 - DNA, 2876 bp, Homo sapiens
  Payload ID: 17932
  Gene Name: trans-2,3-enoyl-CoA reductase-like
  ENST ID: ENST00000507440
  CDS Start-End: 118-1098
ggaatggcataccatttgacctttcaaaggttctccagcagtatttaactgatgcaaaaggaacacacttgcaattttctacttttgacatgacagaccctcctcttagttcacacaatgttcaaaaggcacaagtccctcgcttcggaacgcaagagagcattactttcccaaagagctacacggttcatactgaaggatgatatgagaaattttcactttttgtcaaaacttgtactctcagcgggccctctaagaccaactccagcagtcaaacattcaaaaacgactcactttgagattgaaatatttgatgctcaaacaaggaaacagatatgtattctggataaggtgacacaatcatctactattcatgatgttaagcaaaagtttcacaaagcatgtccaaagtggtacccttctcgagttggtctgcagctagaatgtggcgggccttttttgaaggactacattaccattcaaagtattgcagcttcctccattgtcacactgtatgctacagacctaggtcaacaagtcagttggaccacagtgtttttggctgaatacacaggacctctgctaatatacctcctcttttatttgaggatcccatgtatatatgatggaaaagagagtgctagaagattacgccacccagtggtacacttggcttgcttctgtcattgtatacactacatccgataccttttggaaaccttatttgttcacaaagtttctgcaggacacacacctttgaaaaatttgataatgagttgtgccttttactggggatttacttcttggattgcctactacattaatcatccactatatacaccaccatcatttggaaacaggcaaatcacagtatctgctatcaattttctgatttgtgaagctgggaatcatttcatcaatgtaatgttgtctcatcccaatcacacaggaaacaatgcctgtttcccaagtccaaattataaccccttcacatggatgtttttcctggtttcatgtcctaactacacctatgagattggatcatggattagtttcacagtcatgacacaaacactgccaggtggtctcactgcctaagacatcaaaagaaaaagcctgacaaatttacaccatcttgttgtcaatattaatgctacaggtataatcctgtagcagccatgtacacatttttagcctttaaaacctaaccttcatttacaggttttaggagttactatacataagtatgtacacatatgcatatgtatatgggtatgtgtgtaaatgtgcacacttacaaactttaatgatactctaaattaatatataagatttatgtaaataataagtttgcattgctggctaaaatattgtgcatttattttaatataaaacaaatctatataatctcacatattcatggttttttgccacatatctaagtaacttaattttagcttatggagtattttgcaggagcagcattcaacactgcatagattagttgtaagtgtctcaattacatttacatatcagtgtgtttggtggggaaagaagatgaaaaataaaacatttgaatataaaattaaaataaataaaatatgacatttatttatgatagatgtcataatttgatcatattcataggaaaaacattaatgaaaaatttaaatgcagaaaaatatatacacacattatacaaattaacaataacattactaccacagttacttattgaagtaatatgctgtctttaatatgtttcattataccatgttctctcagagttaacactctcatcctataaataaaagatatattctcaaattctaaaattcttgtgtgtgtattttcaacagttgttatttttaggtcaagaaaaatattatgacaatattagcaactgttaaattctatgctttgagacgtataggcctcatttctaatttaataaggtatgtatatatttgatattttcataaaagcaatacagggtttggccaagaagttttgccgtctgtgaaaggcatgcatttgatgctattataagccatattaactggagaacatttctaaaatacctccatttcacatgcaaattttatactctatatattgatggatttgtttatgagattgagagtcagatgtagcaattggtgagagaggaaacagttacaaggcagcctctactttttagatagttcgcttgtttaagagacaaaacaagttcaactttaattgaaatattgcatatttgcttgcttaattactgttaaaccttaaattaaatattctttataataagcatgtcttcgaacatgaaataaaattaacaagtctgagagtgaaacttttcccattatgagagacattttagtcagcctcatcacaagaagacttttgctttcctcaaaccatcccatatttctttttgacacttgaaagtatgcctctgcttcctgtatttcttttaaacattctggagcttttgttgttttgttgtaactgttgccaaatttataattgttagatgacaaatgtccttaacaagtgtttttcagtaattgtgcctaaagaaatacaattataattgccatcaaactaatttggtatgcatgcttttacctcccaaaccataaattgtcctcttccttcaggacactgtaaaccttgaattagaatcaaatcaacaatttccattattgtaatgtagaaatcagttcattttttaaacacaggaatcaaagactgcctggcttacatatcctaaacagttttaatatgaaaaaaagatatataaatgtttagaaaaaaaattagtagaattaattaaaatcaattagaatatgtgtattaaaagcaatattaagttg

SEQ ID NO: 191992 - DNA, 1346 bp, Homo sapiens
  Payload ID: 17933
  Gene Name: transaldolase 1
  Uniprot ID: P37837
  ENST ID: ENST00000319006
  CDS Start-End: 154-1167
cccgggggcggggcttcgtccaggcgcgcagggaccagcgggcctcgccctcccgcgccgctttccgattggcagccgcccgcggggcattgtgggccgtccgcgcgcccgtcccgtcgccgccgccgccgccgcagacccctcggtcttgctatgtcgagctcacccgtgaagcgtcagaggatggagtccgcgctggaccagctcaagcagttcaccaccgtggtggccgacacgggcgacttccacgccatcgacgagtacaagccccaggatgctaccaccaacccgtccctgatcctggccgcagcacagatgcccgcttaccaggagctggtggaggaggcgattgcctatggccggaagctgggcgggtcacaagaggaccagattaaaaatgctattgataaactttttgtgttgtttggagcagaaatactaaagaagattccgggccgagtatccacagaagtagacgcaaggctctcctttgataaagatgcgatggtggccagagccaggcggctcatcgagctctacaaggaagctgggatcagcaaggaccgaattcttataaagctgtcatcaacctgggaaggaattcaggctggaaaggagctcgaggagcagcacggcatccactgcaacatgacgttactcttctccttcgcccaggctgtggcctgtgccgaggcgggtgtgaccctcatctccccatttgttgggcgcatccttgattggcatgtggcaaacaccgacaagaaatcctatgagcccctggaagaccctggggtaaagagtgtcactaaaatctacaactactacaagaagtttagctacaaaaccattgtcatgggcgcctccttccgcaacacgggcgagatcaaagcactggccggctgtgacttcctcaccatctcacccaagctcctgggagagctgctgcaggacaacgccaagctggtgcctgtgctctcagccaaggcggcccaagccagtgacctggaaaaaatccacctggatgagaagtctttccgttggttgcacaacgaggaccagatggctgtggagaagctctctgacgggatccgcaagtttgccgctgatgcagtgaagctggagcggatgctgacagaacgaatgttcaatgcagagaatggaaagtagcgcatccctgaggctggactccagatctgcaccgccggccagctgggatctgactgcacgtggcttctgatgaatcttgcgttttttacaaattggagcagggacagatcatagatttctgattttatgtaaaattttgcctaatacattaaagcagtcacttttcctgtgctgtttca

SEQ ID NO: 191993 - DNA, 710 bp, Homo sapiens
  Payload ID: 17933
  Gene Name: transaldolase 1
  ENST ID: ENST00000530440
  CDS Start-End: 29-310
ccgccgccgcagacccctcggtcttgctatgtcgagctcacccgtgaagcgtcagaggatggagtccgcgctggaccagctcaagcagttcaccaccgtggtggccgacacgggcgacttccacgccatcgacgagtacaagccccaggatgctaccaccaacccgtccctgatcctggccgcagcacagatgcccgcttaccaggagctggtggaggaggcgattgcctatggccggaagctgggcggaaatactaaagaagattccgggccgagtatccacagaagtagacgcaaggctctcctttgataaagatgcgatggtggccagagccaggcggctcatcgagctctacaaggaagctgggatcagcaaggaccgaattcttataaagctgtcatcaacctgggaaggaattcaggctggaaaggagctcgaggagcagcacggcatccactgcaacatgacgttactcttctccttcgcccaggctgtggcctgtgccgaggcgggtgtgaccctcatctccccatttgttgggcgcatccttgattggcatgtggcaaacaccgacaagaaatcctatgagcccctggaagaccctggggtaaagagtgtcactaaaatctacaactactacaagaagtttagctacaaaaccattgtcatgggcgcctccttccgcaacacgggcgagatcaaagcactg

SEQ ID NO: 191994 - DNA, 856 bp, Homo sapiens
  Payload ID: 17933
  Gene Name: transaldolase 1
  ENST ID: ENST00000528070
  CDS Start-End: 68-220
gcattgtgggccgtccgcgcgcccgtcccgtcgccgccgccgccgccgcagacccctcggtcttgctatgtcgagctcacccgtgaagcgtcagaggatggagtccgcgctggaccagctcaagcagttcaccaccgtggtggccgacacgggcgacttccacgtagagatggggtttcaccgtgttagccaggatggtctggatctcctgacctcgtgatctgcccgcctcggcctcctaaagtgctgggattacaggcaccagccaccgcgcccggccgtctacttgcttttctaattgtgggtcctaagaccctcatttcaaaaggggtcccatcacataccctggaggaaggaatgttgcacggaggacgccatcgacgagtacaagccccaggatgctaccaccaacccgtccctgatcctggccgcagcacagatgcccgcttaccaggagctggtggaggaggcgattgcctatggccggaagctgggcggaaatactaaagaagattccgggccgagtatccacagaagtagacgcaaggctctcctttgataaagatgcgatggtggccagagccaggcggctcatcgagctctacaaggaagctgggatcagcaaggaccgaattcttataaagctgtcatcaacctgggaaggaattcaggctggaaaggagctcgaggagcagcacggcatccactgcaacatgacgttactcttctccttcgcccaggctgtggcctgtgccgaggcgggtgtgaccctcatctccccatttgttgggcgcatccttgattggcatgtggcaaacaccgacaagaaatcctatgagcccctggaagaccctgg

SEQ ID NO: 191995 - DNA, 1231 bp, Homo sapiens
  Payload ID: 17933
  Gene Name: transaldolase 1
  ENST ID: ENST00000528097
  CDS Start-End: 55-1011
tccgcgcgcccgtcccgtcgccgccgccgccgccgcagacccctcggtcttgctatgtcgagctcacccgtgaagcgtcagaggatggagtccgcgctggaccagctcaagcagttcaccaccgtggtggccgacacgggcgacttccacgccatcgacgagtacaagccccaggatgctaccaccaacccgtccctgatcctggccgcagcacagatgcccgcttaccaggagctggtggaggaggcgattgcctatggccggaagctgggcgggtcacaagaggaccagattaaaaatgctattgataaactttttgtgttgtttggagcagaaatactaaagaagattccgggccgagtatccacagaagtagacgcaaggctctcctttgataaagatgcgatggtggccagagccaggcggctcatcgagctctacaaggaagctgggatcagcaaggaccgaattcttataaagctgtcatcaacctgggaaggaattcaggctggaaaggagctcgaggagcagcacggcatccactgcaacatgacgttactcttctccttcgcccaggctgtggcctgtgccgaggcgggtgtgaccctcatctccccatttgttgggcgcatccttgattggcatgtggcaaacaccgacaagaaatcctatgagcccctggaagaccctggggtaaagagtgtcactaaaatctacaactactacaagaagtttagctacaaaaccattgtcatgggcgcctccttccgcaacacgggcgagatcaaagcactggccggctgtgacttcctcaccatctcacccaagctcctgggagagctgctgcaggacaacgccaagctggtgcctgtgctctcagccaagcccaagccagtgacctggaaaaaatccacctggatgagaagtctttccgttggttgcacaacgaggaccagatggctgtggagaagctctctgacgggatccgcaagtttgccgctgatgcagtgaagctggagcggatgctgacagaacgaatgttcaatgcagagaatggaaagtagcgcatccctgaggctggactccagatctgcaccgccggccagctgggatctgactgcacgtggcttctgatgaatcttgcgttttttacaaattggagcagggacagatcatagatttctgattttatgtaaaattttgcctaatacattaaagcagtcacttttcc

SEQ ID NO: 191996 - DNA, 1582 bp, Homo sapiens
  Payload ID: 17934
  Gene Name: transcobalamin I (vitamin B12 binding protein, R binder family)
  Uniprot ID: P20061
  ENST ID: ENST00000257264
  CDS Start-End: 106-1407
gaaaagaggctgaggcaacctgaaggaggagctctcattaccttctgcccatcacttaataaatagccagccaattcatcaacattctggtacactgttggagagatgagacagtcacaccagctgcccctagtggggctcttactgttttcttttattccaagccaactatgcgagatttgtgaggtaagtgaagaaaactacatccgcctaaaacctctgttgaatacaatgatccagtcaaactataacaggggaaccagcgctgtcaatgttgtgttgtccctcaaacttgttggaatccagatccaaaccctgatgcaaaagatgatccaacaaatcaaatacaatgtgaaaagcagattgtcagatgtaagctcgggagagcttgccttgattatactggctttgggagtatgtcgtaacgctgaggaaaacttaatatatgattaccacctgatcgacaagctagaaaataaattccaagcagaaattgaaaatatggaagcacacaatggcactcccctgactaactactaccagctcagcctggacgttttggccttgtgtctgttcaatgggaactactcaaccgccgaagttgtcaaccacttcactcctgaaaataaaaactattattttggtagccagttctcagtagatactggtgcaatggctgtcctggctctgacctgtgtgaagaagagtctaataaatgggcagatcaaagcagatgaaggcagtttaaagaacatcagtatttatacaaagtcactggtagaaaagattctgtctgagaaaaaagaaaatggtctcattggaaacacatttagcacaggagaagccatgcaggccctctttgtatcatcagactattataatgaaaatgactggaattgccaacaaactctgaatacagtgctcacggaaatttctcaaggagcattcagcaatccaaacgctgcagcccaggtcttacctgccctgatgggaaagaccttcttggatattaacaaagactcttcttgcgtctctgcttcaggtaacttcaacatctccgctgatgagcctataactgtgacacctcctgactcacaatcatatatctccgtcaattactctgtgagaatcaatgaaacatatttcaccaatgtcactgtgctaaatggttctgtcttcctcagtgtgatggagaaagcccagaaaatgaatgatactatatttggtttcacaatggaggagcgctcatgggggccctatatcacctgtattcagggcctatgtgccaacaataatgacagaacctactgggaacttctgagtggaggcgaaccactgagccaaggagctggtagttacgttgtccgcaatggagaaaacttggaggttcgctggagcaaatactaataagcccaaactttcctcagctgcataaaatccatttgcagtggagttccatgtttattgtccttatgccttcttcttcatttatcccagtacgagcaggagagttaataacctccccttctctctctacatgttcaataaaagttgttgaaagattaacaactatacaaaaaga

SEQ ID NO: 191997 - DNA, 2535 bp, Homo sapiens
  Payload ID: 17935
  Gene Name: transcobalamin II
  Uniprot ID: P20062
  ENST ID: ENST00000215838
  CDS Start-End: 495-1778
actccttgtcctgggctaggtgggcactaccaggggctcctttggtaaggagtaccgggtaggcacccggtcctgccaatccaccactggaacagctggggggacagcagacaggcacggtcggacagacttgacagatcaggcatcaggccctctgcgctggtcccgggctctttaagcaggaacgtgaatggcctcaagatgtctcacatggtcccactagccctcctcctccctttgttccctacctccaggagggctgctctgcccttccttcctctgttctttggccttatgttccccgccaccacagaccttcccccgccccacccctctgcagacttagccgtgcattgcaggcatggaggattaatcagtgacaggaagctgcgtctctcggagcggtgaccagctgtggtcaggagagcctcagcagggccagccccaggagtctttcccgattcttgctcactgctcacccacctgctgctgccatgaggcaccttggggccttcctcttccttctgggggtcctgggggccctcactgagatgtgtgaaataccagagatggacagccatctggtagagaagttgggccagcacctcttaccttggatggaccggctttccctggagcacttgaaccccagcatctatgtgggcctacgcctctccagtctgcaggctgggaccaaggaagacctctacctgcacagcctcaagcttggttaccagcagtgcctcctagggtctgccttcagcgaggatgacggtgactgccagggcaagccttccatgggccagctggccctctacctgctcgctctcagagccaactgtgagtttgtcaggggccacaagggggacaggctggtctcacagctcaaatggttcctggaggatgagaagagagccattgggcatgatcacaagggccacccccacactagctactaccagtatggcctgggcattctggccctgtgtctccaccagaagcgggtccatgacagcgtggtggacaaacttctgtatgctgtggaacctttccaccagggccaccattctgtggacacagcagccatggcaggcttggcattcacctgtctgaagcgctcaaacttcaaccctggtcggagacaacggatcaccatggccatcagaacagtgcgagaggagatcttgaaggcccagacccccgagggccactttgggaatgtctacagcaccccattggcattacagttcctcatgacttcccccatgcgtggggcagaactgggaacagcatgtctcaaggcgagggttgctttgctggccagtctgcaggatggagccttccagaatgctctcatgatttcccagctgctgcccgttctgaaccacaagacctacattgatctgatcttcccagactgtctggcaccacgagtcatgttggaaccagctgctgagaccattcctcagacccaagagatcatcagtgtcacgctgcaggtgcttagtctcttgccgccgtacagacagtccatctctgttctggccgggtccaccgtggaagatgtcctgaagaaggcccatgagttaggaggattcacatatgaaacacaggcctccttgtcaggcccctacttaacctccgtgatggggaaagcggccggagaaagggagttctggcagcttctccgagaccccaacaccccactgttgcaaggtattgctgactacagacccaaggatggagaaaccattgagctgaggctggttagctggtagcccctgagctccctcatcccagcagcctcgcacactccctaggcttctaccctccctcctgatgtccctggaacaggaactcgcctgaccctgctgccacctcctgtgcactttgagcaatgccccctgggatcaccccagccacaagcccttcgagggccctataccatggcccaccttggagcagagagccaagcatcttccctgggaagtctttctggccaagtctggccagcctggccctgcaggtctcccatgaaggccaccccatggtctgatgggcatgaagcatctcagactccttggcaaaaaacggagtccgcaggccgcaggtgttgtgaagaccactcgttctgtggttggggtcctgcaagaaggcctcctcagcccgggggctatggccctgaccccagctctccactctgctgttagagtggcagctccgagctggttgtggcacagtagctggggagacctcagcagggctgctcagtgcctgcctctgacaaaattaaagcattgatggcctgtggacctgctacagtggcctggtgcctcatactcctcaggtgcaggggcagggacaagagaagggggaagtaaccccatcagggaggagtggagggtgcctgagccgccatgtgggcattgggggagtgatgggaatgccagcagtgatgacattgactactgactgagcacccactactatgactgagcactcactcgctagatactatcttgaactgctctgtga

SEQ ID NO: 191998 - DNA, 1870 bp, Homo sapiens
  Payload ID: 17935
  Gene Name: transcobalamin II
  Uniprot ID: P20062
  ENST ID: ENST00000407817
  CDS Start-End: 129-1331
ggattaatcagtgacaggaagctgcgtctctcggagcggtgaccagctgtggtcaggagagcctcagcagggccagccccaggagtctttcccgattcttgctcactgctcacccacctgctgctgccatgaggcaccttggggccttcctcttccttctgggggtcctgggggccctcactgagatgtgtgaaataccagagatggacagccatctggtagagaagttgggccagcacctcttaccttggatggaccggctttccctggagcacttgaaccccagcatctatgtgggcctacgcctctccagtctgcaggctgggaccaaggaagacctctacctgcacagcctcaagcttggttaccagcagtgcctcctagggtctgccttcagcgaggatgacggtgactgccagggcaagccttccatgggccagctggccctctacctgctcgctctcagagccaactggcatgatcacaagggccacccccacactagctactaccagtatggcctgggcattctggccctgtgtctccaccagaagcgggtccatgacagcgtggtggacaaacttctgtatgctgtggaacctttccaccagggccaccattctgtggacacagcagccatggcaggcttggcattcacctgtctgaagcgctcaaacttcaaccctggtcggagacaacggatcaccatggccatcagaacagtgcgagaggagatcttgaaggcccagacccccgagggccactttgggaatgtctacagcaccccattggcattacagttcctcatgacttcccccatgcgtggggcagaactgggaacagcatgtctcaaggcgagggttgctttgctggccagtctgcaggatggagccttccagaatgctctcatgatttcccagctgctgcccgttctgaaccacaagacctacattgatctgatcttcccagactgtctggcaccacgagtcatgttggaaccagctgctgagaccattcctcagacccaagagatcatcagtgtcacgctgcaggtgcttagtctcttgccgccgtacagacagtccatctctgttctggccgggtccaccgtggaagatgtcctgaagaaggcccatgagttaggaggattcacatatgaaacacaggcctccttgtcaggcccctacttaacctccgtgatggggaaagcggccggagaaagggagttctggcagcttctccgagaccccaacaccccactgttgcaaggtattgctgactacagacccaaggatggagaaaccattgagctgaggctggttagctggtagcccctgagctccctcatcccagcagcctcgcacactccctaggcttctaccctccctcctgatgtccctggaacaggaactcgcctgaccctgctgccacctcctgtgcactttgagcaatgccccctgggatcaccccagccacaagcccttcgagggccctataccatggcccaccttggagcagagagccaagcatcttccctgggaagtctttctggccaagtctggccagcctggccctgcaggtctcccatgaaggccaccccatggtctgatgggcatgaagcatctcagactccttggcaaaaaacggagtccgcaggccgcaggtgttgtgaagaccactcgttctgtggttggggtcctgcaagaaggcctcctcagcccgggggctatggccctgaccccagctctccactctgctgttagagtggcagctccgagctggttgtggcacagtagctggggagacctcagcagggctgctcagtgcctgcctctgacaaaattaaagcattgatggcctgtggacctgc

SEQ ID NO: 191999 - DNA, 1936 bp, Homo sapiens
  Payload ID: 17935
  Gene Name: transcobalamin II
  ENST ID: ENST00000405742
  CDS Start-End: 181-1452
ccttcccccgccccacccctctgcagacttagccgtgcattgcaggcatggaggattaatcagtgacaggaagctgcgtctctcggagcggtgaccagctgtggtcaggagagcctcagcagggccagccccaggagtctttcccgattcttgctcactgctcacccacctgctgctgccatgaggcaccttggggccttcctcttccttctgggggtcctgggggccctcactgagatgtgtgaaataccagagatggacagccatctggtagagaagttgggccagcacctcttaccttggatggaccggctttccctggagcacttgaaccccagcatctatgtgggcctacgcctctccagtctgcaggctgggaccaaggaagacctctacctgcacagcctcaagcttggttaccagcagtgcctcctaggcgaggatgacggtgactgccagggcaagccttccatgggccagctggccctctacctgctcgctctcagagccaactgtgagtttgtcaggggccacaagggggacaggctggtctcacagctcaaatggttcctggaggatgagaagagagccattgggcatgatcacaagggccacccccacactagctactaccagtatggcctgggcattctggccctgtgtctccaccagaagcgggtccatgacagcgtggtggacaaacttctgtatgctgtggaacctttccaccagggccaccattctgtggacacagcagccatggcaggcttggcattcacctgtctgaagcgctcaaacttcaaccctggtcggagacaacggatcaccatggccatcagaacagtgcgagaggagatcttgaaggcccagacccccgagggccactttgggaatgtctacagcaccccattggcattacagttcctcatgacttcccccatgcgtggggcagaactgggaacagcatgtctcaaggcgagggttgctttgctggccagtctgcaggatggagccttccagaatgctctcatgatttcccagctgctgcccgttctgaaccacaagacctacattgatctgatcttcccagactgtctggcaccacgagtcatgttggaaccagctgctgagaccattcctcagacccaagagatcatcagtgtcacgctgcaggtgcttagtctcttgccgccgtacagacagtccatctctgttctggccgggtccaccgtggaagatgtcctgaagaaggcccatgagttaggaggattcacatatgaaacacaggcctccttgtcaggcccctacttaacctccgtgatggggaaagcggccggagaaagggagttctggcagcttctccgagaccccaacaccccactgttgcaaggtattgctgactacagacccaaggatggagaaaccattgagctgaggctggttagctggtagcccctgagctccctcatcccagcagcctcgcacactccctaggcttctaccctccctcctgatgtccctggaacaggaactcgcctgaccctgctgccacctcctgtgcactttgagcaatgccccctgggatcaccccagccacaagcccttcgagggccctataccatggcccaccttggagcagagagccaagcatcttccctgggaagtctttctggccaagtctggccagcctggccctgcaggtctcccatgaaggccaccccatggtctgatgggcatgaagcatctcagactccttggcaaaaaacggagtccgcaggccgcaggtgttgtgaagaccactcgttctgtggttggggtcctgcaagaaggcctcctcagcccgggggctatggccctgaccccagctctccactctgctgttagagtggcagctccgagctggttgtggcacagtagctggggagacctcagcagg

SEQ ID NO: 192000 - DNA, 2159 bp, Homo sapiens
  Payload ID: 17935
  Gene Name: transcobalamin II
  ENST ID: ENST00000450638
  CDS Start-End: 426-1634
tacctccaggagggctgctctgcccttccttcctctgttctttggccttatgttccccgccaccacagaccttcccccgccccacccctctgcagacttagccgtgcattgcaggcatggaggattaatcagtgacaggaagctgcgtctctcggagcggtgaccagctgtggtcaggagagcctcagcagggccagccccaggagtctttcccgattcttgctcactgctcacccacctgctgctgccatgaggcaccttggggccttcctcttccttctgggggtcctgggggccctcactgagatgtgtgagatggcaggaaaggcgttattttgagatctgcatggaggaagttcaccaggcagcctcaattcaccagctggaagtttgcgttgtttggaaatttgatgtaaataccagagatggacagccatctggtagagaagttgggccagcacctcttaccttggatggaccggctttccctggagcacttgaaccccagcatctatgtgggcctacgcctctccagtctgcaggctgggaccaaggaagacctctacctgcacagcctcaagcttggttaccagcagtgcctcctagggtctgccttcagcgaggatgacggtgactgccagggcaagccttccatgggccagctggccctctacctgctcgctctcagagccaactgtgagtttgtcaggggccacaagggggacaggctggtctcacagctcaaatggttcctggaggatgagaagagagccattgggcatgatcacaagggccacccccacactagctactaccagtatggcctgggcattctggccctgtgtctccaccagaagcgggtccatgacagcgtggtggacaaacttctgtatgctgtggaacctttccaccagggccaccattctgtggacacagcagccatggcaggcttggcattcacctgtctgaagcgctcaaacttcaaccctggtcggagacaacggatcaccatggccatcagaacagtgcgagaggagatcttgaaggcccagacccccgagggccactttgggaatgtctacagcaccccattggcattacagttcctcatgacttcccccatgcgtggggcagaactgggaacagcatgtctcaaggcgagggttgctttgctggccagtctgcaggatggagccttccagaatgctctcatgatttcccagctgctgcccgttctgaaccacaagacctacattgatctgatcttcccagactgtctggcaccacgagtcatgttggaaccagctgctgagaccattcctcagacccaagagatcatcagtgtcacgctgcaggtgcttagtctcttgccgccgtacagacagtccatctctgttctggccgggtccaccgtggaagatgtcctgaagaaggcccatgagttaggaggattcacatatgaaacacaggcctccttgtcaggcccctacttaacctccgtgatggggaaagcggccggagaaagggagttctggcagcttctccgagaccccaacaccccactgttgcaaggtattgctgactacagacccaaggatggagaaaccattgagctgaggctggttagctggtagcccctgagctccctcatcccagcagcctcgcacactccctaggcttctaccctccctcctgatgtccctggaacaggaactcgcctgaccctgctgccacctcctgtgcactttgagcaatgccccctgggatcaccccagccacaagcccttcgagggccctataccatggcccaccttggagcagagagccaagcatcttccctgggaagtctttctggccaagtctggccagcctggccctgcaggtctcccatgaaggccaccccatggtctgatgggcatgaagcatctcagactccttggcaaaaaacggagtccgcaggccgcaggtgttgtgaagaccactcgttctgtggttggggtcctgcaagaaggcctcctcagcccgggggctatggccctgaccccagctctccactctgctgttagagtggcagctccgagctggttgtggcacagtagctggggagacctcagcagggctgctcagtgcctgcctctgacaaaattaaagcattgatg

SEQ ID NO: 192001 - DNA, 2988 bp, Homo sapiens
  Payload ID: 17936
  Gene Name: transcription elongation factor A (SII) N-terminal and central domain containing
  Uniprot ID: Q8N8B7
  ENST ID: ENST00000380600
  CDS Start-End: 88-1143
tgtgaggattgagatgactggagtgtgtgtggcctggagagttgctcaataaatatatgttgccttccactgtgaagagctgtaaagatgtctgacaagaaccagatagctgccagagcttctcttattgagcaactgatgtccaaaaggaattttgaggatcttggcaaccaccttactgagctagaaacaatttatgtgactaaggagcatctccaggagacagatgtggtcagagctgtgtacagagtcctcaaaaactgcccctctgtggctttgaaaaagaaagccaagtgtttgctatcaaagtggaaagctgtttataagcagactcactccaaagcgaggaacagccctaaattatttcctgtgaggggtaataaagaagaaaattcaggaccttctcatgacccaagtcagaatgagacactgggcatctgcagctcgaattctctgtcttcccaagacgttgcaaaactcagtgaaatgattgtgcctgaaaatagagccattcaattgaaacctaaggaagagcattttggggatggtgaccctgaatccactggcaagagatcgagtgagttgctggatcccacaacacccatgagaactaaatgcatagagcttctttacgcagctttaactagttcttccacagatcaacccaaagctgatttgtggcaaaactttgcaagagaaattgaagagcatgtttttaccctttattcaaagaacatcaaaaaatataaaacttgcatcagaagcaaagttgccaatttgaagaaccccagaaattctcatttacaacaaaacttgctctctgggaccacgtctccacgagaatttgctgaaatgactgtcatggagatggcaaataaggaactgaagcagttgagagcctcctacacggaatcttgtatccaggaacattaccttccccaagtaattgatggcacacagacaaataaaataaaatgcagacgctgtgagaaatacaattgcaaagtcactgtaattgacagaggaacacttttccttcccagctgggtgcggaattcaaacccagatgaacaaatgatgacttacgtaatttgtaacgaatgtggggagcagtggtaccatagcaagtgggtgtgctggtaactgtaaatcagtgttctcttaacagataaccggagtgataccttttatttgtacaacccttttgtgcttttaaaaatcttatacacactactctctaaaacagaaaaaggaggaaagaaagtcgttagctgaagctgccaccaccatccctaaaagttacagtttggggagagggagtggatgactatttatattgtgccttgtggccatttagtaccttactgtagacagagtgtgggtgagaacagcccagcataaactgggagactgtgggaaatgcattcccaggcctcacaccattgaatccgaatctgcattttgacaggatccccaggtaatcttccaggataggatagtttgagaagtgctactttagcaataggcctgtggctctcagcagtggctgcatattaaaatcatctgggaagctttgaaaacccactggtgctgagaccccaccctagaacaattcagttggaacctatgagatgggacccaggcatcaacatttcttttttcattcctcaagttattttaagatgcagtcagagttgagaactactcagaaataggctctcatttgatcctttttacagctctaagacaagaatgttattccaggcacttcacgaatgaggaaacaggtccacagaggtgtggtgacatgtccaagtgacacaaccataaatagtaccaattctgacagatcccagattttctccctcctgactcactgagactggctcaatatcgacttctgagaaatgtattcctggaggtcggggacaaaatgaagaatgtgtttaaactccaacattgggtgactagatcttcattcttttcccctctcttttctcatttataggtctcccttcaaccacaaaagtcaccctggaactcatcccgcagttagaattttgtttggagccctcttgcttagttgaaggagtttcgtagttgttttttgtttttgtttttgtttttgttttttccccctgtgaacaggtttttcgggggtatgtaaactctaggatgtttagtttctgatgtcaggagtcttcatgttctcaaggacaagtgtccttgagatggacattaatggtcattagtctgtcagaggaagcccatcactttagcctttgaatgtagtaacagacgtttatctaataaatgaattgaagataaaattacctctttgaggcctttgcaaacagtgtttaaccagtttatataattgtttgactacaacacgccttctatgtgattatggctgattttttttccttaaaaaactcatggaatgttcaccgttttatagttttaaaaagtttactttggcggtctctacaaacctaccatttcactttctcaccagttcttttctcctaactctcttcctttgttggagctctgaaggcctaactgtgtgtacactttacctgcctgacagaattctccaaaacatgcataaaagtaaaatatgttcgtattttcaaataatttggaagagtcggctcaatgccatcaagtgtaaaatctattttgatatacttgctctccgtgtcttcccagggctgctttttgtgatgcaacatgtttagtccttaacttgcaaggtcatctaaaacttgaagtttcacaaagtgtggtttcatatgacttggaataatctgaaaaactattcagtggttacgaaagagcacagcacataaaaaccaaatttgattagttcaagtcggtgtttatgttttgctttgggggtttgtgtgtatgtgtgtagtttttatttatattggaatttggcaaactaaatgttcagacaaataaaagtaattaaaatggaaa

SEQ ID NO: 192002 - DNA, 2607 bp, Homo sapiens
  Payload ID: 17936
  Gene Name: transcription elongation factor A (SII) N-terminal and central domain containing
  ENST ID: ENST00000467590
  CDS Start-End: 1-818
ataagcagactcactccaaagcgaggaacagccctaaattatttcctgtgaggggtaataaagaagaaaattcaggaccttctcatgacccaagtcagaatgagacactgggcatctgcagctcgaattctctgtcttcccaagacgttgcaaaactcagtgaaatgattgtgcctgaaaatagagccattcaattgaaacctaaggaagagcattttggggatggtgaccctgaatccactggcaagagatcgagtgagttgctggatcccacaacacccatgagaactaaatgcatagagcttctttacgcagctttaactagttcttccacagatcaacccaaagctgatttgtggcaaaactttgcaagagaaattgaagagcatgtttttaccctttattcaaagaacatcaaaaaatataaaacttgcatcagaagcaaagttgccaatttgaagaaccccagaaattctcatttacaacaaaacttgctctctgggaccacgtctccacgagaatttgctgaaatgactgtcatggagatggcaaataaggaactgaagcagttgagagcctcctacacggaatcttgtatccaggaacattaccttccccaagtaattgatggcacacagacaaataaaataaaatgcagacgctgtgagaaatacaattgcaaagtcactgtaattgacagaggaacacttttccttcccagctgggtgcggaattcaaacccagatgaacaaatgatgacttacgtaatttgtaacgaatgtggggagcagtggtaccatagcaagtgggtgtgctgaaacagcaaatggaagaccctgagacaggagactgcctgatacacgcaagttccagcaagagtccacggcagctaagtcacagtgagcaaggggaacaaggatgagagatgcagtcaaagaggccatcgtgagggctcttgtcggtcggccatggtgccgggagcaaagagatgattaagacaccatcccaggcctcaagccccacgaaacgcaggggaagcgccatgctatgcagccagcaatcgttttaccttttaagagctctgagagagacacccactggaaaggggtgcagaggaccccagaggatcaactaacccagtgtgggagggtcagggaaagcttcatagaggccgtgacccttagggcaaatcttgagaggaagatggccaggcagaggaaatgggaaagtctgttccagcaccatatttgctagattcttggcactttatgtatagcatctcctttaatcttcacaactaccctgctgcacagcattttagaggtgaggaaactaaggctgagagagattaagttacttgcccaagggtacacagagacaaagccaggactaactcataacaaagtgggtaggttttgtttattttgcatgtcagattgcttctagaaataacagcaggcttcctattaattccaggtgaggtcctgctattttataattgtggtttgttctttcaatgccaggagcatgtggtgtatggatccccccttacaccagtactgtgcactcctcctgatgatggagagattgggagggaccacctggctaggattgctggctctcctgacaccttctcgtggcatccatgtggtttatccagttttctgaaaatgatacctgcaatatatcagacagaagctgatccattagctcaggttcgtcaggtccagagggaagatgacatggacgggaaccacagctgacccataatggacattaagggtactggaagagcaagtgtctctccattgggacttttataatgaaaagactcacaagatagttggtttcttaagtgtcggaaggactttcagatgctaaccaaaccgcatcccctacaaaagacaaatatcccccacaaacttagaagataagcaaacttgactgggcgcagtggctcactcttataatcccagcgctttgggaggccgaggtgggcagatcacctgatgtcaggagttcaagaccagcctggccaacatggtgaaactctgtctctactaaaaatacaaaaattaaccagacgtggtggtgcacgcctgtaatcccagctactcgggaggctgaagcgggagaatcgcttgaaccctggaggcggacgttgcagtgagccgagatcgtgccacagcactctggcctgggcaacagagtcagactccatctaaaaaaaaaaaaaaaagaaagaagaaagaaaaaagaaaagaaaaagaagataagcaaactttacagctctcttctgcatttccattatgggtgttgatatggtttggctgtgtccccacgtaaatctcatcttgaattgtagctcccataatccccacatgtcgtggggggtaattgaatcgtgggggtgggtttttcccatgacagtgagtaagtcgtaggaggtctgatggttgtataaagggcagttcccccgcacactctctcttgcctgcccccacataagacatgccttcgctcctcctttgctttctgcgatgattgtgaggcctccccagccaagtggaactgtgagttcattaaatctctttttctttataaatt

SEQ ID NO: 192003 - DNA, 1146 bp, Homo sapiens
  Payload ID: 17936
  Gene Name: transcription elongation factor A (SII) N-terminal and central domain containing
  Uniprot ID: Q8N8B7
  ENST ID: ENST00000544987
  CDS Start-End: 1-1146
atgatctcggctcaccgcaaactctgcctcccgggttcaagcaattctcctgcctcggccttccgagtagctgggactacagctgtaaagatgtctgacaagaaccagatagctgccagagcttctcttattgagcaactgatgtccaaaaggaattttgaggatcttggcaaccaccttactgagctagaaacaatttatgtgactaaggagcatctccaggagacagatgtggtcagagctgtgtacagagtcctcaaaaactgcccctctgtggctttgaaaaagaaagccaagtgtttgctatcaaagtggaaagctgtttataagcagactcactccaaagcgaggaacagccctaaattatttcctgtgaggggtaataaagaagaaaattcaggaccttctcatgacccaagtcagaatgagacactgggcatctgcagctcgaattctctgtcttcccaagacgttgcaaaactcagtgaaatgattgtgcctgaaaatagagccattcaattgaaacctaaggaagagcattttggggatggtgaccctgaatccactggcaagagatcgagtgagttgctggatcccacaacacccatgagaactaaatgcatagagcttctttacgcagctttaactagttcttccacagatcaacccaaagctgatttgtggcaaaactttgcaagagaaattgaagagcatgtttttaccctttattcaaagaacatcaaaaaatataaaacttgcatcagaagcaaagttgccaatttgaagaaccccagaaattctcatttacaacaaaacttgctctctgggaccacgtctccacgagaatttgctgaaatgactgtcatggagatggcaaataaggaactgaagcagttgagagcctcctacacggaatcttgtatccaggaacattaccttccccaagtaattgatggcacacagacaaataaaataaaatgcagacgctgtgagaaatacaattgcaaagtcactgtaattgacagaggaacacttttccttcccagctgggtgcggaattcaaacccagatgaacaaatgatgacttacgtaatttgtaacgaatgtggggagcagtggtaccatagcaagtgggtgtgctggtaa

SEQ ID NO: 192004 - DNA, 10436 bp, Homo sapiens
  Payload ID: 17937
  Gene Name: transcription elongation factor A (SII) N-terminal and central domain containing 2
  Uniprot ID: Q96MN5
  ENST ID: ENST00000234827
  CDS Start-End: 201-827
gtggcccagaggcgcgagggccggcggagtttcttcagaggaactaccgccctgggaggaagcgtctgtttagtttcaacacagacgactgggcttgggagcctacgaggttgcagtctggagggcgccaacagcagctaccagggctgcttttcctgaacacgctgcaagcacgtcaaggtagtcggagtcccctaacaatggataaattcgtcattcgaacgcctagaatccagaatagccctcagaagaaagattctggaggaaaggtttacaagcaggccacgattgaatctctgaagagagttgtggttgtagaagacataaaaagatggaaaactatgctggagcttcctgatcaaaccaaagagaatcttgttgaagccttacaagaattaaagaagaaaataccctccagggaagtgttaaaatcaacaaggataggtcacactgtgaacaagatgcgtaaacactcagattcagaagtggcttctcttgccagagaagtttacactgagtggaaaactttcactgaaaaacattcaaatagaccttctattgaagttagaagtgatcccaaaaccgagtcgttgaggaaaaatgctcagaaattactctcagaagccttggaattaaagatggatcacctactggttgaaaatattgaacgggaaacgtttcatctctgctcccgcctcattaatgggccgtaccggcggacggtgagagccctggtcttcacattaaagcaccgagctgaaatccgggctcaggtgaagagcggctcgctgccagtcggcacgtttgtacagacccacaaaaagtgacctgaggacggttccagccctgggccaggcagagaggaaaatgggcctgtctctgccgttcaaagacgcttttgagtttgggtgatggctgatgctggctgtgctagattttcccatggtgccgttcctttgcagacagaggattcggagagccctaggagacaggcctgcaggaatgtgcttcattagctgcagtgcgctggtgctgcctaacagaacgcacactggctgtcactaggaagcgccatacggttgctatcacccaacatggtgaaagggtgatggatttcactgtgaatatgccaaggacacctctaaacttcccccatgtcagtcagatgaagttactactatatttcaccaccctgcaggtaactgaaactcaattaccgctgccgctcactcggttccatccccctgagtttagatagctctggtgcctctcagaactcccctgtctgttctctttgctctatcccaggggtgagcctgcgagagccagccaactaccccttcttcccagagctcacttatctgaacgtttcagctctccctggaagaccttctgcgttggtctccagagcccccatgctgaggctactaatgaggaactggcccgaagcctcccacacctcagggtttatttgaatacgctggcgctctcagtttagggctctgtagaagatacataatgaaatttctcttgaaatgaattactgcagtagaaaaaagtacatacatatatatgttaaaatgaaatatctctacacaggcctgttttaacaattacgtaaataatacttgtttttttaaaagtaatagtaagctgggaacttttttttctaaaacaaaaggtggagttcgttcactgaaaagtgttttgagttgagaaggggtacagttggtgaaatttaaaaatgatggaacaaggatttgaggaatgtagaagactcaaggaagtggggattagattaggggagactggagcacgtttgtaatctgaaaggaaagagctggtagaaggggagagatttaaaatccaaaaaaaaggaagatgagttgaaaagcaaggggagaagggacgggactaacattattgcctaccttctaaatactaggcacttttcctaagacagtttattaacctttacctggatctttatatagttttgtaaaaatattgcttacttctctcacccattgtattaagtaggtattgttgttttcattttttagatttattcgtttatttagcaaccatttcctgagcatccattctgtggggtaggtgtatactgagcagtagttacaaatgggagcctgaggctcactgaacagaaacatcaccttcaatttcctactgctagtaactattggagctagaataataataatcgagcgtttaccctgggcccagcactgtggtaaccattttacaaaaagaaaatacccagttaaacatgagaaaagtgaggctcagaaaggtatagtaacttactcaaggtcacgcagatagtgaatgacagatctaagattcaaaatccgggtctatttgattgtatatggttgccttggatgatttcatctactctcatgttttcaagcatcatttacatgctgatgacattccagtttgtatcgtcagcccagacctgtcccctgactttcagatgatatttcctagatgccccatagacatctcagatataacatgtcttctttccattggcagtaccagcaagccagacactccagctaggaactcaaggagtcagcctagaccccacatctcccaccctcagccaaccaagtcctggtggtttgattaggttggtgcaaaagtaattgtggtttttgccattacttctaatatattacttctttgcatttgctgttccagttgcaatgctctttccccagacatctgcatgttcttgtcctcacttgctttaggtctctctttcccttatcaaaaaggcttttgctgactatcctaaatacaatagcactccctcccaactattctttaatgctgtacctagctttatttttcttcagaatatttattactctttaacatagttatttctttattgtctatctccccactcccagaatgtaagcttcatgaaagcagagtctctgttctgttccctgttatatctccagcatctggaacagagcctgggacaagctaggtctccataactatttattggatagttgagtgactggttgtggatgtacagtataagcatctaattcaatcagggagtgcttcctggaggagctgatacctgtgttcagtcttaaagggcaggagtttggataggggaatgttagttaatagaatgaaaatttcaaaattaaagggcaggagtaattaattgggtggttgagatgcatgcctggcagagcaagcagagtatggaaaaacccagaagtggagatatctggaaggtgattggtatggctggagtagaggacactggcaggagagtagctggagatgaggcaggagaggaaggcaaggaccaggatcaggtttgaagggtcttgagcatcaggtgaaggcgttagactgatttgaagcaggaactggtcacttttgtgttaataggctatgtggaagagaagctggggtagggagacaggaagtagcaagcttcatgtttaaagaaccaaagagttctgctaacttaggaacccagagtaagttgaaaacaaattgctctctggctgaaagccttcagtggtgatagttggaaagtagaatgattgcagagatgtgctttggagatttggaaagcaggctgtgttatttgtggctgttttctccttgatgcatgtgcagaatttccatgaacgctaatggagctattctgagcatttgctgaagggaaggaagcttgcagacatccctcccaatcttgcccacacactgagaagtaactcggagctacagtctgttaaaaatgaaaaggttgaggccgggtgcattggttcatgcctataatcccagcgctttgggaggtcgaggcaggcagatcacctgaggtcaggagtttgaaaccagcctggccaacatggcgaaaccctgtctgtactaaaaatacaaaaattagccagatatgatggcaggcgcctgtaatcccagctacttggaaggctgaggtatgagaatcgcttgaacctgggagatggaggctgcagtaagccaagattgtaccactgcactccagcctgggcaacagagtgagactctgtctcaaaaaaaaaaaaaaaaagagaaaaagaaaaaagttgcccctgaaatggggtgagagtagttcctgagacctctgagttacctgtaagtcaaggtgtgaatatgtcttataagcaagttcagttgctaggggaaatgtgggaaagtaaataccatttgtgtctgctctaatagcttattgatgcttttcttgtagtggttaatttggaggtcctggttgggcatggtagctcacacctataatcccagcactttgggaggctgaggcaggcggatcacttgaggtcaggagtttgagaccaacctggccaacatggtgaaaccttgcctgtactaaaaatacaaaaattagccagatctggtggcaggcacctgtaatcccagcactcgataagctgaggcaggagaattgcttgaacccgggaggcggaggttgcagtgagctgagatggcgccattgcactccagcctgggcgacagagcaagactcacctcagtctcaaagataaaataaaataaaaataaataaataaaaattggaggtcttggtcctctgtgtagggactcagtctctgtattttcattcattcattcaacaaacaaatattgcccatcttctgtgtgccaaggactagactggcactggggacacagcaataaaggagagataatttcctctgagtctggtgaggcagatagacacataactaaataaatagagtatagcatattgggtgataactatagacatgaaaatattgagaagatggggaaaggaatgaataacaccactcagaggaagaatcttcacagaggagttcatgtttgaaccaaagccagaaggataggtaggagttcttagcagagggctcagtctatgtgaaagcacagaagcgtgaggtgtatggctagtttcagtaaaggcaaataatatgaggtggctgaagcataaggttcttaggaatggtagtgagaaattgggcaaaaaaagtaaccaaggccttggaggccttatcaacgagtttggactttggccttcagataatgggataccatgggaagtttttgaggaggtgagggacctaatcagatgtgtgttttaaaaagatttaaaaaacaaaaacaaaaacagatattttaagaaaattttaaacattcaaaagaaacccaacaatttaaggcaaaggaaagaaacacttgagattcagtcaattagaggttttttttttttgacaaatgaagtttaaagttgcccaaacagatatcattagagaatcccaggtttgaaaaatggcaggagacccagataatgcatttactgtgttctgtggtgaaggaacaggtagctggcctttttcatttatagaatatcaggttcttaaacttgtgcctgtcaaccttggttttcttttgctgtagcctcaggcctcagaaccttactctgagattggtaatgtgttttgaatgtgtttatcacagccagatggggcaaaggctcagtttgttactgcccattattgcaagggaagggagtccatccagaaaacaaagctttgggagtttcagttagttgggtgacactaccctggtatcaaaggaaagatggtttgattggatgacattgtattttctttaaatcaatcaaaatgatacaattactgtcagggatggacttactcataacctggggaggttggtttcaagatccaagaagatcaagacatccaatcaaatgctggtttttaatgttgataaaatcattctttcaatacatatttgttgagttcttacgtgtcaggtattagggtcacagggatagagaagacataatctttggcctcaagaagcttacagtctagtgaagactgtaaacagacaataaacagacaatttttactatttatttttattttgggagggggtcagggtctcactctgtcgcccagggtgcagtacagtggtgcaattacagctcactgcagctttgacctcccaggttcaagcaagcctcctacctcaagcctcccaagtgtctgggaccataggtatgtgccatcatacctggctgattttttattagccagattgtcaccatgttgatcaggcttgtcttggactcctggcctcaagtgagcctcctgccttggccttccaaagtgttgggattacaggcatgagtcactttgccttgcccagaccatttttgaaaacacaaatgggcagggtgcagtgagatttttaggggccaatggtctgggatgtggcagggacattctcttgaaagtaaaagacaattattgcatctcactccaaccattaagaaggaagcacaatgcctgggagccctctttaggttttggagacagcatatcccacacctaggaatatgctccatccatgtaccggatgacacagaaagttgtgttttgattggggcccagagcaggaaagggctcagcagaagctccaggctacaacacaagtggccatgcggtgtgggacagatgagctggcagagcccaaagtacccgaggtatctgtggtgggaacagatgcctgtgaagtttatgacaagaccctacaggagaatcacaatgtagacacctggggttctggagcagggccatgccatctgtagccaagaattttatacttcttaagaaacaactcttgatgctacagggttctggtagagacagatcatcagaccatggatcatcaagttgaccatgtgaccaaagctgttcatcatgagctggattctgccatatccaccaagtcataaggtcaggcaaagccagcagcaattcctaagatagaaataatacaactggggttgggcatagcagggccagagggcagaagatagttacgtgagcaggtggcccagacatctatgtcatccactacctttgcaccagtacctgcctgttcctcatttcacacctttggctgcctggggagctctttataatatccagctgatagaagagaaaaaaagccatgccttatccttagataggtcagctcagtgtgtgtgagcaagacaaaaaaagaccgtggctgcactgcagccccacacaggggcatccttgaaagacagcagagtggggagtccttctagtgggcataggttgtgcatcatgcacctagccatccactgtatgtggaaagagaaggagcctgagcttagactatacatggatctcatgggcagtggtgaatggcttggctggttggtaaggggtctgaaaggaataagattggaaaattggaaacaaggagacctgtggtggaggcatgtagttggacctataggagtgggcaccaagtgtgaagatcattgtattccatgtaaacacccaccagagagcacataccatggagaagcactaaacaacaatgtacacacagttgacatcaaccagtctctgaggccaccccagagctgacacaatgggtgtataaacagcaaccatggtggtgtagtagtccattttcacactgctataaagatactacctgagactgggtaatttaagaaggaaagaggtttcattgactcaaatttctacatggctggggaggcctcaggaaacttacaatcatggcagaaggcaaggggaagcaggcatcttcttcacaagacagcaggggagagagagagtgcaaagggggaactgccaaacactttgaaaccatcggatctcttgagaagtcactcactatcatgacaacagcatgggggaaaccggctccgtgatccaatcacttcccaccatgtccctccctcaacacgtggggattataattcgagttaagatttgtgtggagacacagagccaaaccatatcagatggtatggcatggctcccactcaccaagactgatctagctattgctgctgctgagtgttcggcctgccagtaacagagaccaactctgaacctagatatagctccatcccttgagaacaaccagcagccacttgggaagttggctatattaaaccctgtctaccctggaaagagctgtgattcattttcactggcatagatgtatattccagatacgagttcatcttcactgcttgtagagcttcatccagcacaactctcaaagggcttatagaatgtttaatctactgggatagattatgggatctatagattatgggatagtcatacaggatcccatatgattccacagcaaaggaggtgcagcagtgggcacatggtgacagggtccacttgtcctttcatctactgcgctatcctgaagctgccagcttgcaactgtgtcgaaggcacagctggggcaccagctcagaaaccctgagagaagagctgccatcctccagggtgcagcacatgttcgaaatcaaagaccgttacgtgatgctttgtctccaataggtagaatacatgagtccaggaaccaagaaatgaaagcaggagtgctctcactcttaccatcacttctagtgacccacttggagtgcctcctgttctcatagttctgggctctgcaggtttagaggttttgagtcacaaaggaggaacacttccactaaaagaaacatcaagattactatgaactattagctgtgactgcacccgggcacttgagctcctcatatcaggagactactaggcaagaacagtcaccattctttgagggataattaatcctgatcatcaggaggaggtacagctgctgttaagcaatggagggaagggaggtatatctttggtactcagttgattcacgtggagacttcttggtattcctttgcccaatttttttttctttttctttttcagaggtggagtctctgtcacccaggctggagtgcagtggcaccatctcggctcactgcaacctctgcctcctgggttcaagctattctcctgcctcagcctcccgagtaactgggattacaggcatgtgccaccatgcccagctgatttttgtatttttagtagagatggagtttcgccatgttggccagactagttttgaacttctggcctcaagcagtccacctgcctcagcttcccaaagtgctgggattacaggcgtgagccactgcgcctggccccttgcccaatatttataaaataattatacaagtgcccagaccgtgacctgagcaggatatgctgacttcaggctcagccccctcagggctgagggtctaaatcatgcctccgtggaagtgacggagaccggaacacgtgctggctgagggtaaggaggatctagaatggatagtagaagagggagatgatgagtatcagttgtggcctcaagaccagtcagtgatggaggttgtagtttgtccaacttactttcctaagtttcccccaggaaaggaggtccaccagaacttaaaccaaaaagtagagctgagcagcacaaatgtgggctgtagtggacaccatcctgtgctgcccagaccccccagccaccatgcttcctgggcctcttcccacagctactgggagtgctctcagccagcagccttcagctgtcagccccctgggaattttcctcaatggaagagttacctcactgacatacccctttcccaggcaggtcagttcaaggttatgaaggcctggccccactgcctcaacttgacaacttggaagggccatctcagcttcaagaccctcccatgagactggctgaggtcttcatacagcatcggagcccaatttatctctctgagcaatcctgcttcctttcctgcccccttcccaagagcaatccctgataaacttcccgcatgctaatctccatctcagagtctactttccaaggaagtgggcctataacatagctcttccagtttttgttaacaattctagaacaggggtcagcaaactttttttttttttcgagacggagtctcactccgtcaccaggctggagtgcagtggcgcgatcttggctcactgcaacctctgcctcccgggttcaagcgattctcctgcctcagcctcccgagtagctgggactaccatgccaccacacccagctaatttttttatttttagagagattgggtttcaccatgttggccaggatggtcttgatctcttgacctcgtgatccgcgctcctcggcctcccaaagtgctgggattatagacatgaatcaccacacccggccagcaaacttttttaaaggaacagatagtaaatattttaagctttgtgagccacatggtctctgtcacaactattcagctctgctattgtaatacaaaagcagctgtggacagtatgtaaatgaatgaatgtggctgtgttccaataaaactttatttacaaaaa

SEQ ID NO: 192005 - DNA, 936 bp, Homo sapiens
  Payload ID: 17937
  Gene Name: transcription elongation factor A (SII) N-terminal and central domain containing 2
  ENST ID: ENST00000371331
  CDS Start-End: 200-916
tcctcgctagagcgtgcacttctggaagctaggaacctcctaactcaggacgtagactgatgattgattacagtttcaattcttcggaagatctttcttttaaagagaaaatcttacttcctgtcaattccactcgaggccccataattcatgaattcttccagagaactcaattgtgttactttggggaaaaaatatcatggcagtctttagtggggttttagaatctgccctctttcttgaccagaacacgctgcaagcacgtcaaggtagtcggagtcccctaacaatggataaattcgtcattcgaacgcctagaatccagaatagccctcagaagaaagattctggaggaaaggtttacaagcaggccacgattgaatctctgaagagagttgtggttgtagaagacataaaaagatggaaaactatgctggagcttcctgatcaaaccaaagagaatcttgttgaagccttacaagaattaaagaagaaaataccctccagggaagtgttaaaatcaacaaggataggtcacactgtgaacaagatgcgtaaacactcagattcagaagtggcttctcttgccagagaagtttacactgagtggaaaactttcactgaaaaacattcaaatagaccttctattgaagttagaagtgatcccaaaaccgagtcgttgaggaaaaatgctcagaaattactctcagaagccttggaattaaagatggatcacctactggttgaaaatattgaacgggaaacgtttcatctctgctcccgcctcattaatgggccgtaccggcggacggtgagagccctggtcttcacattaaagcaccgagctgaaatccgggctcaggtgaagagcggctcgctgccagtcggcacgtttgtacagacccacaaaaagtgacctgaggacggttccagccc

SEQ ID NO: 192006 - DNA, 1783 bp, Homo sapiens
  Payload ID: 17937
  Gene Name: transcription elongation factor A (SII) N-terminal and central domain containing 2
  ENST ID: ENST00000391366
  CDS Start-End: 174-566
aggaggaacacttccactaaaagaaacatcaagattactatgaactattagctgtgactgcacccgggcacttgagctcctcatatcaggagactactaggcaagaacagtcaccattctttgagggataattaatcctgatcatcaggaggaggtacagctgctgttaagcaatggagggaagggaggtatatctttggtactcagttgattcacgtggagacttcttggtattcctttgcccaatttttttttctttttctttttcagaggtggagtctctgtcacccaggctggagtgcagtggcaccatctcggctcactgcaacctctgcctcctgggttcaagctattctcctgcctcagcctcccgagtaactgggattacaggcatgtgccaccatgcccagctgatttttgtatttttagtagagatggagtttcgccatgttggccagactagttttgaacttctggcctcaagcagtccacctgcctcagcttcccaaagtgctgggattacaggcgtgagccactgcgcctggccccttgcccaatatttataaaataattatacaagtgcccagaccgtgacctgagcaggatatgctgacttcaggctcagccccctcagggctgagggtctaaatcatgcctccgtggaagtgacggagaccggaacacgtgctggctgagggtaaggaggatctagaatggatagtagaagagggagatgatgagtatcagttgtggcctcaagaccagtcagtgatggaggttgtagtttgtccaacttactttcctaagtttcccccaggaaaggaggtccaccagaacttaaaccaaaaagtagagctgagcagcacaaatgtgggctgtagtggacaccatcctgtgctgcccagaccccccagccaccatgcttcctgggcctcttcccacagctactgggagtgctctcagccagcagccttcagctgtcagccccctgggaattttcctcaatggaagagttacctcactgacatacccctttcccaggcaggtcagttcaaggttatgaaggcctggccccactgcctcaacttgacaacttggaagggccatctcagcttcaagaccctcccatgagactggctgaggtcttcatacagcatcggagcccaatttatctctctgagcaatcctgcttcctttcctgcccccttcccaagagcaatccctgataaacttcccgcatgctaatctccatctcagagtctactttccaaggaagtgggcctataacatagctcttccagtttttgttaacaattctagaacaggggtcagcaaactttttttttttttcgagacggagtctcactccgtcaccaggctggagtgcagtggcgcgatcttggctcactgcaacctctgcctcccgggttcaagcgattctcctgcctcagcctcccgagtagctgggactaccatgccaccacacccagctaatttttttatttttagagagattgggtttcaccatgttggccaggatggtcttgatctcttgacctcgtgatccgcgctcctcggcctcccaaagtgctgggattatagacatgaatcaccacacccggccagcaaacttttttaaaggaacagatagtaaatattttaagctttgtgagccacatggtctctgtcacaactattcagctctgctattgtaatacaaaagcagctgtggacagtatgtaaatgaatgaatgtggctgtgttccaataaaactttatttac

SEQ ID NO: 192007 - DNA, 2718 bp, Homo sapiens
  Payload ID: 17938
  Gene Name: transcription elongation factor A (SII), 1
  Uniprot ID: P23193
  ENST ID: ENST00000396401
  CDS Start-End: 324-1166
agccggaagccacgcctgcccactagcccgacgcccgcctggcgggaacatgggctcgcccctcaccagcgatctgcagtcagttggtagcgcctgcacgtcgcgcgcggtgttcgattgtcgctgcctggggaggaggagccggagccgccgccgccgccgccgccgccgcgggcttcgttcgtaaggaagggggcctaggcccgggcctgcggtggtgggggttgctgcgcgccgggggtcgctcctgctgtgtcttccgctccagcttcgcccacttccccttgccagcggggtgggcgcggagaagacctgccggagccatggaggacgaagtggtccgctttgccaagaagatggacaagatggtgcagaagaagaacgcgtccacaagaatcggaatgtcagttaatgctattcgcaagcagagtacagatgaggaagttacatctttggcaaagtctctcatcaaatcctggaaaaaattattagatgggccatcaactgagaaagaccttgacgaaaagaagaaagaacctgcaattacatcgcagaacagccctgaggcaagagaagaaagtacttccagcggcaatgtaagcaacagaaaggatgagacaaatgctcgagatacttatgtttcatcctttcctcgggcaccaagcacttctgattctgtgcggttgaagtgtagggagatgcttgctgcagctcttcgaacaggggatgactacattgcaattggagctgatgaggaagaattaggatctcaaattgaagaagctatatatcaagaaataaggaatacagacatgaaatacaaaaatagagtacgaagtaggatatcaaatcttaaagatgcaaaaaatccaaatttaaggaaaaatgtcctctgtgggaatattcctcctgacttatttgctagaatgacagcagaggaaatggctagtgatgagctgaaagagatgcggaaaaacttgaccaaagaagccatcagagagcatcagatggccaagactggtgggacccagactgacttgttcacatgtggcaaatgtaaaaagaagaattgcacttacacacaggtacaaacccgtagtgctgatgaaccaatgacaacatttgttgtctgtaatgaatgtggaaatcgatggaagttctgttgagttggaagaattggcaaaatatctggaccattaagaaaacggattttgtaactagctttaaactaggccaagcaactagttttcctgcaaatcaaatttttaaagcaacttgggttagactttgtttttgacctaacatcccttccttaaatgccttctgtagtttcagatcagtagggagaccatataataattttatggtacctgtttcaaaacatattttttctgtttttataagtaagttgatattaattaaactcttggcaatatttcttctttcttaaaggaaaatataccttaactttttttcttttacactgtgaaacatacacagtagaaattctgttactctctgttattaatacataaatgaaaatacatttttttccatattggcatgtagctacaaatattaaaggaggagaaaaggtaatataattttaggtttaccaaatatggtgtgtattcaaataatacttgaccagcttatctaaaatgtacataattttgaggtagcttatgaatttgattttaattattatgttcacaagcttggaatattagatattattttgcatctgtaactaaccgtgatcatcatttcttgtaatttcttgtacatgtatattacttgttcttaatagatttttggaaacaagactttattgagatcagtttggttttcctgttaatttacctgtttgactttataatgtgttttagttttgcagaagaacactgttgtagtttagaaggcttttcataaatcccctcataggcaaagatgaaaacttcccactatttttttcccctcttaggaagacatactggaaagaaaatgtttagcatcttagtgtagtatagctattgtaaacagttcatgactagattttgattcggaaatctatactgaccaaggattaatcttaaggattgtataattcattaaagctgtggtctttccatgtggagactgatagaaaataattttgtcccaagtcttatttgctgactttttctgtcatgagtgagattgttgaacaaactgaatatatgggctatagcaagtagctttacagtacagatcttacaattaagttttgcttttgttaaagtgtgtaccattttttctgtttggagtaagacaaaaattgttttgacataggttccctagggtacacttgctctagcatactttaaaggccactgttgcaaagtctacattttatgctgaatctgcattctgtcaggcacccgtagaaagacctcagtacatgctttgcactctcctttgctccctttttccaatttcttattgcatatcattttgttgtaatacagaaagcagcatttttaaatgtccgtgttaagaattggcccactggtaccaactcacctctattttgtcagttcatagttgaagattttgttttatttcaaaaacaaagtacatttttgaaataatgtttcagaataaaataatctcacttttaagtgatccattttaaaatttgtaattcaataaagttttttttgttgttaaacatatatc

SEQ ID NO: 192008 - DNA, 635 bp, Homo sapiens
  Payload ID: 17938
  Gene Name: transcription elongation factor A (SII), 1
  ENST ID: ENST00000520534
  CDS Start-End: 24-359
cgcggagaagacctgccggagccatggaggacgaagtggtccgctttgccaagaagatggacaagatggtgcagaagaagaacgcggctggagcattggatttgctaaaggagcttaagaatattcctatgaccctggaattactgcagtccacaagaatcggaatgtcagttaatgctattcgcaagcagagtacagatgaggaagttacatctttggcaaagtctctcatcaaatcctggaaaaaattattagatgggccatcaactgagaaagaccttgacgaaaagaagaaagaacctgcaattacatcgcagaacagccctgaggcaagagaagaaaggtacttcacagtatagacatatatttatattgaaagtcatagttttacttcctgcatcaattcccctgtctaatgttcccctatttacactcctttttttgttttctaatcaaatggaagtagtaaatgtatgtagccatgtattctaatttatttttttttcagatttcttgaacatttgagaggtagaagacattgaataaataagaagttatttatattgtactcaacaagtttaattgaatgggattgctggggtaggcactgatggaattgataatggaggtagtga

SEQ ID NO: 192009 - DNA, 2858 bp, Homo sapiens
  Payload ID: 17938
  Gene Name: transcription elongation factor A (SII), 1
  Uniprot ID: P23193
  ENST ID: ENST00000521604
  CDS Start-End: 405-1310
agggggccgaaaacccgccccgtgagggggcgggaccggaggtgaacgcgcagcaaaaccgggcgccttccacgaccctctagccggaagccacgcctgcccactagcccgacgcccgcctggcgggaacatgggctcgcccctcaccagcgatctgcagtcagttggtagcgcctgcacgtcgcgcgcggtgttcgattgtcgctgcctggggaggaggagccggagccgccgccgccgccgccgccgccgcgggcttcgttcgtaaggaagggggcctaggcccgggcctgcggtggtgggggttgctgcgcgccgggggtcgctcctgctgtgtcttccgctccagcttcgcccacttccccttgccagcggggtgggcgcggagaagacctgccggagccatggaggacgaagtggtccgctttgccaagaagatggacaagatggtgcagaagaagaacgcggctggagcattggatttgctaaaggagcttaagaatattcctatgaccctggaattactgcagtccacaagaatcggaatgtcagttaatgctattcgcaagcagagtacagatgaggaagttacatctttggcaaagtctctcatcaaatcctggaaaaaattattagatgggccatcaactgagaaagaccttgacgaaaagaagaaagaacctgcaattacatcgcagaacagccctgaggcaagagaagaaagtacttccagcggcaatgtaagcaacagaaaggatgagacaaatgctcgagatacttatgtttcatcctttcctcgggcaccaagcacttctgattctgtgcggttgaagtgtagggagatgcttgctgcagctcttcgaacaggggatgactacattgcaattggagctgatgaggaagaattaggatctcaaattgaagaagctatatatcaagaaataaggaatacagacatgaaatacaaaaatagagtacgaagtaggatatcaaatcttaaagatgcaaaaaatccaaatttaaggaaaaatgtcctctgtgggaatattcctcctgacttatttgctagaatgacagcagaggaaatggctagtgatgagctgaaagagatgcggaaaaacttgaccaaagaagccatcagagagcatcagatggccaagactggtgggacccagactgacttgttcacatgtggcaaatgtaaaaagaagaattgcacttacacacaggtacaaacccgtagtgctgatgaaccaatgacaacatttgttgtctgtaatgaatgtggaaatcgatggaagttctgttgagttggaagaattggcaaaatatctggaccattaagaaaacggattttgtaactagctttaaactaggccaagcaactagttttcctgcaaatcaaatttttaaagcaacttgggttagactttgtttttgacctaacatcccttccttaaatgccttctgtagtttcagatcagtagggagaccatataataattttatggtacctgtttcaaaacatattttttctgtttttataagtaagttgatattaattaaactcttggcaatatttcttctttcttaaaggaaaatataccttaactttttttcttttacactgtgaaacatacacagtagaaattctgttactctctgttattaatacataaatgaaaatacatttttttccatattggcatgtagctacaaatattaaaggaggagaaaaggtaatataattttaggtttaccaaatatggtgtgtattcaaataatacttgaccagcttatctaaaatgtacataattttgaggtagcttatgaatttgattttaattattatgttcacaagcttggaatattagatattattttgcatctgtaactaaccgtgatcatcatttcttgtaatttcttgtacatgtatattacttgttcttaatagatttttggaaacaagactttattgagatcagtttggttttcctgttaatttacctgtttgactttataatgtgttttagttttgcagaagaacactgttgtagtttagaaggcttttcataaatcccctcataggcaaagatgaaaacttcccactatttttttcccctcttaggaagacatactggaaagaaaatgtttagcatcttagtgtagtatagctattgtaaacagttcatgactagattttgattcggaaatctatactgaccaaggattaatcttaaggattgtataattcattaaagctgtggtctttccatgtggagactgatagaaaataattttgtcccaagtcttatttgctgactttttctgtcatgagtgagattgttgaacaaactgaatatatgggctatagcaagtagctttacagtacagatcttacaattaagttttgcttttgttaaagtgtgtaccattttttctgtttggagtaagacaaaaattgttttgacataggttccctagggtacacttgctctagcatactttaaaggccactgttgcaaagtctacattttatgctgaatctgcattctgtcaggcacccgtagaaagacctcagtacatgctttgcactctcctttgctccctttttccaatttcttattgcatatcattttgttgtaatacagaaagcagcatttttaaatgtccgtgttaagaattggcccactggtaccaactcacctctattttgtcagttcatagttgaagattttgttttatttcaaaaacaaagtacatttttgaaataatgtttcagaataaaataatctcacttttaagtgatccattttaaaatttgtaattcaataaagttttttttgttgttaaacata

SEQ ID NO: 192010 - DNA, 569 bp, Homo sapiens
  Payload ID: 17938
  Gene Name: transcription elongation factor A (SII), 1
  ENST ID: ENST00000518310
  CDS Start-End: 190-333
ggaggagccggagccgccgccgccgccgccgccgccgcgggcttcgttcgtaaggaagggggcctaggcccgggcctgcggtggtgggggttgctgcgcgccgggggtcgctcctgctgtgtcttccgctccagcttcgcccacttccccttgccagcggggtgggcgcggagaagacctgccggagccatggaggacgaagtggtccgctttgccaagaagatggacaagatggtgcagaagaagaacgcggctggagcattggatttgctaaaggagcttaagaatattcctatgaccctggaattactgcagtgtgcagctgacccctaaggctgcttaatgcactctccacctttccaagtccacaagaatcggaatgtcagttaatgctattcgcaagcagagtacagatgaggaagttacatctttggcaaagtctctcatcaaatcctggaaaaaattattagatgggccatcaactgagaaagaccttgacgaaaagaagaaagaacctgcaattacatcgcagaacagccctgaggcaagagaagaaaggtacttcacag

SEQ ID NO: 192011 - DNA, 586 bp, Homo sapiens
  Payload ID: 17938
  Gene Name: transcription elongation factor A (SII), 1
  ENST ID: ENST00000518784
  CDS Start-End: 35-307
agcggggtgggcgcggagaagacctgccggagccatggaggacgaagtggtccgctttgccaagaagatggacaagatggtgcagaagaagaacgcggctggagcattggatttgctaaaggagcttaagaatattcctatgaccctggaattactgcagtccacaagaatcggaatgtcagttaatgctattcgcaagcagagtacagatgaggaagttacatctttggcaaagtctctcatcaaatcctggaaaaaattattaggtatcattgatcttcccttacatatatttatgatgttgtgatttattcaaatagttaatggttacattttatggttagttaatggttacatttttttcttagtgaatctagatatactgaaagcagtgcctcgtaataaaggcgaggggagttaatttgatctttagggtttttttgccttttaggccagtcaaatttggctttcttaacttttgacacaactggataaactctttcagtaagaagaattttctcttaaaggaaaggttgtggataccttttgaaatggtttttgaaattttttgacttacagaaaactt

SEQ ID NO: 192012 - DNA, 1432 bp, Homo sapiens
  Payload ID: 17938
  Gene Name: transcription elongation factor A (SII), 1
  ENST ID: ENST00000522635
  CDS Start-End: 145-498
gttcgtaaggaagggggcctaggcccgggcctgcggtggtgggggttgctgcgcgccgggggtcgctcctgctgtgtcttccgctccagcttcgcccacttccccttgccagcggggtgggcgcggagaagacctgccggagccatggaggacgaagtggtccgctttgccaagaagatggacaagatggtgcagaagaagaacgcggctggagcattggatttgctaaaggagcttaagaatattcctatgaccctggaattactgcaggaaatggctagtgatgagctgaaagagatgcggaaaaacttgaccaaagaagccatcagagagcatcagatggccaagactggtgggacccagactgacttgttcacatgtggcaaatgtaaaaagaagaattgcacttacacacaggtacaaacccgtagtgctgatgaaccaatgacaacatttgttgtctgtaatgaatgtggaaatcgatggaagttctgttgagttggaagaattggcaaaatatctggaccattaagaaaacggattttgtaactagctttaaactaggccaagcaactagttttcctgcaaatcaaatttttaaagcaacttgggttagactttgtttttgacctaacatcccttccttaaatgccttctgtagtttcagatcagtagggagaccatataataattttatggtacctgtttcaaaacatattttttctgtttttataagtaagttgatattaattaaactcttggcaatatttcttctttcttaaaggaaaatataccttaactttttttcttttacactgtgaaacatacacagtagaaattctgttactctctgttattaatacataaatgaaaatacatttttttccatattggcatgtagctacaaatattaaaggaggagaaaaggtaatataattttaggtttaccaaatatggtgtgtattcaaataatacttgaccagcttatctaaaatgtacataattttgaggtagcttatgaatttgattttaattattatgttcacaagcttggaatattagatattattttgcatctgtaactaaccgtgatcatcatttcttgtaatttcttgtacatgtatattacttgttcttaatagatttttggaaacaagactttattgagatcagtttggttttcctgttaatttacctgtttgactttataatgtgttttagttttgcagaagaacactgttgtagtttagaaggcttttcataaatcccctcataggcaaagatgaaaacttcccactatttttttcccctcttaggaagacatactggaaagaaaatgtttagcatcttagtgtagtatagctattgtaaacagttcatgactagattttgattcggaaatctatactgaccaaggattaatcttaaggat

SEQ ID NO: 192013 - DNA, 563 bp, Homo sapiens
  Payload ID: 17938
  Gene Name: transcription elongation factor A (SII), 1
  ENST ID: ENST00000519704
  CDS Start-End: 202-339
gctgcctggggaggaggagccggagccgccgccgccgccgccgccgccgcgggcttcgttcgtaaggaagggggcctaggcccgggcctgcggtggtgggggttgctgcgcgccgggggtcgctcctgctgtgtcttccgctccagcttcgcccacttccccttgccagcggggtgggcgcggagaagacctgccggagccatggaggacgaagtggtccgctttgccaagaagatggacaagatggtgcagaagaagaacgcggctggagcattggatttgctaaaggagcttaagaatattcctatgaccctggaattactgcagtggctaccttgagatcatcttggcaaaaactcatgagtgatcacaaaggagacttttcttctggagcacaccaaatctgcttgtttcctgtgatgttaacagtgtctcttgatctcagtactcattcctttctgcttttccatcagtgtgcagctgacccctaaggctgcttaatgcactctccacctttccaagtccacaagaatcggaatgtcagttaatgctattcgcaagca

SEQ ID NO: 192014 - DNA, 953 bp, Homo sapiens
  Payload ID: 17939
  Gene Name: transcription elongation factor A (SII), 2
  ENST ID: ENST00000339217
  CDS Start-End: 216-953
gcgacggccggggccggggtcctgcccggctgcggaggcgggcgcgacgggcgcgggggtcgctgctcctgaggcgatgatgggcaaggaagaggagattgcgcggatcgcccggaggctggacaagatggtgaccaagaagagcgcgcgtttgtcaccctccgtctcccatagcatttgtcgccggcaacagtttggagtctgaggagggagccatggatttgctgcgggagctgaaggccatgcctatcacgctgcacctgctccagtccacccgagtcgggatgtctgtcaacgcccttcggaagcagagctcggatgaggaggtcattgcactggccaagtctctcatcaagtcctggaagaagctcctggatgcttccgatgccaaagccagggagcgggggaggggcatgcctctgcccacgtcctcgagggatgcctcagaggccccggatcccagccgcaagaggccggagctgcccagggcaccgtcgactccgaggatcaccacatttcctccggtgcctgtcacctgtgatgccgtgcgcaacaagtgccgcgagatgctgaccgctgccctgcagacggaccatgaccacgtggccatcggtgcggactgcgagcgcctgtcggctcagatcgaggaatgcatcttccgggacgttggaaacacagacatgaagtataagaaccgtgtacggagtcgtatctccaacctgaaggatgccaagaaccctgacctgcggcggaatgtgctgtgtggggccataacaccccagcagatcgctgtgatgacctcagaggagatggccagtgatgagctgaaggagatccgtaaggccatgaccaaggaggccatccgagagcaccagatggcccgcactggcggcacgcagacagacctgttcacctgcggcaagtgcaggaaaaagaactgcacctacacacag

SEQ ID NO: 192015 - DNA, 1235 bp, Homo sapiens
  Payload ID: 17939
  Gene Name: transcription elongation factor A (SII), 2
  Uniprot ID: Q15560
  ENST ID: ENST00000343484
  CDS Start-End: 170-1069
aggatgccgcgcgcggccgcggggccgagggtttgaaccgggggtctgtcgtccgcggcggggctgcgtcggctgcggcgggtgtgggaggtggcgacggccggggccggggtcctgcccggctgcggaggcgggcgcgacgggcgcgggggtcgctgctcctgaggcgatgatgggcaaggaagaggagattgcgcggatcgcccggaggctggacaagatggtgaccaagaagagcgcggagggagccatggatttgctgcgggagctgaaggccatgcctatcacgctgcacctgctccagtccacccgagtcgggatgtctgtcaacgcccttcggaagcagagctcggatgaggaggtcattgcactggccaagtctctcatcaagtcctggaagaagctcctggatgcttccgatgccaaagccagggagcgggggaggggcatgcctctgcccacgtcctcgagggatgcctcagaggccccggatcccagccgcaagaggccggagctgcccagggcaccgtcgactccgaggatcaccacatttcctccggtgcctgtcacctgtgatgccgtgcgcaacaagtgccgcgagatgctgaccgctgccctgcagacggaccatgaccacgtggccatcggtgcggactgcgagcgcctgtcggctcagatcgaggaatgcatcttccgggacgttggaaacacagacatgaagtataagaaccgtgtacggagtcgtatctccaacctgaaggatgccaagaaccctgacctgcggcggaatgtgctgtgtggggccataacaccccagcagatcgctgtgatgacctcagaggagatggccagtgatgagctgaaggagatccgtaaggccatgaccaaggaggccatccgagagcaccagatggcccgcactggcggcacgcagacagacctgttcacctgcggcaagtgcaggaaaaagaactgcacctacacacaggtgcagacccgcagctctgatgagcccatgaccacctttgttgtctgcaacgagtgtggaaaccgctggaagttctgctgacccctcgtgtagatgtgctgcagccttgggccctccccggcccacgtcctccgttgacacagcttctctggagaccctagaaggcggcatgtcctgccctcaacctgcctgcctggattgcacctttctgccctttccccctcattattaaatgtttctttttgcc

SEQ ID NO: 192016 - DNA, 1427 bp, Homo sapiens
  Payload ID: 17939
  Gene Name: transcription elongation factor A (SII), 2
  Uniprot ID: Q15560
  ENST ID: ENST00000361317
  CDS Start-End: 443-1261
agggtttaaccgaaaccgaacattaaccgtagccctaacgcggctgagggatccaggccttgcctctgggccgggtgagagacagacactcgccaaccagtccgcagtggctccccgtgtgtgcgaggctcccgcctgcgtgtgtgcgtgtgcatgtgtgcctgcgcacaggggagggaaagttcttcagctgccgagggcgggagtaggggctggagcagcaccctgcggcgaggccccacaggagaatcgatggttctgatgctgtcagcctctgggtgcaaattctgagggcccgggagcgtctggcggccctgagcagcttgctggggaagctccgtggaggaggaagtccggaggcatgtgatgtgaatcagctgacatcatcttgacgggagccctgtgaggcggacacttaactccagtttcacaggagggagccatggatttgctgcgggagctgaaggccatgcctatcacgctgcacctgctccagtccacccgagtcgggatgtctgtcaacgcccttcggaagcagagctcggatgaggaggtcattgcactggccaagtctctcatcaagtcctggaagaagctcctggatgcttccgatgccaaagccagggagcgggggaggggcatgcctctgcccacgtcctcgagggatgcctcagaggccccggatcccagccgcaagaggccggagctgcccagggcaccgtcgactccgaggatcaccacatttcctccggtgcctgtcacctgtgatgccgtgcgcaacaagtgccgcgagatgctgaccgctgccctgcagacggaccatgaccacgtggccatcggtgcggactgcgagcgcctgtcggctcagatcgaggaatgcatcttccgggacgttggaaacacagacatgaagtataagaaccgtgtacggagtcgtatctccaacctgaaggatgccaagaaccctgacctgcggcggaatgtgctgtgtggggccataacaccccagcagatcgctgtgatgacctcagaggagatggccagtgatgagctgaaggagatccgtaaggccatgaccaaggaggccatccgagagcaccagatggcccgcactggcggcacgcagacagacctgttcacctgcggcaagtgcaggaaaaagaactgcacctacacacaggtgcagacccgcagctctgatgagcccatgaccacctttgttgtctgcaacgagtgtggaaaccgctggaagttctgctgacccctcgtgtagatgtgctgcagccttgggccctccccggcccacgtcctccgttgacacagcttctctggagaccctagaaggcggcatgtcctgccctcaacctgcctgcctggattgcacctttctgccctttccccctcattattaaatgtttctttttgcc

SEQ ID NO: 192017 - DNA, 1733 bp, Homo sapiens
  Payload ID: 17939
  Gene Name: transcription elongation factor A (SII), 2
  ENST ID: ENST00000395053
  CDS Start-End: 156-884
ggccgcggggccgagggtttgaaccgggggtctgtcgtccgcggcggggctgcgtcggctgcggcgggtgtgggaggtggcgacggccggggccggggtcctgcccggctgcggaggcgggcgcgacgggcgcgggggtcgctgctcctgaggcgatgatgggcaaggaagaggagattgcgcggatcgcccggaggctggacaagatggtgaccaagaagagcgcggagggagccatggatttgctgcgggagctgaaggccatgcctatcacgctgcacctgctccagtccacccgagtcgggatgtctgtcaacgcccttcggaagcagagctcggatgaggaggtcattgcactggccaagtctctcatcaagtcctggaagaagctcctggatgcttccgatgccaaagccagggagcgggggaggggcatgcctctgcccacgtcctcgagggatgcctcagaggccccggatcccagccgcaagaggccggagctgcccagggcaccgtcgactccgaggatcaccacatttcctccggtgcctgtcacctgtgatgccgtgcgcaacaagtgccgcgagatgctgaccgctgccctgcagacggaccatgaccacgtggccatcggtgcggactgcgagcgcctgtcggctcagatcgaggaatatatcctttgggtaggggctgtgggcctgggtttctggtggagtcaggaggctgcctggcctggtgccctctggtggctgctggatgccactgcccagctgtccaggggtcacctgcctgggtggtcacctgcctgggtggtcaggctgtctcacctcaggagggcccccggaccagctgaagggctgattctgtctgcttgtggggcctaggtcccctggggctgtagcctgaagctgggtctcagtcaggaatgggcctggggcaggcttggccctgcagcccttcacctctccaccaggtgtgggtgggcagaccgacccctgtgtggctgggcagaacctttccagcccccaccccaacatggcccccagcggggcaggtggtaggtggagggcagcgacgttgtcctcaggtgggtccttaaaacacttgcacgcatcttccgggacgttggaaacacagacatgaagtataagaaccgtgtacggagtcgtatctccaacctgaaggatgccaagaaccctgacctgcggcggaatgtgctgtgtggggccataacaccccagcagatcgctgtgatgacctcagaggtgagcccctgttggaggggctggagggctgctccctcggagcggtgggctaagccactggccccgtgctccaggagatggccagtgatgagctgaaggagatccgtaaggccatgaccaaggaggccatccgagagcaccagatggcccgcactggcggcacgcagacagacctgttcacctgcggcaagtgcaggaaaaagaactgcacctacacacaggtgcagacccgcagctctgatgagcccatgaccacctttgttgtctgcaacgagtgtggaaaccgctggaagttctgctgacccctcgtgtagatgtgctgcagccttgggccctccccggcccacgtcctccgttgacacagcttctctggagaccctagaaggcggcatgtcctgccctcaacctgcctgcctggattgcacctttctgccctttccccctcattattaaatgtttctttttgcc

SEQ ID NO: 192018 - DNA, 726 bp, Homo sapiens
  Payload ID: 17939
  Gene Name: transcription elongation factor A (SII), 2
  ENST ID: ENST00000415602
  CDS Start-End: 479-726
ggcaggacgagacccctccccggcagagactaaccgggacgcaggggagacccccacccgtggccgagacccctgccccgggccagccctgccgttcactcccgcaaccccggcagaggccgcgatcaggcctggaccttgtcccgggagagccacccgctctggactcagacccctccctcgcccgcagtcacaggctccgcacccttccctgtcccttaactccagacccccagcctggcccgtcgactccttccttggccctgtcccgcctctcggagcccccggggtgttcgggcctcctctgcgggccgcgccagccccttgccttcctccatcccggcctgggcatcctcacaggccgagccccgccccccaactcagccctctcccacgctccgtctcttacagcgtttgtcaccctccgtctcccatagcatttgtcgccggcaacagtttggagtctgaggagggagccatggatttgctgcgggagctgaaggccatgcctatcacgctgcacctgctccagtccacccgagtcgggatgtctgtcaacgcccttcggaagcagagctcggatgaggaggtcattgcactggccaagtctctcatcaagtcctggaagaagctcctggatgcttccgatgccaaagccagggagcgggggaggggcatgcctctgcccacgtcctcgagggatgcctcagaggccccggatcccag

SEQ ID NO: 192019 - DNA, 1083 bp, Homo sapiens
  Payload ID: 17939
  Gene Name: transcription elongation factor A (SII), 2
  ENST ID: ENST00000440819
  CDS Start-End: 346-1083
gaaccaggtttctctaataaattctctcccttctttagccaggacttagcccgcagcaacttgggttgtgggtagttatgtggacaccctccgaaaagagccggtgtgcttatataagagccaggaggtcgggcaagcctcctctgggagtgtctgggcgctggagcctctggccggctctgttcactgcggcctgggcctctgttgtcttgcggccacagcgagactttggaggaggctgtgtgtgaggactttgaaggggccagtaggcagaaggaggtgatattgtctgttgagatctaaagtcctttatgaaggtcctccttctccttccaggagggagccatggatttgctgcgggagctgaaggccatgcctatcacgctgcacctgctccagtccacccgagtcgggatgtctgtcaacgcccttcggaagcagagctcggatgaggaggtcattgcactggccaagtctctcatcaagtcctggaagaagctcctggatgcttccgatgccaaagccagggagcgggggaggggcatgcctctgcccacgtcctcgagggatgcctcagaggccccggatcccagccgcaagaggccggagctgcccagggcaccgtcgactccgaggatcaccacatttcctccggtgcctgtcacctgtgatgccgtgcgcaacaagtgccgcgagatgctgaccgctgccctgcagacggaccatgaccacgtggccatcggtgcggactgcgagcgcctgtcggctcagatcgaggaatgcatcttccgggacgttggaaacacagacatgaagtataagaaccgtgtacggagtcgtatctccaacctgaaggatgccaagaaccctgacctgcggcggaatgtgctgtgtggggccataacaccccagcagatcgctgtgatgacctcagaggagatggccagtgatgagctgaaggagatccgtaaggccatgaccaaggaggccatccgagagcaccagatggcccgcactggcggcacgcagacagacctgttcacctgcggcaagtgcaggaaaaagaactgcacctacacacag

SEQ ID NO: 192020 - DNA, 941 bp, Homo sapiens
  Payload ID: 17939
  Gene Name: transcription elongation factor A (SII), 2
  ENST ID: ENST00000458442
  CDS Start-End: 132-941
cacggatgtgggttacaacttggaatgcttgaggctgcagaacccctccccttcttgactgagcagtaagggttccctgctgtggtgcaggaacatgtgggcagagccctgggtgtctccaggagggagccatggatttgctgcgggagctgaaggccatgcctatcacgctgcacctgctccagtccacccgagtcgggatgtctgtcaacgcccttcggaagcagagctcggatgaggaggtcattgcactggccaagtctctcatcaagtcctggaagaagctcctggatgcttccgatgccaaagccagggagcgggggaggggcatgcctctgcccacgtcctcgagggatgcctcagaggccccggatcccagccgcaagaggccggagctgcccagggcaccgtcgactccgaggatcaccacatttcctccggtgcctgtcacctgtgatgccgtgcgcaacaagtgccgcgagatgctgaccgctgccctgcagacggaccatgaccacgtggccatcggtgcggactgcgagcgcctgtcggctcagatcgaggaatgcatcttccgggacgttggaaacacagacatgaagtataagaaccgtgtacggagtcgtatctccaacctgaaggatgccaagaaccctgacctgcggcggaatgtgctgtgtggggccataacaccccagcagatcgctgtgatgacctcagaggagatggccagtgatgagctgaaggagatccgtaaggccatgaccaaggaggccatccgagagcaccagatggcccgcactggcggcacgcagacagacctgttcacctgcggcaagtgcaggaaaaagaactgcacctacacacaggtgcagacccgcagctctgatgagcccatgaccacctttgttgtctgcaacgagtgtggaaaccgctggaag

SEQ ID NO: 192021 - DNA, 1197 bp, Homo sapiens
  Payload ID: 17940
  Gene Name: transcription elongation factor A (SII), 3
  Uniprot ID: O75764
  ENST ID: ENST00000374601
  CDS Start-End: 75-539
ccttcgcgcctcctgcccccgaggccctactgctgcccctgtgcccctcgccccgccgggcgtcgcgggccaacatgggccaggaagaggagctgctgaggatcgccaaaaagctggagaagatggtggccaggaagaacacggaaggggccctggaccttctgaagaagctgcacagctgccagatgtccatccagctactacagacaaccaggattggagttgctgttaatggggtccgcaagcactgctcagacaaggaggtggtgtccttggccaaagtccttatcaaaaactggaagcggctgctagactcccctggacccccaaaaggagaaaaaggagaggaaagagaaaaggcaaagaagaaggaaaaagggcttgagtgttcagactggaagccagaagcaggcctttctccaccaaggaaaaaacgagaagaccccaaaaccaggagagactctgtggactccaagtcttctgcctcctcctctccaaaaagaccatcggtggaaagagcatgctcgctgatgcagtaactgaaatgccctcgaggtggcgcacagaagcagcgggcccggcctccagatgcctctactcagacctggggcaggaggattttctaaggactggtgcggtgcgggcacatccggggagcagaaggaagctgttgataaatccaacctcccaccccggccgatgatgccctctctgcagtttggctcagttcccaggcgtgtgcattgaaagcaaaatgagtgtggctgcctgaaatgctgcccagacacgaattccagccagccagccagctcctaaccggggaggcgggaccagggctgggtgtgccctgccaggaaggtgggaagaaatgctccaaacagcctagtcttgctcaggtaggaggactctggaaacctctcttttaaagacacagttgatgtgttgaaaagaatttggaagggcgacaggcaggttcgtggtctgactataccctttgctagttggatggataacttggggcagtaacttggatggataattcagttcagctctctgagcttcagtctactgatctgtaaaatggagacaattatgaacccctttcaaggtcattgtgaggattaaatgaggtaatgaaatacccagcactgttcccaaaccatgtaaatgctcaataaatacataatactttgtaat

SEQ ID NO: 192022 - DNA, 1559 bp, Homo sapiens
  Payload ID: 17940
  Gene Name: transcription elongation factor A (SII), 3
  Uniprot ID: O75764
  ENST ID: ENST00000450454
  CDS Start-End: 108-1154
tgtttggggcccgcgcgggttgcgcgccctccgccttcgcgcctcctgcccccgaggccctactgctgcccctgtgcccctcgccccgccgggcgtcgcgggccaacatgggccaggaagaggagctgctgaggatcgccaaaaagctggagaagatggtggccaggaagaacacggaaggggccctggaccttctgaagaagctgcacagctgccagatgtccatccagctactacagacaaccaggattggagttgctgttaatggggtccgcaagcactgctcagacaaggaggtggtgtccttggccaaagtccttatcaaaaactggaagcggctgctagactcccctggacccccaaaaggagaaaaaggagaggaaagagaaaaggcaaagaagaaggaaaaagggcttgagtgttcagactggaagccagaagcaggcctttctccaccaaggaaaaaacgagaagaccccaaaaccaggagagactctgtggactccaagtcttctgcctcctcctctccaaaaagaccatcggtggaaagatcaaacagcagcaaatcaaaagcggagagccccaaaacacctagcagccccttgacccccacgtttgcctcttccatgtgtctcctggccccctgctatctcacaggggactctgtccgggacaagtgtgtggagatgctgtcagcagccctgaaggcggacgatgattacaaggactatggagtcaactgtgacaagatggcatcagaaatcgaagatcatatctaccaagagctcaagagcacggacatgaagtaccggaaccgcgtgcgcagccgcataagcaacctcaaggaccccaggaaccccggcctgcggcggaacgtgctcagtggggccatctccgcagggcttatagccaagatgacggcagaggaaatggccagtgatgaactgagggagttgaggaatgccatgacccaggaggccatccgtgagcaccagatggccaagactggcggcaccaccactgacctcttccagtgcagcaaatgcaagaagaagaactgcacctataaccaggtgcagacacgcagtgctgatgagcccatgactacctttgtcttatgcaatgaatgtggcaatcgctggaagttctgctgatggaacagccagccatgaacaaggtgaggaagaagaaagaggaagcgctgaattatctgaactggagaagcaataaaaattaaagtgaaggaaaatactgaactctgtctgagtgggatggtatgagttagaggaagaattctcttgcaaattaataatcggtcattagaaacaattggttaatgggggagcctaattggagaatgatgctgagaatttgtattgatgaacctcttttagaaactgcagagggctgggcacggtggtttatggctgtaatctgcaaactctgggaggctgaggtgggagaatcgcttaaccccagaagtttgagtccagcccaggcaacacagcaagaccccatctctataaaaagaaaaaataaagaaactgcagcgccttaga

SEQ ID NO: 192023 - DNA, 855 bp, Homo sapiens
  Payload ID: 17940
  Gene Name: transcription elongation factor A (SII), 3
  ENST ID: ENST00000476978
  CDS Start-End: 1-237
gaaatggccagtgatgaactgagggagttgaggaatgccatgacccaggaggccatccgtgagcaccagatggccaagactggcggcaccaccactgacctcttccagtgcagcaaatgcaagaagaagaactgcacctataaccaggtgcagacacgcagtgctgatgagcccatgactacctttgtcttatgcaatgaatgtggcaatcgctggaagatggaatcggcttcctgagatccacagaggagaggaaaaacattctgcacttggaccacgcctctttggaaagtgcttccacagatggtatttcctttgaacctggccacagccaaggatgggaaacaggaaggctgagccctgtcagaaaggagttgaacctaaatgccaccaggccatccttccctcctaaggaagctctgaaagtcttacccaagtctgtaactcagactgccccagctcctgcaaaggcagaagttttgttttcacgcatgggagccaaacaaagactcctcccagagtgctccttcctgccaagtctcctgaaggaacagagtgtggtcacgtgcctattgtcagtttccaactgctctctgacttgcatgtgcaccatgtgatgtctgggccaccaggcaggctgcaggtgctccaaaagttctaaggtacttagcaagaagtacaagataagtcaggatccctggtttcaggtcccattctgccctactcatgctgagcatgttactcacctcattgagcaaaagagtaataataatgcctttctcccaggtttgatgatgtgaggatcattttgatatgagggttatcatgtatgcataaacactttgcaaacaacta

SEQ ID NO: 192024 - DNA, 713 bp, Homo sapiens
  Payload ID: 17940
  Gene Name: transcription elongation factor A (SII), 3
  ENST ID: ENST00000461794
  CDS Start-End: 290-643
gcagaaccaaaggctggaggtcaggagcctggctcagagggtttgaacccagcaggtggcgggggatgaagttagagcaccacctaggacagattgtttctcgtctctctccttccttctgccccttgcctgtccttcggccacatgtctgtctgtatcctcctgctctctgtaccaagaccacacaatagtcagagaagcctggtcaggacccaggccccagtcctcaccttgtggcctcccacaggaaggggccctggaccttctgaagaagctgcacagctgccagatgtccatccagctactacagacaaccaggattggagttgctgttaatggggtccgcaagcactgctcagacaaggaggtggtgtccttggccaaagtccttatcaaaaactggaagcggctgctagactcccctggacccccaaaaggagaaaaaggagaggaaagagaaaaggcaaagaagaaggaaaaagggcttgagtgttcagactggaagccagaagcaggcctttctccaccaaggaaaaaacgagaagaccccaaaaccaggagagactctgtggactccaagtcttctgcctcctcctctccaaaaagaccatcggtggaaagagcatgctcgctgatgcagtaactgaaatgccctcgaggtggcgcacagaagcagcgggcccggcctccagatgcctctactcagacctggg

SEQ ID NO: 192025 - DNA, 1197 bp, Homo sapiens; identical to SEQ ID NO: 192021
  Payload ID: 17940
  Gene Name: Transcription elongation factor A (SII), 3
  ENST ID: ENST00000634832
  CDS Start-End: 75-539

SEQ ID NO: 192026 - DNA, 855 bp, Homo sapiens; identical to SEQ ID NO: 192023
  Payload ID: 17940
  Gene Name: Transcription elongation factor A (SII), 3
  ENST ID: ENST00000635497
  CDS Start-End: 1-237

SEQ ID NO: 192027 - DNA, 713 bp, Homo sapiens; identical to SEQ ID NO: 192024
  Payload ID: 17940
  Gene Name: Transcription elongation factor A (SII), 3
  ENST ID: ENST00000635356
  CDS Start-End: 290-643

SEQ ID NO: 192028 - DNA, 1559 bp, Homo sapiens; identical to SEQ ID NO: 192022
  Payload ID: 17940
  Gene Name: Transcription elongation factor A (SII), 3
  ENST ID: ENST00000635035
  CDS Start-End: 108-1154

SEQ ID NO: 192029 - DNA, 1164 bp, Homo sapiens
  Payload ID: 17941
  Gene Name: transcription elongation factor A (SII)-like 1
  Uniprot ID: Q15170
  ENST ID: ENST00000372624
  CDS Start-End: 128-607
ctttggtcgagagggaaagcagaagaagtctgctggtcacagcggggcacctcgaggagaggacgactaggagcacacggcccggaaaggtccagaataactgtgcttgaagaagaaaattcccaacatggacaaaccacgcaaagaaaatgaagaagagccgcagagcgcgcccaagaccgatgaggagaggcctccggtggagcactctcccgaaaagcagtcccccgaggagcagtcttcggaggagcagtcctcggaggaggagttctttcctgaggagctcttgcctgagctcctgcctgagatgctcctctcggaggagcgccctccgcaggagggtctttccaggaaggacctgtttgaggggcgccctcccatggagcagcctccttgtggagtaggaaaacataagcttgaagaaggaagctttaaagaaaggttggctcgttctcgcccgcaatttagaggggacatacatggcagaaatttaagcaatgaggagatgatacaggcagcagatgagctagaagagatgaaaagagtaagaaacaaactgatgataatgcactggaaggcaaaacggagccgtccttatcctatttaatgtgttcggcctttaattctgttttgcctgctaatagtattgccattgccacctggactttctgtttgcattttcttaatgccttttcccatattctgaattttaactttttgtgaggctttattttagatgtttagcatgtaactcgcttaaagttgaggtttccccctaaaatctacaagtttccctctttcagtcatgagccctacacatttgcatgaaagatgtacattatatattgtgaaacgaaaaaagcaattttcaaatggtatatattgtatcccatttttgtaaaaaaaatgtatatttatatattaatatgcaaagaaaaagctaaaagtatagacttcaaaggcataacagtggttgtgtggtaagataataggtgattttttaaatttttgttttatctgaatttctcattttttcaggacaaacgttttacttgtgttgcaaaaatatataatgaaaaaatcacacaattttgaagaaaactgtcaatcagcttataacgacaatgtggcacttaataaatacttgtcagaactttaaaaaaa

SEQ ID NO: 192030 - DNA, 1201 bp, Homo sapiens
  Payload ID: 17941
  Gene Name: transcription elongation factor A (SII)-like 1
  Uniprot ID: Q15170
  ENST ID: ENST00000372625
  CDS Start-End: 165-644
gcctgtccaccatctccctattaccctttggtcgagagggaaagcagaagaagtctgctggtcacagcggggcacctcgaggagaggacgactaggagcacacggcccggaaaggtccaggtcagggaagggaataactgtgcttgaagaagaaaattcccaacatggacaaaccacgcaaagaaaatgaagaagagccgcagagcgcgcccaagaccgatgaggagaggcctccggtggagcactctcccgaaaagcagtcccccgaggagcagtcttcggaggagcagtcctcggaggaggagttctttcctgaggagctcttgcctgagctcctgcctgagatgctcctctcggaggagcgccctccgcaggagggtctttccaggaaggacctgtttgaggggcgccctcccatggagcagcctccttgtggagtaggaaaacataagcttgaagaaggaagctttaaagaaaggttggctcgttctcgcccgcaatttagaggggacatacatggcagaaatttaagcaatgaggagatgatacaggcagcagatgagctagaagagatgaaaagagtaagaaacaaactgatgataatgcactggaaggcaaaacggagccgtccttatcctatttaatgtgttcggcctttaattctgttttgcctgctaatagtattgccattgccacctggactttctgtttgcattttcttaatgccttttcccatattctgaattttaactttttgtgaggctttattttagatgtttagcatgtaactcgcttaaagttgaggtttccccctaaaatctacaagtttccctctttcagtcatgagccctacacatttgcatgaaagatgtacattatatattgtgaaacgaaaaaagcaattttcaaatggtatatattgtatcccatttttgtaaaaaaaatgtatatttatatattaatatgcaaagaaaaagctaaaagtatagacttcaaaggcataacagtggttgtgtggtaagataataggtgattttttaaatttttgttttatctgaatttctcattttttcaggacaaacgttttacttgtgttgcaaaaatatataatgaaaaaatcacacaattttgaagaaaactgtcaatcagcttataacgacaatgtggcacttaataaatacttgtcagaactttaaaaaaa

SEQ ID NO: 192031 - DNA, 721 bp, Homo sapiens
  Payload ID: 17941
  Gene Name: transcription elongation factor A (SII)-like 1
  Uniprot ID: Q15170
  ENST ID: ENST00000372626
  CDS Start-End: 191-670
aggggaagtagcacagaggaagaggcaatactacccgagactagatgcggaccgtctctggcaaccaggaaaaggcaaatacaaagagaggtctgctggtcacagcggggcacctcgaggagaggacgactaggagcacacggcccggaaaggtccagaataactgtgcttgaagaagaaaattcccaacatggacaaaccacgcaaagaaaatgaagaagagccgcagagcgcgcccaagaccgatgaggagaggcctccggtggagcactctcccgaaaagcagtcccccgaggagcagtcttcggaggagcagtcctcggaggaggagttctttcctgaggagctcttgcctgagctcctgcctgagatgctcctctcggaggagcgccctccgcaggagggtctttccaggaaggacctgtttgaggggcgccctcccatggagcagcctccttgtggagtaggaaaacataagcttgaagaaggaagctttaaagaaaggttggctcgttctcgcccgcaatttagaggggacatacatggcagaaatttaagcaatgaggagatgatacaggcagcagatgagctagaagagatgaaaagagtaagaaacaaactgatgataatgcactggaaggcaaaacggagccgtccttatcctatttaatgtgttcggcctttaattctgttttgcctgctaatagtattgccattgcca

SEQ ID NO: 192032 - DNA, 1080 bp, Homo sapiens
  Payload ID: 17942
  Gene Name: transcription elongation factor A (SII)-like 2
  Uniprot ID: Q9H3H9
  ENST ID: ENST00000329035
  CDS Start-End: 200-883
gcgcccgcgcagaatcagctgtctgagctgcccaggcggcgggggagcagcgagcgggcttcagcgagccgcaggaggcacaggcctgtcctgggtccccgcaggtctgcgcgtctgttgttcccagcgctctgagaggcctgaaaaggaagagcaacctgtccagaatccccgcaggaaaaggaggggaaatctcgacatggaaaaactcttcaatgaaaatgaaggaatgccttcgaatcaaggaaagatagacaatgaagaacagccaccgcacgagggaaagccagaagtagcttgtattctggaagacaagaagttagaaaacgagggaaacacagaaaacacgggcaagagagttgaggaaccgttaaaggataaagaaaagccagagagtgcgggaaaggcaaaaggagaaggaaagtcagagaggaagggaaagtcagagatgcagggaggatcaaagacagagggaaagccagagagagggggaagggcagagggtgaaggagagccagacagtgaaagagagccagagagtgagggagagccagaaagtgaaacaagggctgcaggaaagcgcccagctgaggatgatatacccaggaaagccaaaagaaaaaccaacaaggggctggctcagtacctcaagcaatataaggaagccatacatgatatgaatttcagcaatgaggacatgataagagaatttgacaacatggctagggtggaggataaaaggagaaaaagcaaacagaaattgggggcgtttttgtggatgcaaagaaatttacaggaccccttctatcctaggggtccaagggaattcaggggtggctgcagggccccacgaagggacactgaagacattccttatgtgtagtgtccctggcaggcatttgtcaggccatatgttttaaccttatggtaatactttgctttagtcgttcctcctgctaccagtagcgttttgacccacctgccagtgtttgcttgctctatgtttcagtagcagattttcacacatgtgcattgcagagacgtcatgattcgtggaaaaataaagcagcttataatatc

SEQ ID NO: 192033 - DNA, 1100 bp, Homo sapiens
  Payload ID: 17942
  Gene Name: transcription elongation factor A (SII)-like 2
  Uniprot ID: Q9H3H9
  ENST ID: ENST00000372780
  CDS Start-End: 220-903
agcggtcgggtccgggcgcccgcgcagaatcagctgtctgagctgcccaggcggcgggggagcagcgagcgggcttcagcgagccgcaggaggcacaggcctgtcctgggtccccgcaggtctgcgcgtctgttgttcccagcgctctgagaggcctgaaaaggaagagcaacctgtccagaatccccgcaggaaaggaaaaggaggggaaatctcgacatggaaaaactcttcaatgaaaatgaaggaatgccttcgaatcaaggaaagatagacaatgaagaacagccaccgcacgagggaaagccagaagtagcttgtattctggaagacaagaagttagaaaacgagggaaacacagaaaacacgggcaagagagttgaggaaccgttaaaggataaagaaaagccagagagtgcgggaaaggcaaaaggagaaggaaagtcagagaggaagggaaagtcagagatgcagggaggatcaaagacagagggaaagccagagagagggggaagggcagagggtgaaggagagccagacagtgaaagagagccagagagtgagggagagccagaaagtgaaacaagggctgcaggaaagcgcccagctgaggatgatatacccaggaaagccaaaagaaaaaccaacaaggggctggctcagtacctcaagcaatataaggaagccatacatgatatgaatttcagcaatgaggacatgataagagaatttgacaacatggctagggtggaggataaaaggagaaaaagcaaacagaaattgggggcgtttttgtggatgcaaagaaatttacaggaccccttctatcctaggggtccaagggaattcaggggtggctgcagggccccacgaagggacactgaagacattccttatgtgtagtgtccctggcaggcatttgtcaggccatatgttttaaccttatggtaatactttgctttagtcgttcctcctgctaccagtagcgttttgacccacctgccagtgtttgcttgctctatgtttcagtagcagattttcacacatgtgcattgcagagacgtcatgattcgtggaaaaataaagcagcttataatatc

SEQ ID NO: 192034 - DNA, 1124 bp, Homo sapiens
  Payload ID: 17943
  Gene Name: transcription elongation factor A (SII)-like 3
  Uniprot ID: Q969E4
  ENST ID: ENST00000243286
  CDS Start-End: 263-865
gtgggcaccagcccccgcgcccgcccgcccgccctgcggtccggtcctggcgcccgcgcagaaccagctgtctgagctgcccgggcagcgggggagcagcgagcgggcttccgcgagccggagaaggcacaggcctgtcccgggtcccggcaggtcagtgtgaaggtctgcgcgtctgttcccagcgctctgcgaggcctaaaaaggaggagcaacctgtccagaatccctgcaggacaggaaaaggaggggaaatctcgacatggaaaaaccctacaataaaaatgaaggaaacctggaaaacgagggaaagccagaagatgaagtagagcctgatgatgaaggaaagtcagacgaggaagaaaagccagacgtggaggggaagacagaatgcgagggaaagagagaggatgagggagagccaggtgatgagggacaactggaagatgagggaagccaggaaaagcagggcaggtccgaaggtgagggcaagccacaaggcgagggcaagccagcctcccaggcaaagccagagagccagccgcgggccgccgaaaagcgcccggctgaagattatgtgccccggaaagcaaaaagaaaaacggacagggggacggacgattcccccaaggactctcaggaggacttacaggaaaggcatctgagcagtgaggagatgatgagagaatgtggagatgtgtcaagggctcaagaggagctaaggaaaaaacagaaaatgggtggttttcattggatgcaaagagatgtacaggatccattcgccccaaggggacaacggggtgtcaggggagtgaggggtggaggtaggggccagaggggcttacacgatatcccatacctttaatgcctttggccttccattctgatttctctgatgagaatattgctggccctgctttccctggtaggtatttgccaggcccaatgctttaaccttaagctgatactttgctttagatgtcagtctcgttaccagcagccttttgacccaactacggcgctctatattttagtagaggattttcacccatgtgcatggaaaagatgttcatggtacattgtaaaaaaataaaattaaaattaaaaaaagtttgcagaaccgc

SEQ ID NO: 192035 - DNA, 1113 bp, Homo sapiens
  Payload ID: 17943
  Gene Name: transcription elongation factor A (SII)-like 3
  Uniprot ID: Q969E4
  ENST ID: ENST00000372627
  CDS Start-End: 251-853
gtgggcaccagcccccgcgcccgcccgcccgccctgcggtccggtcctggcgcccgcgcagaaccagctgtctgagctgcccgggcagcgggggagcagcgagcgggcttccgcgagccggagaaggcacaggcctgtcccgggtcccggcaggtctgcgcgtctgttcccagcgctctgcgaggcctaaaaaggaggagcaacctgtccagaatccctgcaggacaggaaaaggaggggaaatctcgacatggaaaaaccctacaataaaaatgaaggaaacctggaaaacgagggaaagccagaagatgaagtagagcctgatgatgaaggaaagtcagacgaggaagaaaagccagacgtggaggggaagacagaatgcgagggaaagagagaggatgagggagagccaggtgatgagggacaactggaagatgagggaagccaggaaaagcagggcaggtccgaaggtgagggcaagccacaaggcgagggcaagccagcctcccaggcaaagccagagagccagccgcgggccgccgaaaagcgcccggctgaagattatgtgccccggaaagcaaaaagaaaaacggacagggggacggacgattcccccaaggactctcaggaggacttacaggaaaggcatctgagcagtgaggagatgatgagagaatgtggagatgtgtcaagggctcaagaggagctaaggaaaaaacagaaaatgggtggttttcattggatgcaaagagatgtacaggatccattcgccccaaggggacaacggggtgtcaggggagtgaggggtggaggtaggggccagaggggcttacacgatatcccatacctttaatgcctttggccttccattctgatttctctgatgagaatattgctggccctgctttccctggtaggtatttgccaggcccaatgctttaaccttaagctgatactttgctttagatgtcagtctcgttaccagcagccttttgacccaactacggcgctctatattttagtagaggattttcacccatgtgcatggaaaagatgttcatggtacattgtaaaaaaataaaattaaaattaaaaaaagtttgcagaaccgca

SEQ ID NO: 192036 - DNA, 1221 bp, Homo sapiens
  Payload ID: 17943
  Gene Name: transcription elongation factor A (SII)-like 3
  Uniprot ID: Q969E4
  ENST ID: ENST00000372628
  CDS Start-End: 359-961
gggagacagaacttgaggactgaggagagaggaggcccaggacagaaccctaggaacactgccactcaaggtggcagctcagcttcctggcaggcagcaccaccctgggctctggagtcaggcagagacagtcttgaaagcgggctctggagttctggggctgagcgctcttggcaaagtcgggtaccctctttgatcagctgtcacacctggcgataatggcatcagagagagataccctgcgaggatgccgtgagatgcgccaggtctgcgcgtctgttcccagcgctctgcgaggcctaaaaaggaggagcaacctgtccagaatccctgcaggaaaaggaggggaaatctcgacatggaaaaaccctacaataaaaatgaaggaaacctggaaaacgagggaaagccagaagatgaagtagagcctgatgatgaaggaaagtcagacgaggaagaaaagccagacgtggaggggaagacagaatgcgagggaaagagagaggatgagggagagccaggtgatgagggacaactggaagatgagggaagccaggaaaagcagggcaggtccgaaggtgagggcaagccacaaggcgagggcaagccagcctcccaggcaaagccagagagccagccgcgggccgccgaaaagcgcccggctgaagattatgtgccccggaaagcaaaaagaaaaacggacagggggacggacgattcccccaaggactctcaggaggacttacaggaaaggcatctgagcagtgaggagatgatgagagaatgtggagatgtgtcaagggctcaagaggagctaaggaaaaaacagaaaatgggtggttttcattggatgcaaagagatgtacaggatccattcgccccaaggggacaacggggtgtcaggggagtgaggggtggaggtaggggccagaggggcttacacgatatcccatacctttaatgcctttggccttccattctgatttctctgatgagaatattgctggccctgctttccctggtaggtatttgccaggcccaatgctttaaccttaagctgatactttgctttagatgtcagtctcgttaccagcagccttttgacccaactacggcgctctatattttagtagaggattttcacccatgtgcatggaaaagatgttcatggtacattgtaaaaaaataaaattaaaattaaaaaaagtttgcagaaccgca

SEQ ID NO: 192037 - DNA, 1511 bp, Homo sapiens
  Payload ID: 17944
  Gene Name: transcription elongation factor A (SII)-like 4
  Uniprot ID: Q96EI5
  ENST ID: ENST00000372629
  CDS Start-End: 240-1316
ttggtctaagacatgggctgacaaactttttccataaagggccagaaagtaaatatttcaggctttgtgggatatctatttatgatttattttactcctagtattatttcatcttttatacaggttattaaggttagtattgctgcataacaaattactccaaaatttaatcatttatattcaagaagagttcagctgctaggttcttattttgggactctcatgatgctgaggtcaagatgccagctggaggccaggcgccgcagctcacgcctgtaatcccagcgttttgggaggccaggggcctcccaaattcaaaaggaagagacaaagtccacatctgtcaatgcgaagaatggaaaggtcacatatcatatgtggagcgggacataacaacttcggaaattaaatctcttccccaggtcagtgtgcgggccttccacgctgccagcggaacactggaatggcggaaggggaacgggtacggcagggggaaaggctgggggtggggtcgggtcgagtcgagggaagctggcccgagtgtggacagagatggcggtctgcgcgtctgttgttcccagcgctctgcgaagcctgaaaaggaggagcaacctgtccagaatccccgcaggtccgtgaaagacaggaaaaggaggggaaatctcgacatggaaaaactctacagtgaaaatgaaggaatggcttcaaaccaaggaaagatggaaaatgaagaacagccacaagacgagagaaagccagaagtaacttgtactctggaagacaagaagttagaaaacgagggaaagacagaaaacaagggcaaaacaggagatgaggaaatgttaaaggataaaggaaagccagagagtgagggagaggcaaaagaaggaaagtcagagagggagggagagtcagagatggagggaggatcagagagagagggaaaaccagagatagagggaaagccagagagtgaaggagagccagggagtgaaacaagggctgcaggaaagcgcccagctgaggatgatgtacccaggaaagccaaaagaaaaactaataaggggctggctcattacctcaaggagtataaagaggccatacatgatatgaatttcagcaatgaggacatgataagagaatttgacaatatggctaaggtgcaggatgagaagagaaaaagcaaacagaaattgggggcgtttttgtggatgcaaagaaatttacaggaccccttctaccctagaggtccaagggaattcaggggtggctgcagggccccacgaagggacattgaagacattccttatgtgtagtgtccctggcaggcatttaccaggccatgtgctttaacgttacggtaatactttactttaggcatccctcctgttgctagcagccttttgacctatctgcaatgcagtgttctcagtaggaaatgttcatctgttacatggaaaaaatgttgatggtgcattgtaaaattaaaaaacacaacttgcagaaccaaa

SEQ ID NO: 192038 - DNA, 338 bp, Homo sapiens
  Payload ID: 17944
  Gene Name: transcription elongation factor A (SII)-like 4
  ENST ID: ENST00000425011
  CDS Start-End: 165-338
cttcttccaggtcagtgtgcgggccttccacgctgccagcggaacactggaatggcggaaggggaacgggtctgcgcgtctgttgttcccagcgctctgcgaagcctgaaaaggaggagcaacctgtccagaatccccgcaggaaaaggaggggaaatctcgacatggaaaaactctacagtgaaaatgaaggaatggcttcaaaccaaggaaagatggaaaatgaagaacagccacaagacgagagaaagccagaagtaacttgtactctggaagacaagaagttagaaaacgagggaaagacagaaaacaagggcaaaacaggagatgaggaaatg

SEQ ID NO: 192039 - DNA, 891 bp, Homo sapiens
  Payload ID: 17944
  Gene Name: transcription elongation factor A (SII)-like 4
  ENST ID: ENST00000434216
  CDS Start-End: 742-891
tctgctccggttcctgggctcctaattcttggtccagcttcttccaggtcagtgtgcgggccttccacgctgccagcggaacactggaatggcggaaggggaacgggtacggcagggggaaaggctgggggtggggtcgggtcgagtcgagggaagctggcccgagtgtggacagagatggcggtgggaaaacggctaggggtggctgagggggagcacgtaggcagtgggcagagggtgaggaaggcgagcacccccaagtatccatgctcgctttccaggcacatcctcttctctgccctccgtccattttggagccggagatggtgggctggggccgccccagtagtgagacagtggaagtaaaccccatctgccgttcccgtgcgtagagaaaaacgttgaccgcgaggctggggaggagagttgcctctgaggaagaagggcacagagacccaaaattagtttggaaagcatcctgatttggtgcccgaggcctggaaagaaatggcggctggggtgcggcggaggtaggggaggaaaacgttggatgagaagggcctggactcaggaaagggaaccgcgtccgtgtgagcccgctgagcgcgcagaccctgcccctgtctcctgtctgtctgcaggtctgcgcgtctgttgttcccagcgctctgcgaagcctgaaaaggaggagcaacctgtccagaatccccgcaggacaggaaaaggaggggaaatctcgacatggaaaaactctacagtgaaaatgaaggaatggcttcaaaccaaggaaagatggaaaatgaagaacagccacaagacgagagaaagccagaagtaacttgtactctggaagacaagaagttagaaaacgagggaaagacagaaaacaag

SEQ ID NO: 192040 - DNA, 959 bp, Homo sapiens
  Payload ID: 17944
  Gene Name: transcription elongation factor A (SII)-like 4
  Uniprot ID: Q96EI5
  ENST ID: ENST00000415568
  CDS Start-End: 133-780
gcacgggcgcagatgtaggcaccggtccgagtgcctgccctctgtccccgcggctgggtctcgtctgctccggttcctgggctcctaattcttggtccagcttcttccaggaaaaggaggggaaatctcgacatggaaaaactctacagtgaaaatgaaggaatggcttcaaaccaaggaaagatggaaaatgaagaacagccacaagacgagagaaagccagaagtaacttgtactctggaagacaagaagttagaaaacgagggaaagacagaaaacaagggcaaaacaggagatgaggaaatgttaaaggataaaggaaagccagagagtgagggagaggcaaaagaaggaaagtcagagagggagggagagtcagagatggagggaggatcagagagagagggaaaaccagagatagagggaaagccagagagtgaaggagagccagggagtgaaacaagggctgcaggaaagcgcccagctgaggatgatgtacccaggaaagccaaaagaaaaactaataaggggctggctcattacctcaaggagtataaagaggccatacatgatatgaatttcagcaatgaggacatgataagagaatttgacaatatggctaaggtgcaggatgagaagagaaaaagcaaacagaaattgggggcgtttttgtggatgcaaagaaatttacaggaccccttctaccctagaggtccaagggaattcaggggtggctgcagggccccacgaagggacattgaagacattccttatgtgtagtgtccctggcaggcatttaccaggccatgtgctttaacgttacggtaatactttactttaggcatccctcctgttgctagcagccttttgacctatctgcaatgcagtgttctcagtaggaaatgttcatctgttacatggaaaaaatgttgatggtgcattgtaaaattaaaaaacac

SEQ ID NO: 192041 - DNA, 1273 bp, Homo sapiens
  Payload ID: 17944
  Gene Name: transcription elongation factor A (SII)-like 4
  Uniprot ID: Q96EI5
  ENST ID: ENST00000472484
  CDS Start-End: 213-860
ctgcacgggcgcagatgtaggcaccggtccgagtgcctgccctctgtccccgcggctgggtctcgtctgctccggttcctgggctcctaattcttggtccagcttcttccaggtctgcgcgtctgttgttcccagcgctctgcgaagcctgaaaaggaggagcaacctgtccagaatccccgcaggacaggaaaaggaggggaaatctcgacatggaaaaactctacagtgaaaatgaaggaatggcttcaaaccaaggaaagatggaaaatgaagaacagccacaagacgagagaaagccagaagtaacttgtactctggaagacaagaagttagaaaacgagggaaagacagaaaacaagggcaaaacaggagatgaggaaatgttaaaggataaaggaaagccagagagtgagggagaggcaaaagaaggaaagtcagagagggagggagagtcagagatggagggaggatcagagagagagggaaaaccagagatagagggaaagccagagagtgaaggagagccagggagtgaaacaagggctgcaggaaagcgcccagctgaggatgatgtacccaggaaagccaaaagaaaaactaataaggggctggctcattacctcaaggagtataaagaggccatacatgatatgaatttcagcaatgaggacatgataagagaatttgacaatatggctaaggtgcaggatgagaagagaaaaagcaaacagaaattgggggcgtttttgtggatgcaaagaaatttacaggaccccttctaccctagaggtccaagggaattcaggggtggctgcagggccccacgaagggacattgaagacattccttatgtgtagtgtccctggcaggcatttaccaggccatgtgctttaacgttacggtaatactttactttaggcatccctcctgttgctagcagccttttgacctatctgcaatgcagtgttctcagtaggaaatgttcatctgttacatggaaaaaatgttgatggtgcattgtaaaattaaaaaacacaacttgcagaaccaaatatatggcatcagtacatttttgtaaaactacaaagatacttacctagtaatatagtatagaaaacaattctgaaagctgtgtccactaaaagattaacagtggttatctctgggtgattttttctgttcttttttgttcatctgtccatttttctcctaaaaacagatttctttagtcataaaaataataaaatataaagtattggaaaacagtgaa

SEQ ID NO: 192042 - DNA, 1135 bp, Homo sapiens
  Payload ID: 17944
  Gene Name: transcription elongation factor A (SII)-like 4
  Uniprot ID: Q96EI5
  ENST ID: ENST00000468024
  CDS Start-End: 293-940
gggctgcggcattcacgtgatctgcacgggcgcagatgtaggcaccggtccgagtgcctgccctctgtccccgcggctgggtctcgtctgctccggttcctgggctcctaattcttggtccagcttcttccaggtcagtgtgcgggccttccacgctgccagcggaacactggaatggcggaaggggaacgggtctgcgcgtctgttgttcccagcgctctgcgaagcctgaaaaggaggagcaacctgtccagaatccccgcaggacaggaaaaggaggggaaatctcgacatggaaaaactctacagtgaaaatgaaggaatggcttcaaaccaaggaaagatggaaaatgaagaacagccacaagacgagagaaagccagaagtaacttgtactctggaagacaagaagttagaaaacgagggaaagacagaaaacaagggcaaaacaggagatgaggaaatgttaaaggataaaggaaagccagagagtgagggagaggcaaaagaaggaaagtcagagagggagggagagtcagagatggagggaggatcagagagagagggaaaaccagagatagagggaaagccagagagtgaaggagagccagggagtgaaacaagggctgcaggaaagcgcccagctgaggatgatgtacccaggaaagccaaaagaaaaactaataaggggctggctcattacctcaaggagtataaagaggccatacatgatatgaatttcagcaatgaggacatgataagagaatttgacaatatggctaaggtgcaggatgagaagagaaaaagcaaacagaaattgggggcgtttttgtggatgcaaagaaatttacaggaccccttctaccctagaggtccaagggaattcaggggtggctgcagggccccacgaagggacattgaagacattccttatgtgtagtgtccctggcaggcatttaccaggccatgtgctttaacgttacggtaatactttactttaggcatccctcctgttgctagcagccttttgacctatctgcaatgcagtgttctcagtaggaaatgttcatctgttacatggaaaaaatgttgatggtgcattgtaaaattaaaaaacacaacttgcagaaccaaa

SEQ ID NO: 192043 - DNA, 779 bp, Homo sapiens
  Payload ID: 17944
  Gene Name: transcription elongation factor A (SII)-like 4
  ENST ID: ENST00000459722
  CDS Start-End: 506-779
tgtaggcaccggtccgagtgcctgccctctgtccccgcggctgggtctcgtctgctccggttcctgggctcctaattcttggtccagcttcttccaggtcagtgtgcgggccttccacgctgccagcggaacactggaatggcggaaggggaacggagaaaaacgttgaccgcgaggctggggaggagagttgcctctgaggaagaagggcacagagacccaaaattagtttggaaagcatcctgatttggtgcccgaggcctggaaagaaatggcggctggggtgcggcggaggtaggggaggaaaacgttggatgagaagggcctggactcaggaaagggaaccgcgtccgtgtgagcccgctgagcgcgcagaccctgcccctgtctcctgtctgtctgcaggtctgcgcgtctgttgttcccagcgctctgcgaagcctgaaaaggaggagcaacctgtccagaatccccgcaggacaggaaaaggaggggaaatctcgacatggaaaaactctacagtgaaaatgaaggaatggcttcaaaccaaggaaagatggaaaatgaagaacagccacaagacgagagaaagccagaagtaacttgtactctggaagacaagaagttagaaaacgagggaaagacagaaaacaagggcaaaacaggagatgaggaaatgttaaaggataaaggaaagccagagagtgagggagaggcaaaagaaggaaagtcagagagggagggagagtcagagatggagggaggatcagagagagagg

SEQ ID NO: 192044 - DNA, 1571 bp, Homo sapiens
  Payload ID: 17944
  Gene Name: transcription elongation factor A (SII)-like 4
  Uniprot ID: Q96EI5
  ENST ID: ENST00000472745
  CDS Start-End: 553-1200
gcaccggtccgagtgcctgccctctgtccccgcggctgggtctcgtctgctccggttcctgggctcctaattcttggtccagcttcttccaggcacatcctcttctctgccctccgtccattttggagccggagatggtgggctggggccgccccagtagtgagacagtggaagtaaaccccatctgccgttcccgtgcgtagagaaaaacgttgaccgcgaggctggggaggagagttgcctctgaggaagaagggcacagagacccaaaattagtttggaaagcatcctgatttggtgcccgaggcctggaaagaaatggcggctggggtgcggcggaggtaggggaggaaaacgttggatgagaagggcctggactcaggaaagggaaccgcgtccgtgtgagcccgctgagcgcgcagaccctgcccctgtctcctgtctgtctgcaggtctgcgcgtctgttgttcccagcgctctgcgaagcctgaaaaggaggagcaacctgtccagaatccccgcaggacaggaaaaggaggggaaatctcgacatggaaaaactctacagtgaaaatgaaggaatggcttcaaaccaaggaaagatggaaaatgaagaacagccacaagacgagagaaagccagaagtaacttgtactctggaagacaagaagttagaaaacgagggaaagacagaaaacaagggcaaaacaggagatgaggaaatgttaaaggataaaggaaagccagagagtgagggagaggcaaaagaaggaaagtcagagagggagggagagtcagagatggagggaggatcagagagagagggaaaaccagagatagagggaaagccagagagtgaaggagagccagggagtgaaacaagggctgcaggaaagcgcccagctgaggatgatgtacccaggaaagccaaaagaaaaactaataaggggctggctcattacctcaaggagtataaagaggccatacatgatatgaatttcagcaatgaggacatgataagagaatttgacaatatggctaaggtgcaggatgagaagagaaaaagcaaacagaaattgggggcgtttttgtggatgcaaagaaatttacaggaccccttctaccctagaggtccaagggaattcaggggtggctgcagggccccacgaagggacattgaagacattccttatgtgtagtgtccctggcaggcatttaccaggccatgtgctttaacgttacggtaatactttactttaggcatccctcctgttgctagcagccttttgacctatctgcaatgcagtgttctcagtaggaaatgttcatctgttacatggaaaaaatgttgatggtgcattgtaaaattaaaaaacacaacttgcagaaccaaatatatggcatcagtacatttttgtaaaactacaaagatacttacctagtaatatagtatagaaaacaattctgaaagctgtgtccactaaaagattaacagtggttatctctgggtgattttttctgttcttttttgttcatctgtccatttttctcctaaaaacagatttcttta

SEQ ID NO: 192045 - DNA, 681 bp, Homo sapiens
  Payload ID: 17944
  Gene Name: transcription elongation factor A (SII)-like 4
  ENST ID: ENST00000490644
  CDS Start-End: 452-681
gcagatgtaggcaccggtccgagtgcctgccctctgtccccgcggctgggtctcgtctgctccggttcctgggctcctaattcttggtccagcttcttccaggcacatcctcttctctgccctccgtccattttggagccggagatggtgggctggggccgccccagtagtgagacagtggaagtaaaccccatctgccgttcccgtgcgtagagaaaaacgttgaccgcgaggctggggaggagagttgcctctgaggaagaagggcacagagacccaaaattagtttggaaagcatcctgatttggtgcccgaggcctggaaagaaatggcggctggggtgcggcggaggtctgcgcgtctgttgttcccagcgctctgcgaagcctgaaaaggaggagcaacctgtccagaatccccgcaggacaggaaaaggaggggaaatctcgacatggaaaaactctacagtgaaaatgaaggaatggcttcaaaccaaggaaagatggaaaatgaagaacagccacaagacgagagaaagccagaagtaacttgtactctggaagacaagaagttagaaaacgagggaaagacagaaaacaagggcaaaacaggagatgaggaaatgttaaaggataaaggaaagccagagagtgagggagaggcaaaagaaggaaagtcaga

SEQ ID NO: 192046 - DNA, 566 bp, Homo sapiens
  Payload ID: 17944
  Gene Name: transcription elongation factor A (SII)-like 4
  ENST ID: ENST00000469586
  CDS Start-End: 179-566
ggcctggactcaggaaagggaaccgcgtccgtgtgagcccgctgagcgcgcagaccctgcccctgtctcctgtctgtctgcaggtctgcgcgtctgttgttcccagcgctctgcgaagcctgaaaaggaggagcaacctgtccagaatccccgcaggaaaaggaggggaaatctcgacatggaaaaactctacagtgaaaatgaaggaatggcttcaaaccaaggaaagatggaaaatgaagaacagccacaagacgagagaaagccagaagtaacttgtactctggaagacaagaagttagaaaacgagggaaagacagaaaacaagggcaaaacaggagatgaggaaatgttaaaggataaaggaaagccagagagtgagggagaggcaaaagaaggaaagtcagagagggagggagagtcagagatggagggaggatcagagagagagggaaaaccagagatagagggaaagccagagagtgaaggagagccagggagtgaaacaagggctgcaggaaagcgcccagctgaggatgatgtacccaggaaagccaaaagaaaaa

SEQ ID NO: 192047 - DNA, 1008 bp, Homo sapiens
  Payload ID: 17944
  Gene Name: transcription elongation factor A (SII)-like 4
  Uniprot ID: Q96EI5
  ENST ID: ENST00000494801
  CDS Start-End: 158-805
cgcggctgggtctcgtctgctccggttcctgggctcctaattcttggtccagcttcttccaggtctgcgcgtctgttgttcccagcgctctgcgaagcctgaaaaggaggagcaacctgtccagaatccccgcaggaaaaggaggggaaatctcgacatggaaaaactctacagtgaaaatgaaggaatggcttcaaaccaaggaaagatggaaaatgaagaacagccacaagacgagagaaagccagaagtaacttgtactctggaagacaagaagttagaaaacgagggaaagacagaaaacaagggcaaaacaggagatgaggaaatgttaaaggataaaggaaagccagagagtgagggagaggcaaaagaaggaaagtcagagagggagggagagtcagagatggagggaggatcagagagagagggaaaaccagagatagagggaaagccagagagtgaaggagagccagggagtgaaacaagggctgcaggaaagcgcccagctgaggatgatgtacccaggaaagccaaaagaaaaactaataaggggctggctcattacctcaaggagtataaagaggccatacatgatatgaatttcagcaatgaggacatgataagagaatttgacaatatggctaaggtgcaggatgagaagagaaaaagcaaacagaaattgggggcgtttttgtggatgcaaagaaatttacaggaccccttctaccctagaggtccaagggaattcaggggtggctgcagggccccacgaagggacattgaagacattccttatgtgtagtgtccctggcaggcatttaccaggccatgtgctttaacgttacggtaatactttactttaggcatccctcctgttgctagcagccttttgacctatctgcaatgcagtgttctcagtaggaaatgttcatctgttacatggaaaaaatgttgatggtgcattgtaaaattaaaaaacacaacttgcagaaccaaatatatggc

SEQ ID NO: 192048 - DNA, 1166 bp, Homo sapiens
  Payload ID: 17944
  Gene Name: transcription elongation factor A (SII)-like 4
  ENST ID: ENST00000613326
  CDS Start-End: 204-764
acgggcgcagatgtaggcaccggtccgagtgcctgccctctgtccccgcggctgggtctcgtctgctccggttcctgggctcctaattcttggtccagcttcttccaggtctgcgcgtctgttgttcccagcgctctgcgaagcctgaaaaggaggagcaacctgtccagaatccccgcaggaaaaggaggggaaatctcgacatggaaaaactctacagtgaaaatgaaggaatggcttcaaaccaaggaaagatggaaaatgaagaacagccacaagacgagagaaagccagaagtaacttgtactctggaagacaagaagttagaaaacgagggaaagacagaaaacaagggcaaaacaggagatgaggaaatgttaaaggataaaggaaaaccagagatagagggaaagccagagagtgaaggagagccagggagtgaaacaagggctgcaggaaagcgcccagctgaggatgatgtacccaggaaagccaaaagaaaaactaataaggggctggctcattacctcaaggagtataaagaggccatacatgatatgaatttcagcaatgaggacatgataagagaatttgacaatatggctaaggtgcaggatgagaagagaaaaagcaaacagaaattgggggcgtttttgtggatgcaaagaaatttacaggaccccttctaccctagaggtccaagggaattcaggggtggctgcagggccccacgaagggacattgaagacattccttatgtgtagtgtccctggcaggcatttaccaggccatgtgctttaacgttacggtaatactttactttaggcatccctcctgttgctagcagccttttgacctatctgcaatgcagtgttctcagtaggaaatgttcatctgttacatggaaaaaatgttgatggtgcattgtaaaattaaaaaacacaacttgcagaaccaaatatatggcatcagtacatttttgtaaaactacaaagatacttacctagtaatatagtatagaaaacaattctgaaagctgtgtccactaaaagattaacagtggttatctctgggtgattttttctgttcttttttgttcatctgtccatttttctcctaaaaacagatttctttagtcataaaaataataaaatataaagtattgg

SEQ ID NO: 192049 - DNA, 1168 bp, Homo sapiens
  Payload ID: 17945
  Gene Name: transcription elongation factor A (SII)-like 5
  Uniprot ID: Q5H9L2
  ENST ID: ENST00000372680
  CDS Start-End: 296-916
agtgggctggctcctgacgcactttctgcgggtgggaggggaactagggacccgagcccactggtgacgtttttctcacgtgatctgaagccgacgtgtgcagaagtccctctcctccaggtaccagatccctgtttccgtggaggaaggcagacttcagactgaaggacagagaaggcaactgccctacagccctgcaggtcttcaagtctgtggttgtgggcactaacccagacaagaaaaggaaagacctgcagtatcggtgcaggaaaggcaaagaagggaacatctcaacatggaaaagctctacaaagaaaatgaaggaaagccagagaatgaaagaaacctagaaagtgagggaaagccagaggatgagggaagtacagaagatgaaggaaagtcagacgaggaagaaaagccggacatggaggggaagacagaatgcgagggaaagcgagaggatgagggagagccaggtgatgagggacaactggaagatgagggaaaccaggaaaagcagggcaagtctgaaggtgaggacaagccacaaagtgagggcaagccagcctcccaggccaagccagagagccagccgcgggccgccgaaaagcgcccggctgaagattatgtgccccggaaagcaaaaagaaaaaccgacagggggacggacgattcccccaaggactctcaggaggacttacaagaaaggcatctgagcagtgaggagatgatgagagaatgtggagatgtgtcaagggctcaggaggagctaaggaaaaaacagaaaatgggtggttttcattggatgcaaagagatgtacaggatccattcgccccaaggggccaacggggtgtgaggggagtgaggggcggaggtaggggccagaaagacttagaagatgtcccatatgtttaatgtctttggcctttaattctgatttctctgatgggaatattgccagtcctgcttttcctggcaggcatttgccggcctatgtgctttaaccttaagctgatactttcctttaggtgtcactcttgttaccagcagacttttgacccaactacagtgctctgtcttttagtagaggattttcacccatgtgcatggaataaatgttcatggtacattgtaaaataacaataaaaaagagttttcagaaccatg

SEQ ID NO: 192050 - DNA, 983 bp, Homo sapiens
  Payload ID: 17946
  Gene Name: transcription elongation factor A (SII)-like 6
  Uniprot ID: Q6IPX3
  ENST ID: ENST00000372773
  CDS Start-End: 362-913
gggagagacaacttgaggactgaggagagaggaggcccaggacagaaccccaggaacaccgccactcaaggtggcagctcagcttcctggcaggcaccactaccccccgggctctggagtcaggcagagccggtattgaaagtgggctgtggagttctggggctaagcgctcttggcaaagtcgggtaccctctctgatcagctgtcacacctggcgataatgggcatcagagagagatgccttgcgaggatgctgtgagctgcgtcaggtctgcgcgtctgttgttcccagcgctcttggaggcctgcaaaggaagagcaacctgtccagactccccgcaggaaaaagagaaatctcgacatggaaaaaccctacaataaaaatgaaggaaacctggaaaacgagggaaagccagaagatgaagtagagcctgatgatgaaggaaagtcagacgaggaagaaaagccagacgcggaggggaagacagaatgcgagggaaagcgaaaggctgagggagagccaggtgatgagggacaactggaagataagggaagccaggaaaagcagggcaagtccgaaggtgagggcaagccacaaggcgagggcaagccagcctcccaggcaaagccagagggccagccgcgggccgccgaaaagcgcccggctggagattatgtgccccggaaagcaaaaagaaaaacagacagggggacggacgattcccccaaggactctcaggaggacttacaggaaaggcatctgagcagtgaggagatgatgagagaatgtggagatgtgtcaagggctcaggaggagctaaggaaaaaacagaaaatgggtggttttcattggatgcaaagagatgtacaggatccattcgcccaaggggacaacggggtgtcaggggagtgaggggtggaggtaggggccaaagaggcttacacgatatcccatacctttaatgcctttggccttccattct

SEQ ID NO: 192051 - DNA, 1106 bp, Homo sapiens
  Payload ID: 17946
  Gene Name: transcription elongation factor A (SII)-like 6
  Uniprot ID: Q6IPX3
  ENST ID: ENST00000372774
  CDS Start-End: 251-802
gtgggcaccagcccccgcgcccgcccgcccgcccagcggtccggtccaggcgcccgcgcagaatcagctgtctgagctgcccaggcggcgggggagcagcgagcgggcttcagcgagccgcaggaggcacaggcctgtcctgggtccccgcaggtctgcgcgtctgttgttcccagcgctcttggaggcctgcaaaggaagagcaacctgtccagactccccgcaggacaggaaaaagagaaatctcgacatggaaaaaccctacaataaaaatgaaggaaacctggaaaacgagggaaagccagaagatgaagtagagcctgatgatgaaggaaagtcagacgaggaagaaaagccagacgcggaggggaagacagaatgcgagggaaagcgaaaggctgagggagagccaggtgatgagggacaactggaagataagggaagccaggaaaagcagggcaagtccgaaggtgagggcaagccacaaggcgagggcaagccagcctcccaggcaaagccagagggccagccgcgggccgccgaaaagcgcccggctggagattatgtgccccggaaagcaaaaagaaaaacagacagggggacggacgattcccccaaggactctcaggaggacttacaggaaaggcatctgagcagtgaggagatgatgagagaatgtggagatgtgtcaagggctcaggaggagctaaggaaaaaacagaaaatgggtggttttcattggatgcaaagagatgtacaggatccattcgcccaaggggacaacggggtgtcaggggagtgaggggtggaggtaggggccaaagaggcttacacgatatcccatacctttaatgcctttggccttccattctgacttctctgatgagattattgtcaaccctgctttccctggtagatatttgccaggcccaatgctttaaccttaagctgatatttttgctttagatgtcaatctcgttaccagcagccttttgacccaactacagcgctctatattttagtagaggattttcacccatgtgcatggaaaagatgttcatgacacattgtaaaaaataaataaataaagaacagtttgcagaacc

SEQ ID NO: 192052 - DNA, 992 bp, Homo sapiens
  Payload ID: 17946
  Gene Name: transcription elongation factor A (SII)-like 6
  ENST ID: ENST00000622517
  CDS Start-End: 145-744
gcttcagcgagccgcaggaggcacaggcctgtcctgggtccccgcaggtctgcgcgtctgttgttcccagcgctcttggaggcctgcaaaggaagagcaacctgtccagactccccgcaggacaggaaaaagagaaatctcgacatggaaaaaccctacaataaaaatgaaggaaacctggaaaacgagggaaagccagaagatgaagtagagcctgatgatgaaggaaagtcagacgaggaagaaaagccagacgcggaggggaagacagaatgcgagggaaagcgaaaggctgagggagagccaggtgatgagggacaactggaagataagggaagccaggaaaagcagggcaagtccgaaggtgagggcaagccacaaggcgagggcaagccagcctcccaggcaaagccagagggccagccgcgggccgccgaaaagcgcccggctggagattatgtgccccggaaagcaaaaagaaaaacagacagggggacggacgattcccccaaggactctcaggaggacttacaggaaaggcatctgagcagtgaggagatgatgagagaatgtggagatgtgtcaagggctcaggaggagctaaggaaaaaacagaaaatgggtggttttcattggatgcaaagagatgtacaggatccattcgcccaagggcaacggggtgtcaggggagtgaggggtggaggtaggggccaaagaggcttacacgatatcccatacctttaatgcctttggccttccattctgacttctctgatgagattattgtcaaccctgctttccctggtagatatttgccaggcccaatgctttaaccttaagctgatatttttgctttagatgtcaatctcgttaccagcagccttttgacccaactacagcgctctatattttagtagaggattttcacccatgtgcatggaaaagatgttcatgacacattgtaaaaaataaataaataaagaacagtttgc

SEQ ID NO: 192053 - DNA, 1177 bp, Homo sapiens
  Payload ID: 17947
  Gene Name: transcription elongation factor A (SII)-like 7
  Uniprot ID: Q9BRU2
  ENST ID: ENST00000332431
  CDS Start-End: 255-557
gtgaaccgaagtccttatattcccgggcttctttctcctctgggtaccagctccttactgccctgcagacaagcgtgccgtgcgtgcttgtggccaagggaaggaagagctggttgatccacagatagctccttcctccccgccccttcctttttgtttggaggtcccaggatctgtgttcacagacatctgggggaagaaaaggagcaggaaactaccccgcacagagttaagcaggaaacaacaacaacatcatgcaaaaaccctgcaaagaaaacgaaggaaagccaaagtgcagcgtgccaaagagggaggaaaaacgcccgtatggagaatttgaacgccagcaaacagaagggaattttagacagaggctgcttcagtctctcgaagaatttaaagaggacatagactataggcattttaaagatgaagaaatgacaagggagggagatgagatggaaaggtgtttggaagagataaggggtctgagaaagaaatttagggctctgcattctaaccataggcattctcgggaccgtccttatcccatttaattaatttctctgacaattcaattattttctgttattaatgttgccactgctttctgtttgtctgcactttcttgataaatatttgctatcgttttactccagtcattcgatgttgctgagatttacatatgactcttgtcaacatctcatcttttgacccaatcttattcatttaataagaggtctcattcatttgcatggaaaaatgctcattgtatattgcaaagtgaaaataacgagttgcaaaacagtgtatacatatatgtgtgtatatatgtacactttatttgtacatttctatgtgacataatgcaaaggaaagtgtctgattttattatacaccaaaggttaacagtgaatctctgtgtgatctctttttttttctttttgcctatctgcatcttctcacttgccaaaaaatgaatatatgtttatgtgtgtatattacttgtgtcacaaaaaaccctaaagtagacagtaaaagaacttgtcaatcgcctttggaaggcaatgaaacacttaataaactctcaataacagaagcgtaaaaatgaaatgtaaacctccaattacctctggatctcttagccagagtaataaactggtaattattacagata

SEQ ID NO: 192054 - DNA, 852 bp, Homo sapiens
  Payload ID: 17947
  Gene Name: transcription elongation factor A (SII)-like 7
  Uniprot ID: Q9BRU2
  ENST ID: ENST00000372666
  CDS Start-End: 168-470
tctcctctgggtaccagctccttactgccctgcagacaagcgtgccgtgcgtgcttgtggccaagggaaggaagaggtcccaggatctgtgttcacagacatctgggggaagaaaaggagcaggaaactaccccgcacagagttaagcaggaaacaacaacaacatcatgcaaaaaccctgcaaagaaaacgaaggaaagccaaagtgcagcgtgccaaagagggaggaaaaacgcccgtatggagaatttgaacgccagcaaacagaagggaattttagacagaggctgcttcagtctctcgaagaatttaaagaggacatagactataggcattttaaagatgaagaaatgacaagggagggagatgagatggaaaggtgtttggaagagataaggggtctgagaaagaaatttagggctctgcattctaaccataggcattctcgggaccgtccttatcccatttaattaatttctctgacaattcaattattttctgttattaatgttgccactgctttctgtttgtctgcactttcttgataaatatttgctatcgttttactccagtcattcgatgttgctgagatttacatatgactcttgtcaacatctcatcttttgacccaatcttattcatttaataagaggtctcattcatttgcatggaaaaatgctcattgtatattgcaaagtgaaaataacgagttgcaaaacagtgtatacatatatgtgtgtatatatgtacactttatttgtacatttctatgtgacataatgcaaaggaaagtgtctgattttattatacaccaaaggttaacagtgaatctctgtgtgatctctttttttt

SEQ ID NO: 192055 - DNA, 1131 bp, Homo sapiens
  Payload ID: 17948
  Gene Name: transcription elongation factor A (SII)-like 8
  Uniprot ID: Q8IYN2
  ENST ID: ENST00000360000
  CDS Start-End: 147-500
acgtgaccaggagtcgacgtgtgcagaagtccttatagtccagggcctgtttccctgtagcagctccttattgctggagaaggagaaaagtgcccaagatcctttcaggattaatttattcaaaaaggaaataaaaaatactcaatatgcaaaagtcttgtgaagaaaatgagggaaaaccacagaacatgccaaaggccgaggaagatcgccctttggaggatgtaccacaggaggcagaaggaaatcctcaaccttccgaagaaggcgtaagccaggaagcagaaggaaaccccagaggagggccgaatcagcctggccagggatttaaagaggacacacccgttaggcatttggaccctgaagaaatgataagaggagtagatgagcttgaaaggcttagggaagagataagaagagtaagaaacaagtttgtgatgatgcattggaagcaaagacattcacgcagccgtccttatcctgtgtgctttaggccttgaattcatttttgcctaatattaaaatctggccccagctttctttctgttagcattttctgatgtatctttgacctccattttacttttaatcatctgatgaaattttgttttaggtaatttccttggtaccagcatctcattggattttggattttgacccattttccaggtctatttttcaattggaaactttcacacatttgcatgggaatatgttcattccatgttgtaaagtaaaacataacaggttatggcaaagcagcatatttaatatcagctcacatatgtaggataaaattccaaactttgtgtgtgtgcgtgtgtgtatacatacatccatataacatatatcacaaacttaaccaagcttatttctgtgtggtgtgaaattttatttgttttcttctttttgttctttttgcttatatgtactttttaatgaacacgtgtctcacacacaaaaagaattaaggattttttttacaagtaagagtcaaataatttgcaaccagcttatgagggcaatgggggcacctaaactcttgatgaaagaactttaaaaagaaatgtaaacctcaaattacctctggatctcttagccagaggaataaactggcaattattacagata

SEQ ID NO: 192056 - DNA, 1222 bp, Homo sapiens
  Payload ID: 17948
  Gene Name: transcription elongation factor A (SII)-like 8
  Uniprot ID: Q8IYN2
  ENST ID: ENST00000372685
  CDS Start-End: 238-591
agtgatgacgcgactctcacgtgaccaggagtcgacgtgtgcagaagtccttatagtccagggcctgtttccctgtagcagctccttattgctggagaaggagaaaagtgcccaagatcctttcaggatatttggttttttgggcgcgacacaaatcgaggtgagggaagagagaggaaaatcccctgaatccctgcaggattaatttattcaaaaaggaaataaaaaatactcaatatgcaaaagtcttgtgaagaaaatgagggaaaaccacagaacatgccaaaggccgaggaagatcgccctttggaggatgtaccacaggaggcagaaggaaatcctcaaccttccgaagaaggcgtaagccaggaagcagaaggaaaccccagaggagggccgaatcagcctggccagggatttaaagaggacacacccgttaggcatttggaccctgaagaaatgataagaggagtagatgagcttgaaaggcttagggaagagataagaagagtaagaaacaagtttgtgatgatgcattggaagcaaagacattcacgcagccgtccttatcctgtgtgctttaggccttgaattcatttttgcctaatattaaaatctggccccagctttctttctgttagcattttctgatgtatctttgacctccattttacttttaatcatctgatgaaattttgttttaggtaatttccttggtaccagcatctcattggattttggattttgacccattttccaggtctatttttcaattggaaactttcacacatttgcatgggaatatgttcattccatgttgtaaagtaaaacataacaggttatggcaaagcagcatatttaatatcagctcacatatgtaggataaaattccaaactttgtgtgtgtgcgtgtgtgtatacatacatccatataacatatatcacaaacttaaccaagcttatttctgtgtggtgtgaaattttatttgttttcttctttttgttctttttgcttatatgtactttttaatgaacacgtgtctcacacacaaaaagaattaaggattttttttacaagtaagagtcaaataatttgcaaccagcttatgagggcaatgggggcacctaaactcttgatgaaagaactttaaaaagaaatgtaaacctcaaattacctctggatctcttagccagaggaataaactggcaattattacagata

SEQ ID NO: 192057 - DNA, 449 bp, Homo sapiens
  Payload ID: 17948
  Gene Name: transcription elongation factor A (SII)-like 8
  ENST ID: ENST00000451678
  CDS Start-End: 227-449
gactctcacgtgaccaggagtcgacgtgtgcagaagtccttatagtccagggcctgtttccctgtagcagctccttattgctggagaaggagaaaagtgcccaagatcctttcaggatatttggttttttgggcgcgacacaaatcgaggtgagggaagagagaggaaaatcccctgaatccctgcaggattaatttattcaaaaaggaaataaaaaatactcaatatgcaaaagtcttgtgaagaaaatgagggaaaaccacagaacatgccaaaggccgaggaagatcgccctttggaggatgtaccacaggaggacacacccgttaggcatttggaccctgaagaaatgataagaggagtagatgagcttgaaaggcttagggaagagataagaagagtaagaaacaagtttgtgatgatgcattggaagcaaagacattcacgca

SEQ ID NO: 192058 - DNA, 683 bp, Homo sapiens
  Payload ID: 17949
  Gene Name: transcription elongation factor B (SIII), polypeptide 1 (15kDa, elongin C)
  Uniprot ID: Q15369
  ENST ID: ENST00000284811
  CDS Start-End: 116-454
acccggctgcggtggctgcgggactgacgagtgagtctcgggctggggcggaaacggagctccgggaaactactaaagttcctggggaagcaaagtagaatttcataagaacaaaatggatggagaggagaaaacctatggtggctgtgaaggacctgatgccatgtatgtcaaattgatatcatctgatggccatgaatttattgtaaaaagagaacatgcattaacatcaggcacgataaaagccatgttgagtggcccaggtcagtttgctgagaacgaaaccaatgaggtcaattttagagagataccttcacatgtgctatcgaaagtatgcatgtattttacgtacaaggttcgctacactaacagctccaccgagattcctgaattcccaattgcacctgaaattgcactggaactgctgatggctgcgaacttcttagattgttaaataaaataaattataataaactgttaactcttttcagtatttaatacctgtagttcagttagtaactttttcatatatagcatgttgcctgtatgcagttgaactatataaagttcattgcaaagcagattatcttgtttttttgcatagcaatcaaagttgaaatttgtttgctacatcaacaaattaaggacattttcacaaactgagaaataaacaaatatgccaa

SEQ ID NO: 192059 - DNA, 719 bp, Homo sapiens
  Payload ID: 17949
  Gene Name: transcription elongation factor B (SIII), polypeptide 1 (15kDa, elongin C)
  Uniprot ID: Q15369
  ENST ID: ENST00000523815
  CDS Start-End: 285-623
gggagaagagggcggcgggacctttcctggcgccgctcgcagtttacatgtggatttattcattctggagatacaatggcaaggaaacagctgtgagtcttgctgtgtggcccaggctggagtgcccggctggtctcaaattcctgacctcaagtgatctccctcccaaagtgttgcgattgcaggtgtgagccactgcacctggctgctgagaaatctttgcctacagtgagggaaactactaaagttcctggggaagcaaagtagaatttcataagaacaaaatggatggagaggagaaaacctatggtggctgtgaaggacctgatgccatgtatgtcaaattgatatcatctgatggccatgaatttattgtaaaaagagaacatgcattaacatcaggcacgataaaagccatgttgagtggcccaggtcagtttgctgagaacgaaaccaatgaggtcaattttagagagataccttcacatgtgctatcgaaagtatgcatgtattttacgtacaaggttcgctacactaacagctccaccgagattcctgaattcccaattgcacctgaaattgcactggaactgctgatggctgcgaacttcttagattgttaaataaaataaattataataaactgttaactcttttcagtatttaatacctgtagttcagttagtaactttttcatatatagcatgttgcctgtatgc

SEQ ID NO: 192060 - DNA, 1573 bp, Homo sapiens
  Payload ID: 17949
  Gene Name: transcription elongation factor B (SIII), polypeptide 1 (15kDa, elongin C)
  Uniprot ID: Q15369
  ENST ID: ENST00000520242
  CDS Start-End: 222-560
caggtacggatctcccgcgcgtcgccgaaagcggctctgacccagcggaagtaattctttcgactgccccggaacccaccggagcaggcagctgggggtgggggggcggccctgggataggggctgtggcagtacgcggggacccggctgcggtggctgcgggactgacgagaaactactaaagttcctggggaagcaaagtagaatttcataagaacaaaatggatggagaggagaaaacctatggtggctgtgaaggacctgatgccatgtatgtcaaattgatatcatctgatggccatgaatttattgtaaaaagagaacatgcattaacatcaggcacgataaaagccatgttgagtggcccaggtcagtttgctgagaacgaaaccaatgaggtcaattttagagagataccttcacatgtgctatcgaaagtatgcatgtattttacgtacaaggttcgctacactaacagctccaccgagattcctgaattcccaattgcacctgaaattgcactggaactgctgatggctgcgaacttcttagattgttaaataaaataaattataataaactgttaactcttttcagtatttaatacctgtagttcagttagtaactttttcatatatagcatgttgcctgtatgcagttgaactatataaagttcattgcaaagcagattatcttgtttttttgcatagcaatcaaagttgaaatttgtttgctacatcaacaaattaaggacattttcacaaactgagaaataaacaaatatgccaattcgtaggtggttttgccttatcctttgaatgtgacttaaaatcagcaatgatgatatagtaaatactgaaatttaggtgtaaatcaatacgttctacagggaaataatgaggctaagtatttttatgtttttagtggttttttagaaacctaatcttatagccgccattagcattactagagttatgcaaataattgcattataaacatgtttataacttagccaaaacattgatttttataactctccaagtatgagttgaaatttcttatgtcttttgataaactgcagtattctttaagtgtactttgtccttttgtttattgctacaatttaagaactttatttaaaaacaattttggaaggttactaggtacagcttttgcagaagaaactgaactgtagccagatggtcagcaagtaaactacatgacttagagttcttgtgcattatacattttgggtaattcaaagtactgtatttgcattgactataaagcgtcgtttgcaatatttattcttccttcatagtcccttgttgtgattatacttccagttgtttaaatgtattttaaaagactcactattaactttattcagatcttaaaagctacacctttttgaactattccagtctttctccatccaattagaatgttatggaataacatgtgaagagatacagtgaaaatcatattataatgcattgaagatatcctacatgaattatcttctattaaaatatgtcccaataaatatacccataatcagtgggtcttctac

SEQ ID NO: 192061 - DNA, 1943 bp, Homo sapiens
  Payload ID: 17949
  Gene Name: transcription elongation factor B (SIII), polypeptide 1 (15kDa, elongin C)
  Uniprot ID: Q15369
  ENST ID: ENST00000518127
  CDS Start-End: 94-432
cagacggaagtgagcgacacactctgcgtcctcgcctcaccaggaaactactaaagttcctggggaagcaaagtagaatttcataagaacaaaatggatggagaggagaaaacctatggtggctgtgaaggacctgatgccatgtatgtcaaattgatatcatctgatggccatgaatttattgtaaaaagagaacatgcattaacatcaggcacgataaaagccatgttgagtggcccaggtcagtttgctgagaacgaaaccaatgaggtcaattttagagagataccttcacatgtgctatcgaaagtatgcatgtattttacgtacaaggttcgctacactaacagctccaccgagattcctgaattcccaattgcacctgaaattgcactggaactgctgatggctgcgaacttcttagattgttaaataaaataaattataataaactgttaactcttttcagtatttaatacctgtagttcagttagtaactttttcatatatagcatgttgcctgtatgcagttgaactatataaagttcattgcaaagcagattatcttgtttttttgcatagcaatcaaagttgaaatttgtttgctacatcaacaaattaaggacattttcacaaactgagaaataaacaaatatgccaattcgtaggtggttttgccttatcctttgaatgtgacttaaaatcagcaatgatgatatagtaaatactgaaatttaggtgtaaatcaatacgttctacagggaaataatgaggctaagtatttttatgtttttagtggttttttagaaacctaatcttatagccgccattagcattactagagttatgcaaataattgcattataaacatgtttataacttagccaaaacattgatttttataactctccaagtatgagttgaaatttcttatgtcttttgataaactgcagtattctttaagtgtactttgtccttttgtttattgctacaatttaagaactttatttaaaaacaattttggaaggttactaggtacagcttttgcagaagaaactgaactgtagccagatggtcagcaagtaaactacatgacttagagttcttgtgcattatacattttgggtaattcaaagtactgtatttgcattgactataaagcgtcgtttgcaatatttattcttccttcatagtcccttgttgtgattatacttccagttgtttaaatgtattttaaaagactcactattaactttattcagatcttaaaagctacacctttttgaactattccagtctttctccatccaattagaatgttatggaataacatgtgaagagatacagtgaaaatcatattataatgcattgaagatatcctacatgaattatcttctattaaaatatgtcccaataaatatacccataatcagtgggtcttctactgaaatcaagctcattcagcttttctattaagcagccaaaaaattttttgaaaaaatatgacagcatcattccttatgcatggggaaagaagcactggagatgggtttagtattgtctttatctcagaggtggaacaaagttgtcattatagggtctataaacttaagtctccagcttatttgagactggcttaatatggctgagcccggtggctcatgcctgtaatcccagcactttcagaggacgaggcgggtagatcacttgaggccaggagtttgagaccagcctggccaccatggcaaaaccccatctctaccaaaaatgcaaaaattagctaggccatggtggcacacgcctgtaatcccagctacttgtgaggctgaggcatgagaatcgcttgaacctgggaggtggaggtggcagtgagccgagatcgcaccactgcactccagcctgggtgacagagcgagactgtctcaaaaaaaaaaaaaaaaaaa

SEQ ID NO: 192062 - DNA, 814 bp, Homo sapiens
  Payload ID: 17949
  Gene Name: transcription elongation factor B (SIII), polypeptide 1 (15kDa, elongin C)
  Uniprot ID: Q15369
  ENST ID: ENST00000519487
  CDS Start-End: 110-448
tagcagtttacatgtggatttattcattctggagatacaatggcaaggaaacagctgtggaaactactaaagttcctggggaagcaaagtagaatttcataagaacaaaatggatggagaggagaaaacctatggtggctgtgaaggacctgatgccatgtatgtcaaattgatatcatctgatggccatgaatttattgtaaaaagagaacatgcattaacatcaggcacgataaaagccatgttgagtggcccaggtcagtttgctgagaacgaaaccaatgaggtcaattttagagagataccttcacatgtgctatcgaaagtatgcatgtattttacgtacaaggttcgctacactaacagctccaccgagattcctgaattcccaattgcacctgaaattgcactggaactgctgatggctgcgaacttcttagattgttaaataaaataaattataataaactgttaactcttttcagtatttaatacctgtagttcagttagtaactttttcatatatagcatgttgcctgtatgcagttgaactatataaagttcattgcaaagcagattatcttgtttttttgcatagcaatcaaagttgaaatttgtttgctacatcaacaaattaaggacattttcacaaactgagaaataaacaaatatgccaattcgtaggtggttttgccttatcctttgaatgtgacttaaaatcagcaatgatgatatagtaaatactgaaatttaggtgtaaatcaatacgttctacagggaaataatgaggctaagtatttttatgtttttagtg

SEQ ID NO: 192063 - DNA, 634 bp, Homo sapiens
  Payload ID: 17949
  Gene Name: transcription elongation factor B (SIII), polypeptide 1 (15kDa, elongin C)
  ENST ID: ENST00000519082
  CDS Start-End: 366-634
ctcaccaggtacggatctcccgcgcgtcgccgaaagcggctctgacccagcggaagtaattctttcgactgccccggaacccaccggagcaggcagctgggggtgggggggcggccctgggataggggctgtggcagtacgcggggacccggctgcggtggctgcgggactgacgaagtcttgctgtgtggcccaggctggagtgcccggctggtctcaaattcctgacctcaagtgatctccctcccaaagtgttgcgattgcaggtgtgagccactgcacctggctgctgagaaatctttgcctacagtgagggaaactactaaagttcctggggaagcaaagtagaatttcataagaacaaaatggatggagaggagaaaacctatggtggctgtgaaggacctgatgccatgtatgtcaaattgatatcatctgatggccatgaatttattgtaaaaagagaacatgcattaacatcaggcacgataaaagccatgttgagtggcccaggtcagtttgctgagaacgaaaccaatgaggtcaattttagagagataccttcacatgtgctatcgaaagtatgcatgtattttacgtacaaggttcgctacactaacagctccaccgagat

SEQ ID NO: 192064 - DNA, 816 bp, Homo sapiens
  Payload ID: 17949
  Gene Name: transcription elongation factor B (SIII), polypeptide 1 (15kDa, elongin C)
  Uniprot ID: Q15369
  ENST ID: ENST00000522337
  CDS Start-End: 321-659
cgcgcgtcgccgaaagcggctctgacccagcggaagtaattctttcgactgccccggaacccaccggagcaggcagctgggggtgggggggcggccctgggataggggctgtggcagtacgcggggacccggctgcggtggctgcgggactgacgagatcatcagggaaggaagacctctctgaggagttgatgttttacctggagacctaaatgatgaggatttaaaagcttttcggacaacagcaattacaaatgcaaagaccttgaggaaactactaaagttcctggggaagcaaagtagaatttcataagaacaaaatggatggagaggagaaaacctatggtggctgtgaaggacctgatgccatgtatgtcaaattgatatcatctgatggccatgaatttattgtaaaaagagaacatgcattaacatcaggcacgataaaagccatgttgagtggcccaggtcagtttgctgagaacgaaaccaatgaggtcaattttagagagataccttcacatgtgctatcgaaagtatgcatgtattttacgtacaaggttcgctacactaacagctccaccgagattcctgaattcccaattgcacctgaaattgcactggaactgctgatggctgcgaacttcttagattgttaaataaaataaattataataaactgttaactcttttcagtatttaatacctgtagttcagttagtaactttttcatatatagcatgttgcctgtatgcagttgaactatataaagttcattgcaaagcagattatcttgtttttttgcatagcaatcaa

SEQ ID NO: 192065 - DNA, 1451 bp, Homo sapiens
  Payload ID: 17949
  Gene Name: transcription elongation factor B (SIII), polypeptide 1 (15kDa, elongin C)
  Uniprot ID: Q15369
  ENST ID: ENST00000520210
  CDS Start-End: 139-429
accggagcaggcagctgggggtgggggggcggccctgggataggggctgtggcagtacgcggggacccggctgcggtggctgcgggactgacgaatggagaggagaaaacctatggtggctgtgaaggacctgatgccatgtatgtcaaattgatatcatctgatggccatgaatttattgtaaaaagagaacatgcattaacatcaggcacgataaaagccatgttgagtggcccaggtcagtttgctgagaacgaaaccaatgaggtcaattttagagagataccttcacatgtgctatcgaaagtatgcatgtattttacgtacaaggttcgctacactaacagctccaccgagattcctgaattcccaattgcacctgaaattgcactggaactgctgatggctgcgaacttcttagattgttaaataaaataaattataataaactgttaactcttttcagtatttaatacctgtagttcagttagtaactttttcatatatagcatgttgcctgtatgcagttgaactatataaagttcattgcaaagcagattatcttgtttttttgcatagcaatcaaagttgaaatttgtttgctacatcaacaaattaaggacattttcacaaactgagaaataaacaaatatgccaattcgtaggtggttttgccttatcctttgaatgtgacttaaaatcagcaatgatgatatagtaaatactgaaatttaggtgtaaatcaatacgttctacagggaaataatgaggctaagtatttttatgtttttagtggttttttagaaacctaatcttatagccgccattagcattactagagttatgcaaataattgcattataaacatgtttataacttagccaaaacattgatttttataactctccaagtatgagttgaaatttcttatgtcttttgataaactgcagtattctttaagtgtactttgtccttttgtttattgctacaatttaagaactttatttaaaaacaattttggaaggttactaggtacagcttttgcagaagaaactgaactgtagccagatggtcagcaagtaaactacatgacttagagttcttgtgcattatacattttgggtaattcaaagtactgtatttgcattgactataaagcgtcgtttgcaatatttattcttccttcatagtcccttgttgtgattatacttccagttgtttaaatgtattttaaaagactcactattaactttattcagatcttaaaagctacacctttttgaactattccagtctttctccatccaattagaatgttatggaataacatgtgaagagatacagtgaaaatcatattataatgcattgaagatatcctacatgaattatcttctattaaaatatgtcccaataaatatacccataatcagtgggtcttctactgaaatcaa

SEQ ID NO: 192066 - DNA, 2780 bp, Homo sapiens
  Payload ID: 17949
  Gene Name: transcription elongation factor B (SIII), polypeptide 1 (15kDa, elongin C)
  ENST ID: ENST00000602840
  CDS Start-End: 196-393
gactgccccggaacccaccggagcaggcagctgggggtgggggggcggccctgggataggggctgtggcagtacgcggggacccggctgcggtggctgcgggactgacgagtgagtctcgggctggggcggaaacggagctccgggaaactactaaagttcctggggaagcaaagtagaatttcataagaacaaaatggatggagaggagaaaacctatggtggctgtgaaggacctgatgccatgtatgtcaaattgatatcatctgatggccatgaatttattgtaaaaagagaacatgcattaacatcaggcacgataaaagccatgttgagtggcccagacatggtctccactatgttgcccaggctgaagtgcagtggctgttcataggcacaatcatagcacactgcagccttccactcatggcctcaagcagtcatcctgcctcagcctctcatagctgggactaaaggcacacaaaactgcacccagctggggaaattttaaagttgctttgagatagatctcatggtcttaatcatcaaattattctataaattttgtatttttgtgtgatggtactctcgtataggacagacacaggtacatcagaatttgattttttcctctctgtattagtccattttctgctcataaaggcatacccgagaccgggcaatttacaaaagaaaggtttaatcgacttacagttccatgtggctggggaggcctcacaatcatggtggaaggtgaaaggcacaaagagaagagagcttgtacagagaaattccccatttttaaaaccatcagatctgagacttactcactatcacaaggacagcacaggaaagacctgcccccgtgattcaattacctcctgctgagtccctcccacaacacgtgggaattcaagatttgggtggggacacagccaaaccatatcatgccattcctggcccctcccaaatctcatgtcctcacatttcaaaaccactcatgggccaggtgtggtggctcatgcctgtaatcccagtgctttgggaggctaagctgggaggatcacttgaggtcaggagtttgagaccaacctggccaacatggcaaaaccccgtttttactaaaaataccaaaattagccagatgtggtggcagacatctgtgatcccagccactagggaggctaagacaggagaactgcttgaacccaggaggcggaggttgcagtgaactgagattgtaccactgcactccagcctggtcgacagagaagacactgtctcaaaaaaaaaaacaacgaaaaagaatcatgccttcccaacagtccccctatgtcttaactcatttttcagcattcagaaatccacagtccaaagtctcatctgagacaaggcaagtcccttccacctatgagcctgtaaaatcaagagcaagttagttacttcctagatacaatgggggaatgggcattgggtaaatacagccattccaaatgggagaaattggccaaaacaaaggggctacaggccccatgcaagtcagaaatccagtggggtagtcaaagttccaaaatgatctcctttgactccatgtctcacatccacatcatgttgatgcaagaggtgagttcacgtgggcagctccacacctgtggctttgcagggtacagcctgccttctggctgctttcatgggctggtgttgagtgtctgcaacttttccaggcacacggtgtaagctgtcaagtggatctaccattctggggtctggaggatggccttctcagagctactctaggagtgccccagtagtgactccgtgtgagggctctgaccccacatttttcttttttcttttttttcttttctttcttttttttttttttttgagacagtttcactctccaggttggagtgcagtggtgcaatctcagctcactgcaacctccacttcctgggttcaagcaattctgcctcagcctcccaagtagctgggattacaggcatgtgccaccatgcctggctaatgtttttgtatttttagtagagatgggatttcaccacgttggccaggctggtctcgaactcctgacctcaggtgatccttctcggccttccaaagtgctgggattacaggagggagccaccatgcctgactcttacttcacatttttcttccacactgccctatcagagggtccccatgagagccctgccctgcagcaaacttctgcctggacatccaggcatttcgatatatcttctgaaatctaggcagaggttcccaaacctcaattcttgacatctgtgcactgacaggctcaacaccatttgaaagctgccaaggattgaggcttgcaccctctgaagccacggcccaaactctatgttggcccctttcagccatggctggagtggctaggatgcatggcaccaagtgcctaggcttcacacagcatggggaccctgagcccagtccccaaaaccacttttttgtgacagagtcactctgttgcccaggctggagtgcagtggcacgatctcggctcactgcaatctctgcctcccagattcaaacaattctcctgcctcagcctcctgagtagctgggatgacgggcacatgccgtgctgacatgcctagctaatttttgtattttttgtagagatgggattttgctatgttggccaggctggtttcaaactcctgacctcaagtgatccgcccaccttggcctcccaaagtgctgagattaccggcatgagccactgtgcccaccctg

SEQ ID NO: 192067 - DNA, 1976 bp, Homo sapiens
  Payload ID: 17949
  Gene Name: transcription elongation factor B (SIII), polypeptide 1 (15kDa, elongin C)
  Uniprot ID: Q15369
  ENST ID: ENST00000622804
  CDS Start-End: 146-484
gggagaagagggcggcgggacctttcctggcgccgctcgcagtttacatgtggatttattcattctggagatacaatggcaaggaaacagctgtggaaactactaaagttcctggggaagcaaagtagaatttcataagaacaaaatggatggagaggagaaaacctatggtggctgtgaaggacctgatgccatgtatgtcaaattgatatcatctgatggccatgaatttattgtaaaaagagaacatgcattaacatcaggcacgataaaagccatgttgagtggcccaggtcagtttgctgagaacgaaaccaatgaggtcaattttagagagataccttcacatgtgctatcgaaagtatgcatgtattttacgtacaaggttcgctacactaacagctccaccgagattcctgaattcccaattgcacctgaaattgcactggaactgctgatggctgcgaacttcttagattgttaaataaaataaattataataaactgttaactcttttcagtatttaatacctgtagttcagttagtaactttttcatatatagcatgttgcctgtatgcagttgaactatataaagttcattgcaaagcagattatcttgtttttttgcatagcaatcaaagttgaaatttgtttgctacatcaacaaattaaggacattttcacaaactgagaaataaacaaatatgccaattcgtaggtggttttgccttatcctttgaatgtgacttaaaatcagcaatgatgatatagtaaatactgaaatttaggtgtaaatcaatacgttctacagggaaataatgaggctaagtatttttatgtttttagtggttttttagaaacctaatcttatagccgccattagcattactagagttatgcaaataattgcattataaacatgtttataacttagccaaaacattgatttttataactctccaagtatgagttgaaatttcttatgtcttttgataaactgcagtattctttaagtgtactttgtccttttgtttattgctacaatttaagaactttatttaaaaacaattttggaaggttactaggtacagcttttgcagaagaaactgaactgtagccagatggtcagcaagtaaactacatgacttagagttcttgtgcattatacattttgggtaattcaaagtactgtatttgcattgactataaagcgtcgtttgcaatatttattcttccttcatagtcccttgttgtgattatacttccagttgtttaaatgtattttaaaagactcactattaactttattcagatcttaaaagctacacctttttgaactattccagtctttctccatccaattagaatgttatggaataacatgtgaagagatacagtgaaaatcatattataatgcattgaagatatcctacatgaattatcttctattaaaatatgtcccaataaatatacccataatcagtgggtcttctactgaaatcaagctcattcagcttttctattaagcagccaaaaaattttttgaaaaaatatgacagcatcattccttatgcatggggaaagaagcactggagatgggtttagtattgtctttatctcagaggtggaacaaagttgtcattatagggtctataaacttaagtctccagcttatttgagactggcttaatatggctgagcccggtggctcatgcctgtaatcccagcactttcagaggacgaggcgggtagatcacttgaggccaggagtttgagaccagcctggccaccatggcaaaaccccatctctaccaaaaatgcaaaaattagctaggccatggtggcacacgcctgtaatcccagctacttgtgaggctgaggcatgagaatcgcttgaacctgggaggtggaggtggcagtgagccgagatcgcaccactgcactccagcctgggtgacagagcgagactgtctc

SEQ ID NO: 192068 - DNA, 582 bp, Homo sapiens
  Payload ID: 17950
  Gene Name: transcription elongation factor B (SIII), polypeptide 2 (18kDa, elongin B)
  Uniprot ID: Q15370
  ENST ID: ENST00000262306
  CDS Start-End: 39-524
gctgcgccggcgcgtcgaggggagaggcagcagccgcgatggacgtgttcctcatgatccggcgccacaagaccaccatcttcacggacgccaaggagtccagcacggtgttcgaactgaagcgcatcgtcgagggcatcctcaagcggcctcctgacgagcagcggctgtacaaggatgaccaactcttggatgatggcaagacactgggcgagtgtggcttcaccagtcaaacagcacggccacaggccccagccacagtggggctggccttccgggcagatgacacctttgaggccctgtgcatcgagccgttttccagcccgccagagctgcccgatgtgatgaagccccaggactcgggaagcagtgccaatgaacaagccgtgcacctgcatgtccactcccagacgatggccaagagcagaaacacaagctggagccagtgtcctggtttgacagcatgttcaacgagggaaccccaagacggacccacacaggtccacccacgctgggggctgtaatcacggagggaagtggctgcccccttaacacacctttaataaacagtctacagaccca

SEQ ID NO: 192069 - DNA, 991 bp, Homo sapiens
  Payload ID: 17950
  Gene Name: transcription elongation factor B (SIII), polypeptide 2 (18kDa, elongin B)
  Uniprot ID: Q15370
  ENST ID: ENST00000409906
  CDS Start-End: 59-415
cgggaacggggcggagcgcggctgcgccggcgcgtcgaggggagaggcagcagccgcgatggacgtgttcctcatgatccggcgccacaagaccaccatcttcacggacgccaaggagtccagcacggtgttcgaactgaagcgcatcgtcgagggcatcctcaagcggcctcctgacgagcagcggctgtacaaggatgaccaactcttggatgatggcaagacactgggcgagtgtggcttcaccagtcaaacagcacggccacaggccccagccacagtggggctggccttccgggcagatgacacctttgaggccctgtgcatcgagccgttttccagcccgccagagctgcccgatgtgatgaagccccaggactcgggaagcagtgccaatgaacaagccgtgcagtgaggacccccaagaggcccatttcccccaataaaagagatttgggagtctgcctggttgctgcctctttttcccgcccctccctgggatgggtcccactccctgtgggctccttttggggcttgtgcttggcagttcctgtgctgtcctgtctcccagatcctgagaccctggctgagaacttggcccagcctgctgcttaaaggcaccatggggacctgggttgccctgagacccaagccattgttagcagctagccagccacaccaaccacgccagggggaggaaagggaaggactgggagagacacaaagaccagagccagcctcagggacaagagattccagttttaggcctttctccttctaagtgccccccacccccatagcctgcatgtccactcccagacgatggccaagagcagaaacacaagctggagccagtgtcctggtttgacagcatgttcaacgagggaaccccaagacggacccacacaggtccacccacgctgggggctgtaatcacggagggaagtggctgcccccttaacacacctttaataaacagtctacagaccca

SEQ ID NO: 192070 - DNA, 997 bp, Homo sapiens
  Payload ID: 17950
  Gene Name: transcription elongation factor B (SIII), polypeptide 2 (18kDa, elongin B)
  ENST ID: ENST00000409477
  CDS Start-End: 81-422
gcggcggggggcggctgggccgcgcggggggcccgggcttcgtgctcacgccggcccgccgcccccaggacgtgttcctcatgatccggcgccacaagaccaccatcttcacggacgccaaggagtccagcacggtgttcgaactgaagcgcatcgtcgagggcatcctcaagcggcctcctgacgagcagcggctgtacaaggatgaccaactcttggatgatggcaagacactgggcgagtgtggcttcaccagtcaaacagcacggccacaggccccagccacagtggggctggccttccgggcagatgacacctttgaggccctgtgcatcgagccgttttccagcccgccagagctgcccgatgtgatgaagccccaggactcgggaagcagtgccaatgaacaagccgtgcagtgaggacccccaagaggcccatttcccccaataaaagagatttgggagtctgcctggttgctgcctctttttcccgcccctccctgggatgggtcccactccctgtgggctccttttggggcttgtgcttggcagttcctgtgctgtcctgtctcccagatcctgagaccctggctgagaacttggcccagcctgctgcttaaaggcaccatggggacctgggttgccctgagacccaagccattgttagcagctagccagccacaccaaccacgccagggggaggaaagggaaggactgggagagacacaaagaccagagccagcctcagggacaagagattccagttttaggcctttctccttctaagtgccccccacccccatagcctgcatgtccactcccagacgatggccaagagcagaaacacaagctggagccagtgtcctggtttgacagcatgttcaacgagggaaccccaagacggacccacacaggtccacccacgctgggggctgtaatcacggagggaagtggctgcccccttaacacacctttaataaacagtctacagaccc

SEQ ID NO: 192071 - DNA, 472 bp, Homo sapiens
  Payload ID: 17950
  Gene Name: transcription elongation factor B (SIII), polypeptide 2 (18kDa, elongin B)
  ENST ID: ENST00000494946
  CDS Start-End: 1-423
gacgtgttcctcatgatccggcgccacaagaccaccatcttcacggacgccaaggagtccagcacggtgttcgaactgaagcgcatcgtcgagggcatcctcaagcggcctcctgacgagcagcggctgtacaagttgctggtcagaagtctttgggacttgccccatgtagggcctctcccaagatcctgcttctctcctcaggatgaccaactcttggatgatggcaagacactgggcgagtgtggcttcaccagtcaaacagcacggccacaggccccagccacagtggggctggccttccgggcagatgacacctttgaggccctgtgcatcgagccgttttccagcccgccagagctgcccgatgtgatgaagccccaggactcgggaagcagtgccaatgaacaagccgtgcagtgaggacccccaagaggcccatttcccccaataaaagagatttgggagtctg

SEQ ID NO: 192072 - DNA, 331 bp, Homo sapiens
  Payload ID: 17950
  Gene Name: transcription elongation factor B (SIII), polypeptide 2 (18kDa, elongin B)
  ENST ID: ENST00000572954
  CDS Start-End: 34-234
gccggcgcgtcgaggggagaggcagcagccgcgatggacgtgttcctcatgatccggcgccacaagaccaccatcttcacggacgccaaggagtccagcacggtgttcgaactgaagcgcatcgtcgagggcatcctcaagcggcctcctgacgagcagcggctgtacaagatgacacctttgaggccctgtgcatcgagccgttttccagcccgccagagctgcccgatgtgatgaagccccaggactcgggaagcagtgccaatgaacaagccgtgcagtgaggacccccaagaggcccatttcccccaataaaagagatttgggagtc

SEQ ID NO: 192073 - DNA, 5154 bp, Homo sapiens
  Payload ID: 17951
  Gene Name: transcription elongation factor B (SIII), polypeptide 3 (110kDa, elongin A)
  Uniprot ID: Q14241
  ENST ID: ENST00000418390
  CDS Start-End: 272-2668
attccgtcttgaagtagaccctggagaggtcttccaggcttgggctcagcacgcgagcacagggagcgggggtgccggcggcggaggcgcgtacggcccgagcagcccccagcccccagcgcgcacacttgggccaggggcgcgaggagtgcgcggccgccgggtgggcgctggggagcgggccctgggggcggagcctgcagcccaccgccccccacacaccccagccgaggcccggaaggggccaggcgcgcttccgtctccgccggggatgcacggagggcggagctgcggcccgaggacgcgacgcgagcccagttccggcgaggaggccgcgccagtgacagcgatggcggcggagtcggcgctccaagttgtggagaagctgcaggcgcgcctggccgcgaacccggaccctaagaagctattgaaatatttgaagaaactctccaccctgcctattacagtagacattcttgcggagactggggttgggaaaacagtaaatagcttgcgaaaacacgagcatgttggaagctttgccagggacctagtggcccagtggaagaagctggttcctgtggaacgaaatgctgagcctgatgaacaggactttgagaagagcaattcccgaaagcgccctcgggatgccctgcagaaggaggaggagatggagggggactaccaagaaacctggaaagccacggggagccgatcctatagccctgaccacaggcagaagaaacataggaaactctcggagctcgagagacctcacaaagtgtctcacggtcatgagaggagagatgagagaaagaggtgtcacagaatgtcaccaacttactcttcagaccctgagtcttctgattatggccatgttcaatcccctccatcttgtaccagtcctcatcagatgtacgtcgaccactacagatccctggaggaggaccaggagcccattgtttcacaccagaagcctgggaaaggccacagcaatgcctttcaggacagactcggggccagccaagaacgacacctgggtgaaccccatgggaaaggggttgtgagtcaaaacaaggagcacaaatcttcccacaaggacaaacgccccgtggatgccaagagtgatgagaaggcctctgtggtgagcagagagaaatcacacaaggccctctccaaagaggagaaccgaaggccaccctcaggggacaatgcaagggagaaaccgccctctagtggcgtaaagaaagagaaggacagagagggcagcagcctgaagaagaagtgtttgcctccctcagaggccgcttcagacaaccacctgaaaaagccaaagcacagagacccagagaaagccaaattggacaaaagcaagcaaggtctggacagctttgacacaggaaaaggagcaggagacctgttgcccaaggtaaaagagaagggttctaacaacctaaagactccagaagggaaagtcaaaactaatttggatagaaagtcactgggctccctccctaaagttgaggagacagatatggaggatgaattcgagcagccaaccatgtcttttgaatcctacctcagctatgaccagccccggaagaaaaagaaaaagattgtgaaaacttcagccacggcacttggagataaaggacttaaaaaaaatgactctaaaagcactggtaaaaacttggactcagttcagaaattacccaaggtgaacaaaaccaagtcagagaagccggctggagctgatttagccaagctgagaaaggtgcctgatgtgttgccagtgttgccagacctcccgttacccgcgatacaggccaattaccgtccactgccttccctcgagctgatatcctccttccagccaaagcgaaaagcgttctcttcaccccaggaagaagaagaagctggatttactgggcgcagaatgaattccaagatgcaggtgtattctggttccaagtgtgcctatctccctaaaatgatgaccttgcaccagcaatgcatccgagtacttaaaaacaacatcgattcaatctttgaagtgggaggagtcccatactctgttcttgaacccgttttggagaggtgtacacctgatcagctgtatcgcatagaggaatacaatcatgtattaattgaagaaacagatcaattatggaaagttcattgtcaccgagactttaaggaagaaagacccgaagagtatgagtcgtggcgagagatgtacctgcggcttcaggacgcccgagagcagcggctacgagtactaacaaagaatatccagttcgcacatgccaataagcccaaaggccgacaagcaaagatggcctttgtcaactctgtggccaagccacctcgtgacgtccggaggaggcaggaaaagtttggaacgggaggagcagctgtccctgagaaaatcaagatcaagccagccccgtaccccatgggaagcagccatgcttccgccagtagcatcagctttaaccccagccctgaggagccggcctatgatggcccaagcaccagcagtgcccacttggcaccagtggtcagcagcactgtttcctatgatcctaggaaacccactgtgaagaaaattgccccaatgatggccaagacaattaaagctttcaagaacagattctcccgacgataaactgaggacttgccttggaaatggaatctggggaggcaggaatacaaggacagtgggggttggggaatggaattctacaggagactggagtcttgctttgtggatccttttggtctccgagtcctgcagtctgcaggtgctgcccctgggaacctgcgtgccacagccccgcctccctgcctggagcacactttagaattctgaagatgtgaagcctctgtctcactgaggattttaaaggtcaattatacttttgttgttcattagcatctttgtaaactataagacgtagttttaattaataaatattgcccccagattgtatttatattatcccccaggtttgtttttgttttttgtcctctaccacacatttagccttttatcttccaggtccttattaaaatcagatgaaagcctagtgaaagccagtctcctgccccagctcagctctgtgtggactctggtccagacagaggactgggcatctccagagcctgcacagtacctgctgcacgtagggcaaggaatgagcactagaccgcctgtccccaagggagcctcagtggggcgacagggtgctcggcggactccacctcaggccctccccactgttgctgtgcattcctgtgcaggtgcatctctttcttactaactggtatttattaagggaggtgctctgtaggtctggagcctttccctcatcctttttgcgagtccccacctttttgtttttttttttttctttgaggctcactagaggacgcagaaccttgggagattgatttgcacagaactccccacctcccacttttacaatttccagtttctgattgaaaattttagggtttctccccactgcccttccctatctttccttcccctcaacaccatgaaggaaaaacacacacggcagggctttttgtagccctgaaggcaactttagacatttaaaatccagcactttaatctcttgttctctgtgaatcactatgagaagtgaatggttttaaaggctgtaatgctatgttggaaattggtttgttttgccttttattgaaaaggtaagatcatgtgattggaagaacacaactgttggcttgggaagaggactttgctgctgaagtgttttctaccttctgagtgtgtttaaggcaggatttggagggaaggaccagcttagggagagtgtctgagccacagcgtcaggatgggggaaaccacatgggatccatcaagttccagttgaacaggagcaagatcagaacttaggagggcagtgtcagctcccttgttggctgtcaaggaacaccgatctagtagaaacccacttggttgtgacccaggtagaggtagatgccatacatttgagatatgcgtccttaaggaacctgacaagcagactgaagggatggtaagtgtgacagcctgataagttttctcaaagcccaggatacagagccagtgttttctgtaactggagacctcagttaggccaacttcgaattccagagcaacgtaggaagtctattcagcagaaactcgacattgttcagtgtgtattgctgtgcagggtgcctattgtgacaggacacaaatgttactatgttttaatttgctatatttttgaatgggtaaagcattactttacttctcttggttacttgtaccaccattccacccctatccctagcctgccccacaaatctaatattaggaagcctcttaactgaaaccaaatgaacatttgggtcaggtgccagatgtctgctgcctagaatagctttttctaggtgtctaccaccttgaatttatctcttaactgtgtgttcaagtctttgtcattgaaactagtttttcatatcttagattcagttgtgtatgatttaatgtcccttattaggagtctttaggcagggagggaagaaaaaacagatttgttcatagcaatgtcagtatccattttggcacataaagatttttgatgagccctgtttgcatagagccagatgttttcccctcccccaagagtatctacatcagggatgtgacttggtgcgaagagtcaggggaaagaggaaaaacccaatttctaaatgacctccttgcccagcttactaaaatggctgcagagcagacacaggatgaatttgaacctgacacaggatgaatttgaacctttggtctcatttatggaaaaacttgtgcaattttttttctgtgctacactacatacaaatcaccaaattacaaattacccttttgtgatccttggtgtactgagcagtttctttggggctttttctttctgggaagcgggagggaaaggagcaaggtgtcatcctgctcttcatttgtattttggtcccaaaatgtaaatacaattttctatgttacttttttgtggtaactaccgagatgaatattttaattagataagttatatgaaaaggaaaattccatgtctaaataaaaaacaaactcca

SEQ ID NO: 192074 - DNA, 2671 bp, Homo sapiens
  Payload ID: 17951
  Gene Name: transcription elongation factor B (SIII), polypeptide 3 (110kDa, elongin A)
  ENST ID: ENST00000609199
  CDS Start-End: 33-2351
gttccggcgaggaggccgcgccagtgacagcgatggcggcggagtcggcgctccaagttgtggagaagctgcaggcgcgcctggccgcgaacccggaccctaagaagctattgaaatatttgaagaaactctccaccctgcctattacagtagacattcttgcggagactggggttgggaaaacagtaaatagcttgcgaaaacacgagcatgttggaagctttgccagggacctagtggcccagtggaagaagctggttcctgtggaacgaaatgctgagcctgatgaacaggactttgagaagagcaattcccgaaagcgccctcgggatgccctgcagaaggaggaggagatggagggggactaccaagaaacctggaaagccacggggagccgatcctatagccctgaccacaggcagaagaaacataggaaactctcggagctcgagagacctcacaaagtgtctcacggtcatgagaggagagatgagagaaagaggtgtcacagaatgtcaccaacttactcttcagaccctgagtcttctgattatggccatgttcaatcccctccatcttgtaccagtcctcatcagatgtacgtcgaccactacagatccctggaggaggaccaggagcccattgtttcacaccagaagcctgggaaaggccacagcaatgcctttcaggacagactcggggccagccaagaacgacacctgggtgaaccccatgggaaaggggttgtgagtcaaaacaaggagcacaaatcttcccacaaggacaaacgccccgtggatgccaagagtgatgagaaggcctctgtggtgagcagagagaaatcacacaaggccctctccaaagaggagaaccgaaggccaccctcaggggacaatgcaagggagaaaccgccctctagtggcgtaaagaaagagaaggacagagagggcagcagcctgaagaagaagtgtttgcctccctcagaggccgcttcagacaaccacctgaaaaagccaaagcacagagacccagagaaagccaaattggacaaaagcaagcaaggtctggacagctttgacacaggaaaaggagcaggagacctgttgcccaaggtaaaagagaagggttctaacaacctaaagactccagaagggaaagtcaaaactaatttggatagaaagtcactgggctccctccctaaagttgaggagacagatatggaggatgaattcgagcagccaaccatgtcttttgaatcctacctcagctatgaccagccccggaagaaaaagaaaaagattgtgaaaacttcagccacggcacttggagataaaggacttaaaaaaaatgactctaaaagcactggtaaaaacttggactcagttcagaaattacccaaggtgaacaaaaccaagtcagagaagccggctggagctgatttagccaagctgagaaaggtgcctgatgtgttgccagtgttgccagacctcccgttacccgcgatacaggccaattaccgtccactgccttccctcgagctgatatcctccttccagccaaagcgaaaagcgttctcttcaccccaggaagaagaagaagctggatttactgggcgcagaatgaattccaagatgcaggtgtattctggttccaagtgtgcctatctccctaaaatgatgaccttgcaccagcaatgcatccgagtacttaaaaacaacatcgattcaatctttgaagtgggaggagtcccatactctgttcttgaacccgttttggagaggtgtacacctgatcagctgtatcgcatagaggaatacaatcatgtattaattgaagaaacagatcaattatggaaagttcattgtcaccgagactttaaggaagaaagacccgaagagtatgagtcgtggcgagagatgtacctgcggcttcaggacgcccgagagcagcggctacgagtactaacaaagaatatccagttcgcacatgccaataagcccaaaggccgacaagcaaagatggcctttgtcaactctgtggccaagccacctcgtgacgtccggaggaggcaggaaaagtttggaacgggaggagcagctgtccctgagaaaatcaagatcaagccagccccgtaccccatgggaagcagccatgcttccgccagtagcatcagctttaaccccagccctgaggagccggcctatgatggcccaagcaccagcagtgcccacttggcaccagtggtcagcagcactgtttcctatgatcctaggaaacccactgtgaagaaaattgccccaatgatggccaagacaattaaagctttcaagaacagattctcccgacgataaactgaggacttgccttggaaatggaatctggggaggcaggaatacaaggacagtgggggttggggaatggaattctacaggagactggagtcttgctttgtggatccttttggtctccgagtcctgcagtctgcaggtgctgcccctgggaacctgcgtgccacagccccgcctccctgcctggagcacactttagaattctgaagatgtgaagcctctgtctcactgaggattttaaaggtcaattatacttttgttgttcattagcatctttgtaaactataagacgtagttttaattaataaatattgcccccagat

SEQ ID NO: 192075 - DNA, 4924 bp, Homo sapiens
  Payload ID: 17951
  Gene Name: transcription elongation factor B (SIII), polypeptide 3 (110kDa, elongin A)
  Uniprot ID: Q14241
  ENST ID: ENST00000613537
  CDS Start-End: 61-2457
cccccacacaccccagccgaggcccggaaggggccaggcgcgcttccgtctccgccggggatgcacggagggcggagctgcggcccgaggacgcgacgcgagcccagttccggcgaggaggccgcgccagtgacagcgatggcggcggagtcggcgctccaagttgtggagaagctgcaggcgcgcctggccgcgaacccggaccctaagaagctattgaaatatttgaagaaactctccaccctgcctattacagtagacattcttgcggagactggggttgggaaaacagtaaatagcttgcgaaaacacgagcatgttggaagctttgccagggacctagtggcccagtggaagaagctggttcctgtggaacgaaatgctgagcctgatgaacaggactttgagaagagcaattcccgaaagcgccctcgggatgccctgcagaaggaggaggagatggagggggactaccaagaaacctggaaagccacggggagccgatcctatagccctgaccacaggcagaagaaacataggaaactctcggagctcgagagacctcacaaagtgtctcacggtcatgagaggagagatgagagaaagaggtgtcacagaatgtcaccaacttactcttcagaccctgagtcttctgattatggccatgttcaatcccctccatcttgtaccagtcctcatcagatgtacgtcgaccactacagatccctggaggaggaccaggagcccattgtttcacaccagaagcctgggaaaggccacagcaatgcctttcaggacagactcggggccagccaagaacgacacctgggtgaaccccatgggaaaggggttgtgagtcaaaacaaggagcacaaatcttcccacaaggacaaacgccccgtggatgccaagagtgatgagaaggcctctgtggtgagcagagagaaatcacacaaggccctctccaaagaggagaaccgaaggccaccctcaggggacaatgcaagggagaaaccgccctctagtggcgtaaagaaagagaaggacagagagggcagcagcctgaagaagaagtgtttgcctccctcagaggccgcttcagacaaccacctgaaaaagccaaagcacagagacccagagaaagccaaattggacaaaagcaagcaaggtctggacagctttgacacaggaaaaggagcaggagacctgttgcccaaggtaaaagagaagggttctaacaacctaaagactccagaagggaaagtcaaaactaatttggatagaaagtcactgggctccctccctaaagttgaggagacagatatggaggatgaattcgagcagccaaccatgtcttttgaatcctacctcagctatgaccagccccggaagaaaaagaaaaagattgtgaaaacttcagccacggcacttggagataaaggacttaaaaaaaatgactctaaaagcactggtaaaaacttggactcagttcagaaattacccaaggtgaacaaaaccaagtcagagaagccggctggagctgatttagccaagctgagaaaggtgcctgatgtgttgccagtgttgccagacctcccgttacccgcgatacaggccaattaccgtccactgccttccctcgagctgatatcctccttccagccaaagcgaaaagcgttctcttcaccccaggaagaagaagaagctggatttactgggcgcagaatgaattccaagatgcaggtgtattctggttccaagtgtgcctatctccctaaaatgatgaccttgcaccagcaatgcatccgagtacttaaaaacaacatcgattcaatctttgaagtgggaggagtcccatactctgttcttgaacccgttttggagaggtgtacacctgatcagctgtatcgcatagaggaatacaatcatgtattaattgaagaaacagatcaattatggaaagttcattgtcaccgagactttaaggaagaaagacccgaagagtatgagtcgtggcgagagatgtacctgcggcttcaggacgcccgagagcagcggctacgagtactaacaaagaatatccagttcgcacatgccaataagcccaaaggccgacaagcaaagatggcctttgtcaactctgtggccaagccacctcgtgacgtccggaggaggcaggaaaagtttggaacgggaggagcagctgtccctgagaaaatcaagatcaagccagccccgtaccccatgggaagcagccatgcttccgccagtagcatcagctttaaccccagccctgaggagccggcctatgatggcccaagcaccagcagtgcccacttggcaccagtggtcagcagcactgtttcctatgatcctaggaaacccactgtgaagaaaattgccccaatgatggccaagacaattaaagctttcaagaacagattctcccgacgataaactgaggacttgccttggaaatggaatctggggaggcaggaatacaaggacagtgggggttggggaatggaattctacaggagactggagtcttgctttgtggatccttttggtctccgagtcctgcagtctgcaggtgctgcccctgggaacctgcgtgccacagccccgcctccctgcctggagcacactttagaattctgaagatgtgaagcctctgtctcactgaggattttaaaggtcaattatacttttgttgttcattagcatctttgtaaactataagacgtagttttaattaataaatattgcccccagattgtatttatattatcccccaggtttgtttttgttttttgtcctctaccacacatttagccttttatcttccaggtccttattaaaatcagatgaaagcctagtgaaagccagtctcctgccccagctcagctctgtgtggactctggtccagacagaggactgggcatctccagagcctgcacagtacctgctgcacgtagggcaaggaatgagcactagaccgcctgtccccaagggagcctcagtggggcgacagggtgctcggcggactccacctcaggccctccccactgttgctgtgcattcctgtgcaggtgcatctctttcttactaactggtatttattaagggaggtgctctgtaggtctggagcctttccctcatcctttttgcgagtccccacctttttgtttttttttttttctttgaggctcactagaggacgcagaaccttgggagattgatttgcacagaactccccacctcccacttttacaatttccagtttctgattgaaaattttagggtttctccccactgcccttccctatctttccttcccctcaacaccatgaaggaaaaacacacacggcagggctttttgtagccctgaaggcaactttagacatttaaaatccagcactttaatctcttgttctctgtgaatcactatgagaagtgaatggttttaaaggctgtaatgctatgttggaaattggtttgttttgccttttattgaaaaggtaagatcatgtgattggaagaacacaactgttggcttgggaagaggactttgctgctgaagtgttttctaccttctgagtgtgtttaaggcaggatttggagggaaggaccagcttagggagagtgtctgagccacagcgtcaggatgggggaaaccacatgggatccatcaagttccagttgaacaggagcaagatcagaacttaggagggcagtgtcagctcccttgttggctgtcaaggaacaccgatctagtagaaacccacttggttgtgacccaggtagaggtagatgccatacatttgagatatgcgtccttaaggaacctgacaagcagactgaagggatggtaagtgtgacagcctgataagttttctcaaagcccaggatacagagccagtgttttctgtaactggagacctcagttaggccaacttcgaattccagagcaacgtaggaagtctattcagcagaaactcgacattgttcagtgtgtattgctgtgcagggtgcctattgtgacaggacacaaatgttactatgttttaatttgctatatttttgaatgggtaaagcattactttacttctcttggttacttgtaccaccattccacccctatccctagcctgccccacaaatctaatattaggaagcctcttaactgaaaccaaatgaacatttgggtcaggtgccagatgtctgctgcctagaatagctttttctaggtgtctaccaccttgaatttatctcttaactgtgtgttcaagtctttgtcattgaaactagtttttcatatcttagattcagttgtgtatgatttaatgtcccttattaggagtctttaggcagggagggaagaaaaaacagatttgttcatagcaatgtcagtatccattttggcacataaagatttttgatgagccctgtttgcatagagccagatgttttcccctcccccaagagtatctacatcagggatgtgacttggtgcgaagagtcaggggaaagaggaaaaacccaatttctaaatgacctccttgcccagcttactaaaatggctgcagagcagacacaggatgaatttgaacctgacacaggatgaatttgaacctttggtctcatttatggaaaaacttgtgcaattttttttctgtgctacactacatacaaatcaccaaattacaaattacccttttgtgatccttggtgtactgagcagtttctttggggctttttctttctgggaagcgggagggaaaggagcaaggtgtcatcctgctcttcatttgtattttggtcccaaaatgtaaatacaattttctatgttacttttttgtggtaactaccgagatgaatattttaattagataagttatatgaaaaggaaaattccatgtct

SEQ ID NO: 192076 - DNA, 3050 bp, Homo sapiens
  Payload ID: 17952
  Gene Name: transcription elongation factor B polypeptide 3B (elongin A2)
  Uniprot ID: Q8IYF1
  ENST ID: ENST00000332567
  CDS Start-End: 358-2619
aagagggtcagggctagagccgtgagtgtcagcctgggatgggctacataaggcccagctctggcaccagagcttcattctttgttgcacagcaaactgcagaggtcactccaggctgtggctccacatcccgaggaacaaaagcgggcctgctcagctgtctgcaaggacggccgttccagaccaagtggcctgctgctccgaggacccagctcgctccaggctgtgactccacatcccgaggtcgctgcctggcgaccgggcagcgaggaccggccaccccagacttcctgtcccgcagccccaaagacagagctgcgaccgccgggacagcgacgcctgcacagctctggtgagatggcggcagggtccactacgctgcacgcagtggagaagctgcaggtgcgtctggccactaagacggagccgaaaaagctagagaaatatttgcagaaactctccgccttgcccatgacggcagacatcctggcggagactggaatcagaaagacggtgaagcgcctgcggaagcaccagcacgtgggcgactttgccagagacttagcggcccggtggaagaagctggtgctcgtggaccgaaacacccggcctggcccacaggaccctgaggagagcgcttcccgacagcgcttcggggaggctcttcaggaccaggaaaaggcctggggcttcccagaaaacgcgacggcccccaggagcccatctcacagccctgagcacagacggacagcacgcagaacacctccggggcaacagagacctcacccgaggtctcacagtcgcgagcccagagctgagagaaagtgccccagaatagccccagctgattccggccgctatcgggcctctccaacgcgcacagctcccctccggatgcccgagggccctgagcccgctgcgcccgggaagcaacccggaagaggccacactcacgcggctcagggcgggcctctgctgtgtccaggctgccagggccaaccccaggggaaagccgttgtgagccacagcaaggggcacaaatcgtctcgccaggaaaaacgccccttgtgtgcccagggagattggcactcccctactttgatcagggagaaatcatgcggggcctgcttaagagaggaaaccccaaggatgccctcctgggcaagtgccagggacaggcagccttcggacttcaagacagacaaggaaggggggcaagctggcagcggccagcgtgtccctgccttggaggaggctccagacagtcaccagaagaggcctcagcacagtcactcgaacaagaagaggcccagtctagacggccgggacccaggaaatgggacacacggcctgtcgcccgaggagaaagagcagctttccaacgaccgagagactcaagaggggaagccaccgactgctcatttggacagaacgtccgtgagctccctctctgaggtggaggaggtagatatggctgaggaattcgagcagcccactctgtcatgtgaaaaatacctcacctacgatcagttgcggaagcaaaagaaaaagactggaaaatctgccaccactgcacttggagataaacaaaggaaagcaaacgaatccaagggcactcgtgagtcctgggattcggctaagaaattgcctcctgtccaggaaagccagtcagagaggctgcaggcggccggcgctgattccgccgggccgaaaacggtgcccagccatgtcttctcagagctctgggacctctcagaggcctggatgcaggccaactacgatccgctttcggattctgactccatgacctcccaggcaaagccagaagcactctcttcaccaaagttccgggaggaagctgctttccctggacgcagagtgaatgctaagatgccggtgtactcgggctccaggcctgcctgccagctccaggtgccgacgctgcgccagcagtgtgcccaggtgcttagaaacaatccggacgccctcagcgacgtgggagaggtcccctactgggttcttgaacctgttctggaagggtggaggcccgatcagctgtatcgcagaaagaaagacaatcacgcactcgttagagagacagacgaattacggaggaatcattgtttccaggacttcaaggaagaaaagccacaggaaaacaaaacttggagggagcagtacctgcggcttccggacgccccagagcagcggctgagagtaatgacaacgaatatccgatctgcacgtggaaacaaccccaacggcagagaggcaaagatgatctgtttcaaatctgtggccaagacgccttatgatacttcaaggaggcaagagaagtctgcaggagacgctgaccccgaaaatggggagatcaagccagcctccaagcccgcgggaagcagccacactccctccagccagagcagcagcggcggtggcagagacagcagcagcagcatccttcgctggctccctgagaagcgggccaacccctgcctgagcagcagcaatgagcacgcggcgcccgcggccaaaacccggaaacaggctgccaagaaagtggccccgctgatggccaaggcaattcgagactacaagagaagattctcccgacgataaactcaggacttgccttgcagataaaatctggggggatttttgcattggcaaagtcaatgcgggttggggaacgaaacttccaatggacaccagaacctttaacttggtgcaaagttgagcctttgaattctgcaggtgtcatgtgctggccctgtgattttgcctcccacacccagccactacctcccagcttggagaacacctcagaattcagaagatatgaacgcattgggaacaattctattttggatgttcactgataatttttaaaaacaccctagttgtaatcataaataaggaaaaagatgtgagatttcctttttcctttcttttttttttcgaaatcaagtagataagaacttcttagacaaaaacacacaagccattagttgacactgataactccgaatacataaaatgtttgctgttgc

SEQ ID NO: 192077 - DNA, 1641 bp, Homo sapiens
  Payload ID: 17952
  Gene Name: transcription elongation factor B polypeptide 3B (elongin A2)
  ENST ID: ENST00000620522
  CDS Start-End: 1-1641
atggcggcagggtccactacgctgcacgcagtggagaagctgcaggtgcgtctggccactaagacggagccgaaaaagctagagaaatatttgcagaaactctccgccttgcccatgacggcagacatcctggcggagactggaatcagaaagacggtgaagcgcctgcggaagcaccagcacgtgggcgactttgccagagacttagcggcccggtggaagaagctggtgctcgtggaccgaaacacccggcctggcccacaggaccctgaggagagcgcttcccgacagcgcttcggggaggctcttcaggaccaggaaaaggcctggggcttcccagaaaacgcgacggcccccaggagcccatctcacagccctgagcacagacggacagcacgcagaacacctccggggcaacagagacctcacccgaggtctcacagtcgcgagcccagagctgagagaaagtgccccagaatagccccagctgattccggccgctatcgggcctctccaacgcgcacagctcccctccggatgcccgagggccctgagcccgctgcgcccgggaagcaacccggaagaggccacactcacgcggctcagggcgggcctctgctgtgtccaggctgccagggccaaccccaggggaaagccgttgtgagccacagcaaggggcacaaatcgtctcgccaggattcggctaagaaattgcctcctgtccaggaaagccagtcagagaggctgcaggcggccggcgctgattccgccgggccgaaaacggtgcccagccatgtcttctcagagctctgggacctctcagaggcctggatgcaggccaactacgatccgctttcggattctgactccatgacctcccaggcaaagccagaagcactctcttcaccaaagttccgggaggaagctgctttccctggacgcagagtgaatgctaagatgccggtgtactcgggctccaggcctgcctgccagctccaggtgccgacgctgcgccagcagtgtgcccaggtgcttagaaacaatccggacgccctcagcgacgtgggagaggtcccctactgggttcttgaacctgttctggaagggtggaggcccgatcagctgtatcgcagaaagaaagacaatcacgcactcgttagagagacagacgaattacggaggaatcattgtttccaggacttcaaggaagaaaagccacaggaaaacaaaacttggagggagcagtacctgcggcttccggacgccccagagcagcggctgagagtaatgacaacgaatatccgatctgcacgtggaaacaaccccaacggcagagaggcaaagatgatctgtttcaaatctgtggccaagacgccttatgatacttcaaggaggcaagagaagtctgcaggagacgctgaccccgaaaatggggagatcaagccagcctccaagcccgcgggaagcagccacactccctccagccagagcagcagcggcggtggcagagacagcagcagcagcagcagcaatgagcacgcggcgcccgcggccaaaacccggaaacaggctgccaagaaagtggccccgctgatggccaaggcaattcgagactacaagagaagattctcccgacgataa

SEQ ID NO: 192078 - DNA, 1877 bp, Homo sapiens
  Payload ID: 17953
  Gene Name: transcription elongation factor B polypeptide 3C (elongin A3)
  Uniprot ID: Q8NG57
  ENST ID: ENST00000330682
  CDS Start-End: 237-1877
acatcccgaggaacagaagcgggcctgctcagctgtctgcaaggaccggcgttccagaccaagtggcccgctgctccgaggacccagctcgctccaggctgtgactccacatcccgaggtcgccgcctggcgaccgggcagcgaggaccggccaccccagactgcctgtgccgccgccccgagctcggacagagccgcgaccgcgaggacagcgacgcctgcacagctctggcgagatggcggcagggtccactacgctgcgcgcagtggggaagctgcaggtgcgtctggccactaagacggagccgaaaaagctagagaaatatttgcagaaactctccgccttgcccatgaccgcagacatcctggcggagactggaatcagaaagacggtgaagcgcctgcggaagcaccagcacgtgggcgactttgccagagacttagcggcccggtggaagaagctggtgctcgtggaccgaaacaccgggcctgacccgcaggaccctgaggagagcgcttcccgacagcgcttcggggaggctcttcaggagcgggaaaaggcctggggcttcccagaaaacgcgacggcccccaggagcccatctcacagccctgagcacagacggacagcacgcagaacacctccggggcaacagagacctcacccgaggtctcccagtcgcgagcccagagccgagagaaagcgccccagaatggccccagctgattccggcccccatcgggaccctccaacgcgcaccgctcccctcccgatgcccgagggccctgagcccgctgtgcccggggagcaacccggaagaggccacgctcacgccgctcagggcgggcctctgctgggtcaaggctgccagggccaaccccagggggaagcggtggggagccacagcaaggggcacaaatcgtcccgcggggcttcggctcagaaatcgcctcctgtccaggaaagccagtcagagaggctgcaggcggccggcgctgattccgccgggccgaaaacggtgcccagccatgtcttctcggagctctgggacccctcagaggcctggatgcaggccaactacgatctgctgtccgcttttgaggccatgacctcccaggcaaacccagaagcactctccgcgccagcgctccaggaggaagctgctttccctggacgcagagtgaacgctaagatgccggtgtactcgggctccaggcctgcctgccagctccaggtgccgacgctgcgccagcagtgcctccgggtgcctaggaacaatccggacgccctcggcgacgtggaaggggtcccctactcggttcttgaacccgttctggaagggtggacgcccgatcagctgtaccgcacagagaaagacaatgccgcactcgctcgagagacagatgaattatggaggattcattgcctccaggacttcaaggaagaaaagccacaggagcacgagtcttggcgggagctgtacctgcggcttcgggacgcccgagagcagcggctgcgagtagtgaccacgaaaatccgatccgcacgtgaaaacaaacccagcggccgacagacaaagatgatctgtttcaactctgtggccaagacgccttatgatgcttccaggaggcaagagaagtctgcaggagccgctgaccccggaaatggagagatggagccagcccccaagcccgcaggaagcagccaggctccctccggcctcggggacggcgacggcggcagcgtgagcggcggcggcagcagcaaccggcacgcggcgcccgcggacaaaacccgaaaacaggctgccaagaaagtggccccgctgatggccaaggcaattcgagactacaagggaagattctcccgacgataa

SEQ ID NO: 192079 - DNA, 1641 bp, Homo sapiens
  Payload ID: 17954
  Gene Name: transcription elongation factor B polypeptide 3C-like
  Uniprot ID: Q3SY89
  ENST ID: ENST00000614938
  CDS Start-End: 1-1641
atggcggcagggtccactacgctgcgcgcagtggggaagctgcaggtgcgtctggccactaagacggagccgaaaaagctagagaaatatttgcagaaactctccgccttgcccatgaccgcagacatcctggcggagactggaatcagaaagacggtgaagcgcctgcggaagcaccagcacgtgggcgactttgccagagacttagcggcccggtggaagaagctggtgctcgtggaccgaaacaccgggcctgacccgcaggaccctgaggagagcgcttcccgacagcgcttcggggaggctcttcaggagcgggaaaaggcctggggcttcccagaaaacgcgacggcccccaggagcccatctcacagccctgagcacagacggacagcacgcagaacacctccggggcaacagagacctcacccgaggtctcccagtcgcgagcccagagccgagagaaagcgccccagaatggccccagctgattccggcccccatcgggaccctccaacgcgcaccgctcccctcccgatgcccgagggccctgagcccgctgtgcccggggagcaacccggaagaggccacgctcacgccgctcagggcgggcctctgctgggtcaaggctgccagggccaaccccagggggaagcggtggggagccacagcaaggggcacaaatcgtcccgcggggcttcggctcagaaatcgcctcctgtccaggaaagccagtcagagaggctgcaggcggccggcgctgattccgccgggccgaaaacggtgcccagccatgtcttctcggagctctgggacccctcagaggcctggatgcaggccaactacgatctgctgtccgcttttgaggccatgacctcccaggcaaacccagaagcactctccgcgccaacgctccaggaggaagctgctttccctggacgcagagtgaacgctaagatgccggtgtactcgggctccaggcctgcctgccagctccaggtgccgacgctgcgccagcagtgcctccgggtgcctaggaacaatccggacgccctcggcgacgtggaaggggtcccctactcggttcttgaacccgttctggaagggtggacgcccgatcagccgtaccgcacagagaaagacaatgccgcactcgctcgagagacagatgaattatggaggattcattgcctccaggacttcaaggaagaaaagccacaggagcacgagtcttggcgggagctgtacctgcggcttcgggacgcccgagagcagcggctgcgagtagtgaccacgaaaatccgatccgcacgtgaaaacaaacccagcggccgacagacaaagatgatctgtttcaactctgtggccaagacgccttatgatgcttccaggaggcaagagaagtctgcaggagccgctgaccccggaaatggagagatggagccagcccccaagcccgcaggaagcagccaggctccctccggcctcggggacggcgacggcggcagcgtgagcggcggcggcagcagcaaccggcacgcggcgcccgcggacaaaacccgaaaacaggctgccaagaaagtggccccgctgatggccaaggcaattcgagactacaagggaagattctcccgacgataa

SEQ ID NO: 192080 - DNA, 1218 bp, Homo sapiens
  Payload ID: 17954
  Gene Name: transcription elongation factor B polypeptide 3C-like
  ENST ID: ENST00000620688
  CDS Start-End: 1-1218
cctcacccgaggtctcccagtcgcgagcccagagccgagagaaagcgccccagaatggccccagctgattccggcccccatcgggaccctccaacgcgcaccgctcccctcccgatgcccgagggccctgagcccgctgtgcccggggagcaacccggaagaggccacgctcacgccgctcagggcgggcctctgctgggtcaaggctgccagggccaaccccagggggaagcggtggggagccacagcaaggggcacaaatcgtcccgcggggcttcggctcagaaatcgcctcctgtccaggaaagccagtcagagaggctgcaggcggccggcgctgattccgccgggccgaaaacggtgcccagccatgtcttctcggagctctgggacccctcagaggcctggatgcaggccaactacgatctgctgtccgcttttgaggccatgacctcccaggcaaacccagaagcactctccgcgccaacgctccaggaggaagctgctttccctggacgcagagtgaacgctaagatgccggtgtactcgggctccaggcctgcctgccagctccaggtgccgacgctgcgccagcagtgcctccgggtgcctaggaacaatccggacgccctcggcgacgtggaaggggtcccctactcggttcttgaacccgttctggaagggtggacgcccgatcagccgtaccgcacagagaaagacaatgccgcactcgctcgagagacagatgaattatggaggattcattgcctccaggacttcaaggaagaaaagccacaggagcacgagtcttggcgggagctgtacctgcggcttcgggacgcccgagagcagcggctgcgagtagtgaccacgaaaatccgatccgcacgtgaaaacaaacccagcggccgacagacaaagatgatctgtttcaactctgtggccaagacgccttatgatgcttccaggaggcaagagaagtctgcaggagccgctgaccccggaaatggagagatggagccagcccccaagcccgcaggaagcagccaggctccctccggcctcggggacggcgacggcggcagcgtgagcggcggcggcagcagcaaccggcacgcggcgcccgcggacaaaacccgaaaacaggctgccaagaaagtggccccgctgatggccaaggcaattcgagactacaagggaagattctcccgacgataa

SEQ ID NO: 192081 - DNA, 1641 bp, Homo sapiens
  Payload ID: 17955
  Gene Name: transcription elongation factor B polypeptide 3C-like 2
  Uniprot ID: A6NLF2
  ENST ID: ENST00000620881
  CDS Start-End: 1-1641
atggcggcagggtccactacgctgcgcgcagtggggaagctgcaggtgcgtctggccactaagacggagccgaaaaagctagagaaatatttgcagaaactctccgccttgcccatgaccgcagacatcctggcggagactggaatcagaaagacggtgaagcgcctgcggaagcaccagcacgtgggcgactttgccagagacttagcggcccggtggaagaagctggtgctcgtggaccgaaacaccgggcctgacccgcaggaccctgaggagagcgcttcccgacagcgcttcggggaggctcttcaggagcgggaaaaggcctggggcttcccagaaaacgcgacggcccccaggagcccatctcacagccctgagcacagacggacagcacgcagaacacctccggggcaacagagacctcacccgaggtctcccagtcgcgagcccagagccgagagaaagcgccccagaatggccccagctgattccggcccccatcgggaccctccaacgcgcaccgctcccctcccgatgcccgagggccctgagcccgctgtgcccggggagcaacccggaagaggccacgctcacgccgctcagggcgggcctctgctgggtcaaggctgccagggccaaccccagggggaagcggtggggagccacagcaaggggcacaaatcgtcccgcggggcttcggctcagaaatcgcctcctgtccaggaaagccagtcagagaggctgcaggcggccgtcgctgattccgccgggccgaaaacggtgcccagccatgtcttctcggagctctgggacccctcagaggcctggatgcaggccaactacgatctgctgtccgcttttgaggccatgacctcccaggcaaacccagaagcactctccgcgccaacgctccaggaggaagctgctttccctggacgcagagtgaacgctaagatgccggtgtactcgggctccaggcctgcctgccagctccaggtgccgacgctgcgccagcagtgcctccgggtgcctaggaacaatccggacgccctcggcgacgtggaaggggtcccctactcggctcttgaacccgttctggaagggtggacgcccgatcagccgtaccgcacagagaaagacaatgccgcactcgctcgagagacagatgaattatggaggattcattgcctccaggacttcaaggaagaaaagccacaggagcacgagtcttggcgggagctgtacctgcggcttcgggacgcccgagagcagcggctgcgagtagtgaccacgaaaatccgatccgcacgtgaaaacaaacccagcggccgacagacaaagatgatctgtttcaactctgtggccaagacgccttatgatgcttccaggaggcaagagaagtctgcaggagccgctgaccccggaaatggagagatggagccagcccccaagcccgcaggaagcagccaggctccctccggcctcggggacggcgacggcggcagcgtgagcggcggcggcagcagcaaccggcacgcggcgcccgcggacaaaacccgaaaacaggctgccaagaaagtggccccgctgatggccaaggcaattcgagactacaagggaagattctcccgacgataa

SEQ ID NO: 192082 - DNA, 1262 bp, Homo sapiens
  Payload ID: 17956
  Gene Name: transcription elongation factor, mitochondrial
  Uniprot ID: Q96QE5
  ENST ID: ENST00000306049
  CDS Start-End: 38-553
aatggaggaagactggacctactgattcaacttggagatgagcgggtctgtcctcttcacggcgggagagaggtggagatgctttctgaccccgtcgaggtcatccctgtactgggccttacataatttctgctgtcggaaaaaatccactacacctaagaaaattactcccaatgttactttttgtgatgaaaatgcaaaggagcccgaaaatgcacttgacaagctcttctcttcagaacagcaggcttccatcttgcatgtgttgaatacagcatctactaaagaacttgaagctttccgattgcttcgtggaagaaggtccatcaatatcgtagagcacagagaaaactttgggccatttcagaatttagagagtttaatgaatgtgcccttgtttaagtataaaagtacagttcaagtttgtaactccatactttgtccaaagactggacgggaaaaaagaaagtcaccggaaaaccggttcctgagaaagctcctcaaaccagacatagaaagagaaagacttaagaattgcctgggctcaccttgatcgtaagttgacagtgctggactggcagcaaagtgaccgttggagtttaatgagaggaatatactcatcatcagtctatttagaagagatttcctcgatcatttcaaagatgcctaaagcagatttctatgttctggaaaaaacaggactttccattcagaactcatctctgtttccaatactgttacattttcatatcatggaagccatgctgtatgccttattaaataaaacttttgcccaggatgggcagcatcaggtgctgagcatgaatcgaaatgcagtggggaagcattttgaactgatgattggtgactcccggactagtggaaaagagctagtgaagcagtttctcttcgattctatactgaaggcggatcctcgggtgttcttcccatcagataaaatagttcactacagacagatgtttttatctactgaactacaaagagtagaagagctttatgattcattattacaagctattgccttctatgaattagcagtgtttgactctcagccttagaattctgaggttaacgtgctaaagtataattattagctctaacgtaacaccaactgttgtgaacatccatgttattggaaaagaacacattttcagtgtattttagatgtttaaattctgacttttggctattaaatggtttacacaataagccaagaccaaatcaataaacattttatgaga

SEQ ID NO: 192083 - DNA, 1891 bp, Homo sapiens
  Payload ID: 17956
  Gene Name: transcription elongation factor, mitochondrial
  Uniprot ID: Q96QE5
  ENST ID: ENST00000581216
  CDS Start-End: 623-1705
cttctaagaggaataccgctccagcgccaacgcaatctcctcctccctcgcctttacctaatcccttgcctgccctgtttccccgctgagctcctcaaacacttcgcatctctccccgttattccagtctacctggtgaaaaggttatttgaggaccttgtctacgctgcccctacctgatcccgctcccggcgccacaggctgggccccaacaggagctcctcaatctaagtgtctaggagaaacccagggagtctccacgaaggaggcactttacccactacagactaaaactggcctcggaatcgccttcctggagattcggcccagcggctctcaggagtcggtaggggcaagaacgtttccccggtgcagtggaagaagactgcgggccagccagggactcgggatccggggacagggcctcggcaggcgcccgcctggaagcccgcagcccagacgcggacgacccactgctcagcgggacacacctcgggccttgccccggaacgccgcttggacaacaacctttccgccgagtgcaggccgagcgcttttgggcgcagcacgcaggaaccggaagtcaatggaggaagactggacctactgattcaacttggagatgagcgggtctgtcctcttcacggcgggagagaggtggagatgctttctgaccccgtcgaggtcatccctgtactgggccttacataatttctgctgtcggaaaaaatccactacacctaagaaaattactcccaatgttactttttgtgatgaaaatgcaaaggagcccgaaaatgcacttgacaagctcttctcttcagaacagcaggcttccatcttgcatgtgttgaatacagcatctactaaagaacttgaagctttccgattgcttcgtggaagaaggtccatcaatatcgtagagcacagagaaaactttgggccatttcagaatttagagagtttaatgaatgtgcccttgtttaagtataaaagtacagttcaagtttgtaactccatactttgtccaaagactggacgggaaaaaagaaagtcaccggaaaaccggttcctgagaaagctcctcaaaccagacatagaaagagaaagacttaaggcagttaatagtatcatatctatcgtttttggtactcgaagaattgcctgggctcaccttgatcgtaagttgacagtgctggactggcagcaaagtgaccgttggagtttaatgagaggaatatactcatcatcagtctatttagaagagatttcctcgatcatttcaaagatgcctaaagcagatttctatgttctggaaaaaacaggactttccattcagaactcatctctgtttccaatactgttacattttcatatcatggaagccatgctgtatgccttattaaataaaacttttgcccaggatgggcagcatcaggtgctgagcatgaatcgaaatgcagtggggaagcattttgaactgatgattggtgactcccggactagtggaaaagagctagtgaagcagtttctcttcgattctatactgaaggcggatcctcgggtgttcttcccatcagataaaatagttcactacagacagatgtttttatctactgaactacaaagagtagaagagctttatgattcattattacaagctattgccttctatgaattagcagtgtttgactctcagccttagaattctgaggttaacgtgctaaagtataattattagctctaacgtaacaccaactgttgtgaacatccatgttattggaaaagaacacattttcagtgtattttagatgtttaaattctgacttttggctattaaatggtttacacaataagccaagaccaaatcaataaacattttatgagattc

SEQ ID NO: 192084 - DNA, 2109 bp, Homo sapiens
  Payload ID: 17956
  Gene Name: transcription elongation factor, mitochondrial
  ENST ID: ENST00000580840
  CDS Start-End: 38-718
aatggaggaagactggacctactgattcaacttggagatgagcgggtctgtcctcttcacggcgggagagaggtggagatgctttctgaccccgtcgaggtcatccctgtactgggccttacataatttctgctgtcggaaaaaatccactacacctaagaaaattactcccaatgttactttttgtgatgaaaatgcaaaggagcccgaaaatgcacttgacaagctcttctcttcagaacagcaggcttccatcttgcatgtgttgaatacagcatctactaaagaacttgaagctttccgattgcttcgtggaagaaggtccatcaatatcgtagagcacagagaaaactttgggccatttcagaatttagagagtttaatgaatgtgcccttgtttaagtataaaagtacagttcaagtttgtaactccatactttgtccaaagactggacgggaaaaaagaaagtcaccggaaaaccggttcctgagaaagctcctcaaaccagacatagaaagagaaagacttaaggcagttaatagtatcatatctatcgtttttggtactcgaagaattgcctgggctcaccttgatcgtaagttgacagtgctggactggcagcaaagtgaccgttggagtttaatgagaggaatatactcatcatcagtctatttagaagaggtaaggcagttgcacctccagattcctacctgctagagctccttgtgtagtttaatcttctggtcccaaaaggaatgtaataaaatagtaaagatgggttttcttctggtacttgttactcacttattcctattatgttttccatcacctttgatttttaaaaattcaacctttagttagttcaagaaatgccttatgcatcgaaggcagatactgagaaaatcaatggtatttcattctaaatgttatagaacattatcactcttttatttataaagcttatttttcaaaatgccatcacattgtctcatttgagttttcaaaaccttgcgaaatggtcaggaattatcaccttaatggtcaggaattaccaccttgattatacatatgaaatctgtggttcagtcaagcatctgatgtgattagtcagttgcagaggtgattgattcttgctagttattctaaccgtatgctctatcccagaaaatgtttgaaggtttagtaaaacagttttaagttgtctaaccttaaagccaatacatattttagaaattatgaagtccactgtacagatcaagaaactggtacttaggaggactaaacagcttagcttagctgttgttgtgacataaccatgaccagaaccagactgctcataaaatggctttttcagttatttcaaaattgtcaatatagtataaattaactaattataatatttttaaatagaagtgggacagagaggggaccaaacataaaatgtaatgaattatttctgttcctttattttgtctttttttaaaaagatttcctcgatcatttcaaagatgcctaaagcagatttctatgttctggaaaaaacaggactttccattcagaactcatctctgtttccaatactgttacattttcatatcatggaagccatgctgtatgccttattaaataaaacttttgcccaggatgggcagcatcaggtgctgagcatgaatcgaaatgcagtggggaagcattttgaactgatgattggtgactcccggactagtggaaaagagctagtgaagcagtttctcttcgattctatactgaaggcggatcctcgggtgttcttcccatcagataaaatagttcactacagacagatgtttttatctactgaactacaaagagtagaagagctttatgattcattattacaagctattgccttctatgaattagcagtgtttgactctcagccttagaattctgaggttaacgtgctaaagtataattattagctctaacgtaacaccaactgttgtgaacatccatgttattggaaaagaacacattttcagtgtattttagatgtttaaattctgacttttggctattaaatggtttacacaataagccaagaccaaatcaataaacattttatgaga

SEQ ID NO: 192085 - DNA, 4654 bp, Homo sapiens
  Payload ID: 17957
  Gene Name: transcription elongation regulator 1
  Uniprot ID: O14776
  ENST ID: ENST00000296702
  CDS Start-End: 39-3335
acgtcgggtcggcgggtggatgaacgcggccctctgtaatggcggagcgtggcggggacgggggcgagagtgaacgattcaacccgggggagctcaggatggcccaacagcaggccttgaggttccgaggtccggctcccccaccaaatgcagtgatgcgaggcccaccacctctgatgcgacctcctccaccttttggtatgatgcgaggccctcctccaccaccacggccgccctttggacgtcctccttttgatcctaatatgccgccaatgcctcctccaggagggatacctccacctatgggccctccacacctccagagaccacctttcatgcctcctcccatgagttccatgcctcctcctccgggtatgatgtttccaccaggaatgcctcctgtgactgctcctggtactccagcactacctcctacggaggagatatgggttgaaaataaaactccagatgggaaggtttattattataatgctcggacacgtgaatctgcatggaccaagccagatggagttaaggttattcagcaatcagaactgacacctatgcttgcagcccaggcacaggttcaggctcaggcccaggcgcaggctcaggcccaggcgcaggctcaggcccaggcacaagctcaggcccaggctcaggctcaggcccaggcccaggcccaggcccaggcccaggcccaagcccaagcccaggcccaggctcaggctcaggcacaagctcaggcccaggcccaggctcaggtccaggcccaggtccaggcacaagtgcaagcacaagcagttggagcttccacccctacgaccagtagcccagcacctgcagtatccacttcaacatcatcatccaccccttcctctaccacttctaccacaacaactgctacttcagttgcgcagacagtatcaacacccacaacacaagatcagaccccaagttctgctgtttcagttgccacgcctacagttagtgtttcaactcctgctcctacagccacacctgtgcaaaccgttccccagccgcaccctcagacgttacctcctgctgttcctcattcagtacctcagccaacaacagcaatacctgcttttccaccagtaatggtacctccgtttcgtgttccccttcctggcatgccaattccacttccaggtgtagcaatgatgcaaatagtcagctgcccgtatgtaaagacagtcgctaccaccaagaccggtgtattgccaggaatggcccctcctatcgtacccatgatacatccccaggttgctattgcagcttcacctgctaccttagctggagcaacagcagtttctgaatggactgaatataaaacagcagatgggaagacatattattataataatagaacattagaatcaacctgggaaaaaccccaagaactaaaggaaaaagaaaagttagaagagaagattaaagagccaattaaagaaccctctgaagagcctctgccaatggagacggaggaggaggatcctaaagaagagcctataaaggagataaaggaggagcccaaagaagaggagatgactgaagaagaaaaggctgcccagaaggcaaagccagttgctactgctcctattcctggtactccatggtgtgtcgtttggactggtgatgagcgggtcttcttttataatcccaccactcgtctttctatgtgggaccgacctgatgatctgattggcagggcagatgttgacaaaattattcaggagccccctcataaaaaaggaatggaggaattgaagaaactaaggcacccaactccgacaatgctgtcgatccaaaagtggcaattctctatgagtgcaattaaagaggaacaagaattaatggaagaaattaatgaagatgagcctgttaaagcaaaaaaacggaagagagacgataataaagacattgactcagagaaagaagctgccatggaagctgaaattaaagctgcccgagaaagggccattgtccctctggaggctcgaatgaagcagttcaaggacatgctgctagagagaggggtgtctgctttttcaacgtgggagaaggagttgcacaagatagtttttgatccccggtacttacttctcaatcctaaagagagaaaacaggtgtttgatcagtatgtaaagaccagggcagaggaagaacgcagggaaaagaaaaataaaataatgcaagccaaggaagatttcaaaaaaatgatggaagaagcaaaatttaatccaagagcaacttttagtgaatttgcagccaagcatgctaaagattcaagattcaaagcaattgaaaagatgaaagaccgagaagccttgtttaatgagtttgtggccgctgctaggaagaaagagaaagaagattcgaagaccagaggtgagaagattaaatcggatttctttgaactattatctaatcatcacttggacagtcagtctcgatggagcaaagtaaaagacaaagtagaaagtgatccacgttacaaagcagtagatagttcatcaatgagagaagaccttttcaaacagtacattgaaaaaatagccaagaatttagactcagaaaaagaaaaggagcttgaaaggcaagcccgcattgaggcaagccttcgagaacgagaaagggaggttcaaaaggcccgttcagaacaaacaaaagaaatagatcgagagagagagcagcacaaacgagaagaagctatccagaatttcaaagctcttctgtctgacatggtacgttcttcagatgtgtcatggtctgatactcgtaggaccctccgaaaagatcaccgctgggaatctggatccttattggaaagagaggagaaagagaagctttttaatgaacacattgaagcacttaccaaaaaaaagagagagcactttaggcaacttctggatgaaacttctgcaattaccttaacatccacgtggaaagaagtaaaaaaaatcattaaggaagatcctcgatgtattaagttctcctccagtgacaggaaaaaacaaagagaatttgaagaatatatcagagacaaatatatcacagccaaagctgacttcaggacgcttttgaaagagaccaaatttataacatatagatccaaaaaattaatccaagaatcagatcagcacctgaaagatgtagaaaaaattttacagaatgacaaacggtatctagtactggactgtgtgccagaggagaggcgtaaactgattgtggcatatgttgatgacctggatcgccggggtccacccccacctcccacagcatcggagcccacgagacgatcaacaaaataattctaaatactcttccataggggcatctattcaaaatgcttgcatgagccaattttcaggtttttacatatatgtgcattagtcaacctattgcgaaaccatctgacaaacagaaggagaagcatttgtgaacagtttctgaacagaacactttggaaatatttatgcttttctttgtgtggcatgactgacatacatactcaaatataggctgtctctagtaaatcttaaaatcttgaagctaaaattcatccttttatgaggtgtggaagtcagtgacttggtgacgttcttcctagcagtgttaatacatgcaagaagtaagagcatttgtggcttgaacttgccagatgcaaataccacagactccaagaaaacccgagttggggtttgttttgttttgattttttttttttaaagcgggtaaaagagaaaacactgaaaattgaattcttatcttccagaggctacaattattataatggacaatacttttacctttgtctctaaagatcagattagttttatttgttcacttacgtgctttgattatcccctctgaattatagaccgagtcttgttgtttagcctaagagaagatttatgtagtaatttcttctcaggtatggaaccacggtcataactaacatgttggccagaatagaaccactggttaaacatattttattcaccattaagtgatctttatcaatattctggattagacaacaaattacctttctgggtgtttcttgtaaactatactcctgtttgaatgttaaactttgttgctaaagtttaattttaagatgtttgaatgttcagtttatgtatttgaactacaataaaccaaccctttttatatatctgtattgtatatgattattgttacttaatttttaagagcttattttaacctgtttttaaaagcagcaaatagaatttcccacaaagtaagttgactctaaatcttaagtattacctagtttttaaaggtttgaatataataatgcagtatttgcagtataaaaaggaaggaatttgtagagaatcattttggtgctcaagtctcttagcagtgccttattgcctcatagcaagaagatgctggggttttttttgtttttgtcctttgtattaatgtatgatggtttgcgcctttttggcattctttcaacatgtcgtgtacatcacaccatgaatcagttcctaattgatatatctagctttacctcccgagttaaaaaaaaatctttttattttatgccttcataggttgctcgtttcagagtgccacataaataaaatgtttaacaaaa

SEQ ID NO: 192086 - DNA, 3633 bp, Homo sapiens
  Payload ID: 17957
  Gene Name: transcription elongation regulator 1
  Uniprot ID: O14776
  ENST ID: ENST00000394421
  CDS Start-End: 19-3252
tgaacgcggccctctgtaatggcggagcgtggcggggacgggggcgagagtgaacgattcaacccgggggagctcaggatggcccaacagcaggccttgaggttccgaggtccggctcccccaccaaatgcagtgatgcgaggcccaccacctctgatgcgacctcctccaccttttggtatgatgcgaggccctcctccaccaccacggccgccctttggacgtcctccttttgatcctaatatgccgccaatgcctcctccaggagggatacctccacctatgggccctccacacctccagagaccacctttcatgcctcctcccatgagttccatgcctcctcctccgggtatgatgtttccaccaggaatgcctcctgtgactgctcctggtactccagcactacctcctacggaggagatatgggttgaaaataaaactccagatgggaaggtttattattataatgctcggacacgtgaatctgcatggaccaagccagatggagttaaggttattcagcaatcagaactgacacctatgcttgcagcccaggcacaggttcaggctcaggcccaggcgcaggctcaggcccaggcgcaggctcaggcccaggcacaagctcaggcccaggctcaggctcaggcccaggcccaggcccaggcccaggcccaggcccaagcccaagcccaggcccaggctcaggctcaggcacaagctcaggcccaggcccaggctcaggtccaggcccaggtccaggcacaagtgcaagcacaagcagttggagcttccacccctacgaccagtagcccagcacctgcagtatccacttcaacatcatcatccaccccttcctctaccacttctaccacaacaactgctacttcagttgcgcagacagtatcaacacccacaacacaagatcagaccccaagttctgctgtttcagttgccacgcctacagttagtgtttcaactcctgctcctacagccacacctgtgcaaaccgttccccagccgcaccctcagacgttacctcctgctgttcctcattcagtacctcagccaacaacagcaatacctgcttttccaccagtaatggtacctccgtttcgtgttccccttcctggcatgccaattccacttccaggtgtattgccaggaatggcccctcctatcgtacccatgatacatccccaggttgctattgcagcttcacctgctaccttagctggagcaacagcagtttctgaatggactgaatataaaacagcagatgggaagacatattattataataatagaacattagaatcaacctgggaaaaaccccaagaactaaaggaaaaagaaaagttagaagagaagattaaagagccaattaaagaaccctctgaagagcctctgccaatggagacggaggaggaggatcctaaagaagagcctataaaggagataaaggaggagcccaaagaagaggagatgactgaagaagaaaaggctgcccagaaggcaaagccagttgctactgctcctattcctggtactccatggtgtgtcgtttggactggtgatgagcgggtcttcttttataatcccaccactcgtctttctatgtgggaccgacctgatgatctgattggcagggcagatgttgacaaaattattcaggagccccctcataaaaaaggaatggaggaattgaagaaactaaggcacccaactccgacaatgctgtcgatccaaaagtggcaattctctatgagtgcaattaaagaggaacaagaattaatggaagaaattaatgaagatgagcctgttaaagcaaaaaaacggaagagagacgataataaagacattgactcagagaaagaagctgccatggaagctgaaattaaagctgcccgagaaagggccattgtccctctggaggctcgaatgaagcagttcaaggacatgctgctagagagaggggtgtctgctttttcaacgtgggagaaggagttgcacaagatagtttttgatccccggtacttacttctcaatcctaaagagagaaaacaggtgtttgatcagtatgtaaagaccagggcagaggaagaacgcagggaaaagaaaaataaaataatgcaagccaaggaagatttcaaaaaaatgatggaagaagcaaaatttaatccaagagcaacttttagtgaatttgcagccaagcatgctaaagattcaagattcaaagcaattgaaaagatgaaagaccgagaagccttgtttaatgagtttgtggccgctgctaggaagaaagagaaagaagattcgaagaccagaggtgagaagattaaatcggatttctttgaactattatctaatcatcacttggacagtcagtctcgatggagcaaagtaaaagacaaagtagaaagtgatccacgttacaaagcagtagatagttcatcaatgagagaagaccttttcaaacagtacattgaaaaaatagccaagaatttagactcagaaaaagaaaaggagcttgaaaggcaagcccgcattgaggcaagccttcgagaacgagaaagggaggttcaaaaggcccgttcagaacaaacaaaagaaatagatcgagagagagagcagcacaaacgagaagaagctatccagaatttcaaagctcttctgtctgacatggtacgttcttcagatgtgtcatggtctgatactcgtaggaccctccgaaaagatcaccgctgggaatctggatccttattggaaagagaggagaaagagaagctttttaatgaacacattgaagcacttaccaaaaaaaagagagagcactttaggcaacttctggatgaaacttctgcaattaccttaacatccacgtggaaagaagtaaaaaaaatcattaaggaagatcctcgatgtattaagttctcctccagtgacaggaaaaaacaaagagaatttgaagaatatatcagagacaaatatatcacagccaaagctgacttcaggacgcttttgaaagagaccaaatttataacatatagatccaaaaaattaatccaagaatcagatcagcacctgaaagatgtagaaaaaattttacagaatgacaaacggtatctagtactggactgtgtgccagaggagaggcgtaaactgattgtggcatatgttgatgacctggatcgccggggtccacccccacctcccacagcatcggagcccacgagacgatcaacaaaataattctaaatactcttccataggggcatctattcaaaatgcttgcatgagccaattttcaggtttttacatatatgtgcattagtcaacctattgcgaaaccatctgacaaacagaaggagaagcatttgtgaacagtttctgaacagaacactttggaaatatttatgcttttctttgtgtggcatgactgacatacatactcaaatataggctgtctctagtaaatcttaaaatcttgaagctaaaattcatccttttatgaggtgtggaagtcagtgacttggtgacgttcttcctagcagtgttaatacatgcaagaagtaagagcatttgtggcttgaacttgccagatgcaaataccacagactccaagaaaacccg

SEQ ID NO: 192087 - DNA, 3518 bp, Homo sapiens
  Payload ID: 17957
  Gene Name: transcription elongation regulator 1
  ENST ID: ENST00000549332
  CDS Start-End: 5-3103
tgtaatggcggagcgtggcggggacgggggcgagagtgaacgattcaacccgggggagctcaggatggcccaacagcaggccttgaggttccgaggtccggctcccccaccaaatgcagtgatgcgaggcccaccacctctgatgcgacctcctccaccttttggtatgatgcgaggccctcctccaccaccacggccgccctttggacgtcctccttttgatcctaatatgccgccaatgcctcctccaggagggatacctccacctatgggccctccacacctccagagaccacctttcatgcctcctcccatgagttccatgcctcctcctccgggtatgatgtttccaccaggaatgcctcctgtgactgctcctggtactccagcactacctcctacggaggagatatgggttgaaaataaaactccagatgggaaggtttattattataatgctcggacacgtgaatctgcatggaccaagccagatggagttaaggttattcagcaatcagaactgacacctatgcttgcagcccaggcacaggttcaggctcaggcccaggcgcaggctcaggcccaggcgcaggctcaggcccaggcacaagctcaggcccaggctcaggctcaggcccaggcccaggcccaggcccaggcccaggcccaagcccaagcccaggcccaggctcaggctcaggcacaagctcaggcccaggcccaggctcaggtccaggcccaggtccaggcacaagtgcaagcacaagcagttggagcttccacccctacgaccagtagcccagcacctgcagtatccacttcaacatcatcatccaccccttcctctaccacttctaccacaacaactgctacttcagttgcgcagacagtatcaacacccacaacacaagatcagaccccaagttctgctgtttcagttgccacgcctacagttagtgtttcaactcctgctcctacagccacacctgtgcaaaccgttccccagccgcaccctcagacgttacctcctgctgttcctcattcagtacctcagccaacaacagcaatacctgcttttccaccagtaatggtacctccgtttcgtgttccccttcctggcatgccaattccacttccaggtgtagcaatgatgcaaatagtcagctgcccgtatgtaaagacagtcgctaccaccaagaccggtgtattgccaggaatggcccctcctatcgtacccatgatacatccccaggttgctattgcagcttcacctgctaccttagctggagcaacagcagtttctgaatggactgaatataaaacagcagatgggaagacatattattataataatagaacattagaatcaacctgggaaaaaccccaagaactaaaggaaaaagaaaagttagaagagaagattaaagagccaattaaagaaccctctgaagagcctctgccaatggagacggaggaggaggatcctaaagaagagcctataaaggagataaaggaggagcccaaagaagaggagatgactgaagaagaaaaggctgcccagaaggcaaagccagttgctactgctcctattcctggtactccatggtgtgtcgtttggactggtgatgagcgggtcttcttttataatcccaccactcgtctttctatgtgggaccgacctgatgatctgattggcagggcagatgttgacaaaattattcaggagccccctcataaaaaaggaatggaggaattgaagaaactaaggcacccaactccgacaatgctgtcgatccaaaagtggcaattctctatgagtgcaattaaagaggaacaagaattaatggaagaaattaatgaagatgagcctgttaaagcaaaaaaacggaagagagacgataataaagacattgactcagagaaagaagctgccatggaagctgaaattaaagctgcccgagaaagggccattgtccctctggaggctcgaatgaagcagttcaaggacatgctgctagagagaggggtgtctgctttttcaacgtgggagaaggagttgcacaagatagtttttgatccccggtacttacttctcaatcctaaagagagaaaacaggtgtttgatcagtatgtaaagaccagggcagaggaagaacgcagggaaaagaaaaataaaataatgcaagccaaggaagatttcaaaaaaatgatggaagaagcaaaatttaatccaagagcaacttttagtgaatttgcagccaagcatgctaaagattcaagattcaaagcaattgaaaagatgaaagaccgagaagccttgtttaatgagtttgtggccgctgctaggaagaaagagaaagaagattcgaagaccagaggtgagaagattaaatcggatttctttgaactattatctaatcatcacttggacagtcagtctcgatggagcaaagtaaaagacaaagtagaaagtgatccacgttacaaagcagtagatagttcatcaatgagagaagaccttttcaaacagtacattgaaaaaatagccaagaatttagactcagaaaaagaaaaggagcttgaaaggcaagcccgcattgaggcaagccttcgagaacgagaaagggaggttcaaaaggcccgttcagaacaaacaaaagaaatagatcgagagagagagcagcacaaacgagaagaagctatccagaatttcaaagctcttctgtctgacatggtacgttcttcagatgtgtcatggtctgatactcgtaggaccctccgaaaagatcaccgctgggaatctggatccttattggaaagagaggagaaagagaagctttttaatgaacacattgaagcacttaccaaaaaaaagagagagcactttaggcaacttctggatgaaacttctgcaattaccttaacatccacgtggaaagaagtaaaaaaaatcattaaggaagatcctcgatgtattaagttctcctccagtgacaggaaaaaacaaagagaatttgaagaatatatcagagacaaatatatcacagccaaagctgacttcaggacgcttttgaaagagaccaaatttataacatatagttaatttagtgaaagatgtgaaagtgaaagcttgtgaaagatgctgggattggcagccccgcagactgaagtcctctgttcatccacagaacagatccaaaaaattaatccaagaatcagatcagcacctgaaagatgtagaaaaaattttacagaatgacaaacggtatctagtactggactgtgtgccagaggagaggcgtaaactgattgtggcatatgttgatgacctggatcgccggggtccacccccacctcccacagcatcggagcccacgagacgatcaacaaaataattctaaatactcttccataggggcatctattcaaaatgcttgcatgagccaattttcaggtttttacatatatgtgcattagtcaacctattgcgaaaccatctgacaaacagaaggagaagc

SEQ ID NO: 192088 - DNA, 2618 bp, Homo sapiens
  Payload ID: 17958
  Gene Name: transcription elongation regulator 1-like
  Uniprot ID: Q5VWI1
  ENST ID: ENST00000368642
  CDS Start-End: 87-1847
gagttcgctccggagccgcgccgccgccggcccagcatctcgggcgcccgccgcccccgccgccgccgtcagcgcggggatgtaggatgcaggcgggcgccaggttccagcggcggcggcggcagctgcagcagcagcagccccggcggcggcagcctctcctctggccgatggacgcagagccgccgccgccgccgccctgggtctggatggtgccgggctcggccgggctgctccggctcagcgcgggggtcgtggttcccccggtgctgctcgcctcggccccgccgcccgcggccccgctgctccccggtctccccggctggccggccccgagcgagccggtgctcccgctgctgccgctgccctctgcgccagactccgccgccgccgccgccgcgcaccccttccccgcgctccacgggcagtggctgtttggtggccattctccgtccctaggactgcccccctcttccacagtggagctggtgcccgtcttcccacatctctgcccttctgctcttgcaacccctattgggaaaagttggatagacaaaaggattcctaactgtaagatcttttttaataattcctttgctctggactcaacgtggatacatcctgaggagtcaaggtttttccatgggcatgaaaagcctcgtttgctggcaaatcaagtagctgtgtctctgtccaggccggctcctgcctccaggccgctccccacggtggtgttagcacctcagcccatcccaggtggctgccataacagccttaaggtgaccagcagccccgccattgccatcgccaccgccgccgccgctgccatggtctccgtggaccctgagaacctccggggcccgtccccctccagcgtgcagccgcgccacttcctgaccttggcacccatcaaaatacccctccggacgtcccccgtctcagatacaaggacagagcggggccgagtggcccgccctcctgccctgatgctgcgggcccagaagagccgggatggagacaaagaagacaaggagcctccaccgatgctggggggaggagaggacagcacagccagaggcaacaggccagtggcctccaccccggtgcccggatccccctggtgtgtggtctggacgggcgatgaccgagttttcttcttcaacccaacgatgcacctgtctgtctgggagaagcccatggacctgaaggaccgcggagacctcaacaggatcattgaggacccgccccacaaacgcaagctggaggcaccagcaactgacaacagcgatgggtccagttctgaagacaacagggaagaccaagatgtgaaaaccaagaggaaccggaccgaaggctgcgggagtcccaagccagaggaggcaaagagagaggacaaaggcacaaggacgccgcccccgcagatcctcctgcctctggaggagcgtgtgacccacttccgagacatgctgctggagagaggggtatcagcattttctacctgggagaaagaattacacaaaatcgtgtttgacccacgctatctcctgctcaactctgaggaacgaaagcagatatttgaacagtttgtcaagacaagaataaaagaagaatacaaggaaaagaaaagtaaattgctgctagccaaagaagaattcaagaaacttctagaggaatctaaagtgtctcccaggaccacgtttaaggagtttgcagagaaatacggccgggatcagaggttccgacttgttcaaaaaagaaaggaccaggagcattttttcaaccaattcatacttattcttaagaaacgggacaaggaaaacagactaaggctgcggaaaatgagatgagtttgtgaaaaaatgcaataagcccgggggttgaccctgggcgtgccgggggcgagggggtcacggtggagacggacacgggcgtggggcggccgagacctgcacggcccagcgggcaccggcactgcggggtcttcgttctcagaggattactgtttcatattgaagctctctcttttgtacattcagagtttgatgcatttctaatcaccgtgatacgtcgatcccttaattgttttaattatgcaaattacttgtaatatacacaaattatcaatccactgcaggactgtggggaagcaggaacgggagcctctgtaacaatctcaaggcatttgtgtcatcacctaagacgattggcgaaaacttttctgaaaacctttgtgaattacttcgtttctccaggattcccgcagtgttgaggaattccttactctgtccctaggtctcagtctcgtttctgagtagcagcaatagggttttcatcattcatcatagtgacaactgtgagcattccacacctggaccgtggatcacttacaggtttccaagggtggccgcgcgttcctcccagaggggcgtcccggcctggagcagggagccgtgttggttgccaccggtcctacttcaaaagaattattttgtacaaaatcatcatattaatatttgagttatttttattgtatgcccggagtttgcatgagattttttctcatcacctttgtataaaaaatttttaattttttttaatcaataaatattttaaaccag

SEQ ID NO: 192089 - DNA, 6061 bp, Homo sapiens
  Payload ID: 17959
  Gene Name: transcription factor 12
  Uniprot ID: Q99081
  ENST ID: ENST00000267811
  CDS Start-End: 305-2353
cgcggagggatccggaggcgagccgagcgcggtggtgaggccgcctcagcgaaaaaaatgtccgcctgaagagacccacaagttctattcggggggaccgacagcccgccccgggaggaaggggcggccaggcccgaaagccgcctccccctcccagacccgagagctcgtgcggggcaaagtgaaccgagccgctgggcggtgcaaggggaagcccaagcccgttctcccggccaaagtgaactttaatcggggtggttggatgcggagacggggcggcaggacctgctagaagtggccgaagatgaatccccagcaacaacgcatggccgctatagggaccgacaaggagctgagcgacctactggacttcagtgcgatgttttccccacctgttaatagtgggaaaactagaccaactacactgggaagcagtcaattcagtggatcaggtattgatgaaagaggaggtacaacatcttggggaacaagtggtcaaccaagtccttcctatgattcatctagaggttttacagacagccctcattacagtgatcacttgaatgacagtcgattaggagcccatgaaggcttgtccccaacacctttcatgaactcaaatctgatgggaaaaacatcagagagaggctcattttccctgtacagcagagatactggattaccaggctgtcaatctagtctcctgagacaagatctggggcttgggagcccagcacagctatcttcttcaggaaaacctgggacagcatactattcattctctgctacaagttccaggaggagaccactccatgactctgcagcgcttgatcccttgcaagcaaaaaaagtcagaaaggtgcctcctggtttgccttcttctgtatatgcaccatccccaaattcagatgatttcaaccgtgaatctcctagttatccatctcctaagccaccaaccagtatgttcgctagcactttctttatgcaagatgggacccacaattcttctgacctttggagttcatcaaatgggatgagccagcctggttttggtggaattctggggacctccacttcccacatgtctcaatccagtagttatggcaaccttcattcacatgaccgcttgagttatcctccacactcagtttcaccaacagacataaacacgagtcttccaccaatgtccagctttcatcgcggcagtaccagcagttcaccttacgttgctgcctcacacactcctcccatcaatggatcagacagcattctaggaaccagagggaatgctgctggaagctcacagacaggtgatgcacttggaaaggctttggcatctatttattctcctgaccataccagcagtagttttccgtcaaatccatcaacaccagttggatcaccttcacctctcacaggtaccagtcagtggccaagacctggagggcaagcaccttcatccccaagctatgaaaactcactccactccctgcagtctcgaatggaggatcgtttagacagactggatgatgcaatccatgtgctgcggaaccatgctgtgggaccttccaccagtttgcctgctggtcacagtgatatacatagtttattgggaccatcccataatgcaccaattggaagcctcaattcaaactatggaggatcaagccttgttgcaagcagtcgatcagcttcaatggttggaactcatcgggaagactctgtcagtctcaatggcaatcattcagtcctgtctagtacagtcactacttcaagcacagacctgaaccataaaacacaagaaaattatagaggtggcttgcaaagtcagtctggaactgttgttacaacagaaatcaagactgaaaacaaagaaaaggatgaaaaccttcatgaacctccttcatcagatgacatgaagtcagatgatgaatcctcccaaaaagatatcaaggtttcatctagaggcagaacaagcagtactaatgaagatgaggatttgaaccctgaacagaagatagaaagggagaaggagaggcggatggctaacaatgccagagaacgcttacgcgtgcgggatattaatgaagcattcaaagagcttggccgaatgtgtcagcttcacttgaagagtgaaaaaccccaaacaaaactccttattcttcatcaagccgtggcagtcatccttagtctagaacagcaagtcagagagaggaaccttaaccccaaagcagcctgccttaagagaagggaagaagaaaaagtttctgccgtatcggcagagccgccaaccacactgccaggaacccatcctgggcttagtgaaactaccaaccctatgggtcatatgtaaacatcagccagttccagagttatcagtaggctagatagaaggtgacctctcctcataaggacttggacaactcagattatctgaagacacaaacctgacaggagggagaagaaaaaacaaaacacttgaaccaagaaactcaaatgtaatcctacgatcaaagcaactggtcaacacttccatcagaagtgaagataggaagctcatcagatagaacatcagcccatgagatgtttgcaacaaatcttttgttgcaagcagtgtgtcgcttctgcacaatcagagactgtctcgatctctccactcaccgtggaagttgccttgtgcctaaactgaattgacaaatgcattgtaactacaaattttatttattgttatgaaactgtaaggtctacatataaagggaaaaagttaatgtggaaagctgatctacactcagctgatgccagcatacattaaagcggttcacgtgcagagaacaaagcagtgacaaccattggcccttagcattcccggcatacctattagtgtcttaaaaaggaagggaaaagtcttttgttgccctctcctatcctcttgccatatgaatagcgttttccatgaaataggaaaatattacttggtatagcatttctcttgctctcattttttgatttatttttattttctctttgtgggtgttatatttgatctctaaatctgaacagtttatggtcacagtccagcctcctccgtgcagccctgtgtgctttgcacatttaccttacagtggtaagcagagaccatctgtgaccatagcctagctagcattttaaaaggggaaattttgttctctaggttttcccccaaataaacattgctttatttctaataataaccaagacttttcaagcttctagatctcataggaaagcttgtaatagcaaaattgtaaattacaagggaagaatctactttttagaaatcgctttgttttccaagcagtaagtactacatacagtacttgtaaagtgttagctgtaagtaagcacaaaatacatttaaaatacaaagacgattttttcaggctgtgattatggtgaacataacaaaacccagtagtcaccaaggcaggtagtgtgataaatgaacacaccactctgaggctaattacctaatggaatacaagagcaatggtcacccgtatttccttatcctagcctttatttctctgtcatttggatggctggtcaatggggaagaattgagtgggtgatttaatcaactgcaaaccatctgcccctgtcccaaaatgatgagccagattagcattaaaccagtacttgtcagtccatcttaatactgttcattaaggcactctctgtctctaatccttaggagttgttttaaaagacataatcactttgaacttccatgaaacctgtcttccaccacaacaaccctgggagagaaaaacatgctaaaggaggtatcttggcttaataattccttatagccaatatcaacagtggcaatcagcacacagaggaaaggacccaaatcactatgtagcttaaagatttctgttaatttgaaagaacaaaaacaagacagaacttctggtactctaatcaggatgattcctaacaagtcagtcatttgtgaacttagtggactttttggttactttaatttgcatatattctccagttacatcggactctatctgtggccttgttcttcatttcagtgttaatcagctaaacagaagttgttgcttatgatgtgtgagtgaacatatgccactgcctggcctttttttcttcagagcttgttgtctttttcgctatattagactttgcagtatgcccagaagctttccttcataaaatagaaagaaaaaaacatttggcttatttttcactgtagctagtcttttatacaataatcttgtaagaaaatttcttgaattctaaatattactctttctagatttttgaaatcaaaaagttttcagtaaaaagtttcttactttattttattatattaggtagtaaaaaatgtagggttatttaccataacctgttcattaatatcagaaatttacaatagcattttaagaccatagtaggattctagcataccgtgtagtacctatggagtattgtaagagctaattgttggagatgaattgcttctcatcttgttctccagtttccattgttggtttattgcagatttgtatcctgtgtcaaattcaaggtattattgataaaccttttcaaccagcagcaagaagttcaaatttttttctgtcactgtaacagaaaacacaatatgtatataacatttatgtagcaataaatgtgccatcttttttttaacacagtaaaatagtgagttttttacatttctctttctcaaataataatgtattttgttttattttctccatctcattcgtcccagaaacactcacactgcttttcctaactgcattaccgacattatctgggaaacccttcaggacagaatcaggcttgtggagctaagttggcaatctggtctagagcttctctagcttgtgcttttctcctcttgccctcactactgacggtggccttttaaccttttcctaaagattgaccaaacagcaactagtagttatagaaaatctactcatttgtagatacagagaaaaatgaagaagatggaaaaagactcaaaagaggctttttaagttattcttcaaagcacttttcacatttccccataccctttctcacaaaaaaagtgtcataattaagtaatggtattgtttactgtttaaaagttaaaagatcaaaaatttgcttttatcccagtttttaaccacaaaaaaaagcgtagggattatccatgaggacttcatgccaagcaagaacctcaaacaaactagacaaactttttttttgacagtgaatgactttttgtaggacctgtgcgtgcgaaacccatggcaattgtcacatcctcttggtatgctggcagattgcttctcttggtgaattatgaaatccactgttcacattgggtgcctaacagaacattttgcttcttgtgggatttagtgaaaactattaaacttgttaagttgattttatacaaaacgataaataaaaagctctaagaagaaaatgtataatcttagagctgaaataaaatatagagaccatctagtaaatgacctcattaatatatctgtgaaaactgagactcagattgtatgtctctaagaacacataattagtaacagatcaagacacttaaaactttccctacaaaacctccctgccttgactttctctttctctttgcagatttctaggccgcttctgctcagtgtcttcattttcttccatatttgttttatttcatttttcttttctatagttcatgttttctttttccttggaaactcaaaatttaaacacacgtcgtgtgtgtgtgtgtgtgtgtgtctgtgtgtgtgtgacttaaagaatcttaagctttggcattaaatagtcctcgattcaaatctaagctcaacatctgattaacttcattttcctatctgaaaaatggagataacattagaattgtgtaagtattgaatgaaacaatgtatggaaagctcttatggttcttgtcacctaagaagtacttaataaatgataaatatttttaaataaataatattataaccaa

SEQ ID NO: 192090 - DNA, 4719 bp, Homo sapiens
  Payload ID: 17959
  Gene Name: transcription factor 12
  Uniprot ID: Q99081
  ENST ID: ENST00000333725
  CDS Start-End: 236-2356
agagacccacaagttctattcggggggaccgacagcccgccccgggaggaaggggcggccaggcccgaaagccgcctccccctcccagacccgagagctcgtgcggggcaaagtgaaccgagccgctgggcggtgcaaggggaagcccaagcccgttctcccggccaaagtgaactttaatcggggtggttggatgcggagacggggcggcaggacctgctagaagtggccgaagatgaatccccagcaacaacgcatggccgctatagggaccgacaaggagctgagcgacctactggacttcagtgcgatgttttccccacctgttaatagtgggaaaactagaccaactacactgggaagcagtcaattcagtggatcaggtattgatgaaagaggaggtacaacatcttggggaacaagtggtcaaccaagtccttcctatgattcatctagaggttttacagacagccctcattacagtgatcacttgaatgacagtcgattaggagcccatgaaggcttgtccccaacacctttcatgaactcaaatctgatgggaaaaacatcagagagaggctcattttccctgtacagcagagatactggattaccaggctgtcaatctagtctcctgagacaagatctggggcttgggagcccagcacagctatcttcttcaggaaaacctgggacagcatactattcattctctgctacaagttccaggaggagaccactccatgactctgcagcgcttgatcccttgcaagcaaaaaaagtcagaaaggtgcctcctggtttgccttcttctgtatatgcaccatccccaaattcagatgatttcaaccgtgaatctcctagttatccatctcctaagccaccaaccagtatgttcgctagcactttctttatgcaagatgggacccacaattcttctgacctttggagttcatcaaatgggatgagccagcctggttttggtggaattctggggacctccacttcccacatgtctcaatccagtagttatggcaaccttcattcacatgaccgcttgagttatcctccacactcagtttcaccaacagacataaacacgagtcttccaccaatgtccagctttcatcgcggcagtaccagcagttcaccttacgttgctgcctcacacactcctcccatcaatggatcagacagcattctaggaaccagagggaatgctgctggaagctcacagacaggtgatgcacttggaaaggctttggcatctatttattctcctgaccataccagcagtagttttccgtcaaatccatcaacaccagttggatcaccttcacctctcacaggtaccagtcagtggccaagacctggagggcaagcaccttcatccccaagctatgaaaactcactccactccctgaaaaatcgagttgagcagcaacttcacgagcatttgcaagatgcaatgtccttcttaaaggatgtctgtgagcagtctcgaatggaggatcgtttagacagactggatgatgcaatccatgtgctgcggaaccatgctgtgggaccttccaccagtttgcctgctggtcacagtgatatacatagtttattgggaccatcccataatgcaccaattggaagcctcaattcaaactatggaggatcaagccttgttgcaagcagtcgatcagcttcaatggttggaactcatcgggaagactctgtcagtctcaatggcaatcattcagtcctgtctagtacagtcactacttcaagcacagacctgaaccataaaacacaagaaaattatagaggtggcttgcaaagtcagtctggaactgttgttacaacagaaatcaagactgaaaacaaagaaaaggatgaaaaccttcatgaacctccttcatcagatgacatgaagtcagatgatgaatcctcccaaaaagatatcaaggtttcatctagaggcagaacaagcagtactaatgaagatgaggatttgaaccctgaacagaagatagaaagggagaaggagaggcggatggctaacaatgccagagaacgcttacgcgtgcgggatattaatgaagcattcaaagagcttggccgaatgtgtcagcttcacttgaagagtgaaaaaccccaaacaaaactccttattcttcatcaagccgtggcagtcatccttagtctagaacagcaagtcagagagaggaaccttaaccccaaagcagcctgccttaagagaagggaagaagaaaaagtttctgccgtatcggcagagccgccaaccacactgccaggaacccatcctgggcttagtgaaactaccaaccctatgggtcatatgtaaacatcagccagttccagagttatcagtaggctagatagaaggtgacctctcctcataaggacttggacaactcagattatctgaagacacaaacctgacaggagggagaagaaaaaacaaaacacttgaaccaagaaactcaaatgtaatcctacgatcaaagcaactggtcaacacttccatcagaagtgaagataggaagctcatcagatagaacatcagcccatgagatgtttgcaacaaatcttttgttgcaagcagtgtgtcgcttctgcacaatcagagactgtctcgatctctccactcaccgtggaagttgccttgtgcctaaactgaattgacaaatgcattgtaactacaaattttatttattgttatgaaactgtaaggtctacatataaagggaaaaagttaatgtggaaagctgatctacactcagctgatgccagcatacattaaagcggttcacgtgcagagaacaaagcagtgacaaccattggcccttagcattcccggcatacctattagtgtcttaaaaaggaagggaaaagtcttttgttgccctctcctatcctcttgccatatgaatagcgttttccatgaaataggaaaatattacttggtatagcatttctcttgctctcattttttgatttatttttattttctctttgtgggtgttatatttgatctctaaatctgaacagtttatggtcacagtccagcctcctccgtgcagccctgtgtgctttgcacatttaccttacagtggtaagcagagaccatctgtgaccatagcctagctagcattttaaaaggggaaattttgttctctaggttttcccccaaataaacattgctttatttctaataataaccaagacttttcaagcttctagatctcataggaaagcttgtaatagcaaaattgtaaattacaagggaagaatctactttttagaaatcgctttgttttccaagcagtaagtactacatacagtacttgtaaagtgttagctgtaagtaagcacaaaatacatttaaaatacaaagacgattttttcaggctgtgattatggtgaacataacaaaacccagtagtcaccaaggcaggtagtgtgataaatgaacacaccactctgaggctaattacctaatggaatacaagagcaatggtcacccgtatttccttatcctagcctttatttctctgtcatttggatggctggtcaatggggaagaattgagtgggtgatttaatcaactgcaaaccatctgcccctgtcccaaaatgatgagccagattagcattaaaccagtacttgtcagtccatcttaatactgttcattaaggcactctctgtctctaatccttaggagttgttttaaaagacataatcactttgaacttccatgaaacctgtcttccaccacaacaaccctgggagagaaaaacatgctaaaggaggtatcttggcttaataattccttatagccaatatcaacagtggcaatcagcacacagaggaaaggacccaaatcactatgtagcttaaagatttctgttaatttgaaagaacaaaaacaagacagaacttctggtactctaatcaggatgattcctaacaagtcagtcatttgtgaacttagtggactttttggttactttaatttgcatatattctccagttacatcggactctatctgtggccttgttcttcatttcagtgttaatcagctaaacagaagttgttgcttatgatgtgtgagtgaacatatgccactgcctggcctttttttcttcagagcttgttgtctttttcgctatattagactttgcagtatgcccagaagctttccttcataaaatagaaagaaaaaaacatttggcttatttttcactgtagctagtcttttatacaataatcttgtaagaaaatttcttgaattctaaatattactctttctagatttttgaaatcaaaaagttttcagtaaaaagtttcttactttattttattatattaggtagtaaaaaatgtagggttatttaccataacctgttcattaatatcagaaatttacaatagcattttaagaccatagtaggattctagcataccgtgtagtacctatggagtattgtaagagctaattgttggagatgaattgcttctcatcttgttctccagtttccattgttggtttattgcagatttgtatcctgtgtcaaattcaaggtattattgataaaccttttcaaccagcagcaagaagttcaaatttttttctgtcactgtaacagaaaacacaatatgtatataacatttatgtagcaataaatgtgccatcttttttttaa

SEQ ID NO: 192091 - DNA, 3956 bp, Homo sapiens
  Payload ID: 17959
  Gene Name: transcription factor 12
  Uniprot ID: Q99081
  ENST ID: ENST00000343827
  CDS Start-End: 57-1595
gtcttggagagaggctgtgtgcattagctacaaatagtaacattttcaaaatcaacatgtattgtgcttatcctgtccctggaatgggcagcaattctttgatgtattactacaatgggaaaacggtatatgcaccatccccaaattcagatgatttcaaccgtgaatctcctagttatccatctcctaagccaccaaccagtatgttcgctagcactttctttatgcaagatgggacccacaattcttctgacctttggagttcatcaaatgggatgagccagcctggttttggtggaattctggggacctccacttcccacatgtctcaatccagtagttatggcaaccttcattcacatgaccgcttgagttatcctccacactcagtttcaccaacagacataaacacgagtcttccaccaatgtccagctttcatcgcggcagtaccagcagttcaccttacgttgctgcctcacacactcctcccatcaatggatcagacagcattctaggaaccagagggaatgctgctggaagctcacagacaggtgatgcacttggaaaggctttggcatctatttattctcctgaccataccagcagtagttttccgtcaaatccatcaacaccagttggatcaccttcacctctcacaggtaccagtcagtggccaagacctggagggcaagcaccttcatccccaagctatgaaaactcactccactccctgcagtctcgaatggaggatcgtttagacagactggatgatgcaatccatgtgctgcggaaccatgctgtgggaccttccaccagtttgcctgctggtcacagtgatatacatagtttattgggaccatcccataatgcaccaattggaagcctcaattcaaactatggaggatcaagccttgttgcaagcagtcgatcagcttcaatggttggaactcatcgggaagactctgtcagtctcaatggcaatcattcagtcctgtctagtacagtcactacttcaagcacagacctgaaccataaaacacaagaaaattatagaggtggcttgcaaagtcagtctggaactgttgttacaacagaaatcaagactgaaaacaaagaaaaggatgaaaaccttcatgaacctccttcatcagatgacatgaagtcagatgatgaatcctcccaaaaagatatcaaggtttcatctagaggcagaacaagcagtactaatgaagatgaggatttgaaccctgaacagaagatagaaagggagaaggagaggcggatggctaacaatgccagagaacgcttacgcgtgcgggatattaatgaagcattcaaagagcttggccgaatgtgtcagcttcacttgaagagtgaaaaaccccaaacaaaactccttattcttcatcaagccgtggcagtcatccttagtctagaacagcaagtcagagagaggaaccttaaccccaaagcagcctgccttaagagaagggaagaagaaaaagtttctgccgtatcggcagagccgccaaccacactgccaggaacccatcctgggcttagtgaaactaccaaccctatgggtcatatgtaaacatcagccagttccagagttatcagtaggctagatagaaggtgacctctcctcataaggacttggacaactcagattatctgaagacacaaacctgacaggagggagaagaaaaaacaaaacacttgaaccaagaaactcaaatgtaatcctacgatcaaagcaactggtcaacacttccatcagaagtgaagataggaagctcatcagatagaacatcagcccatgagatgtttgcaacaaatcttttgttgcaagcagtgtgtcgcttctgcacaatcagagactgtctcgatctctccactcaccgtggaagttgccttgtgcctaaactgaattgacaaatgcattgtaactacaaattttatttattgttatgaaactgtaaggtctacatataaagggaaaaagttaatgtggaaagctgatctacactcagctgatgccagcatacattaaagcggttcacgtgcagagaacaaagcagtgacaaccattggcccttagcattcccggcatacctattagtgtcttaaaaaggaagggaaaagtcttttgttgccctctcctatcctcttgccatatgaatagcgttttccatgaaataggaaaatattacttggtatagcatttctcttgctctcattttttgatttatttttattttctctttgtgggtgttatatttgatctctaaatctgaacagtttatggtcacagtccagcctcctccgtgcagccctgtgtgctttgcacatttaccttacagtggtaagcagagaccatctgtgaccatagcctagctagcattttaaaaggggaaattttgttctctaggttttcccccaaataaacattgctttatttctaataataaccaagacttttcaagcttctagatctcataggaaagcttgtaatagcaaaattgtaaattacaagggaagaatctactttttagaaatcgctttgttttccaagcagtaagtactacatacagtacttgtaaagtgttagctgtaagtaagcacaaaatacatttaaaatacaaagacgattttttcaggctgtgattatggtgaacataacaaaacccagtagtcaccaaggcaggtagtgtgataaatgaacacaccactctgaggctaattacctaatggaatacaagagcaatggtcacccgtatttccttatcctagcctttatttctctgtcatttggatggctggtcaatggggaagaattgagtgggtgatttaatcaactgcaaaccatctgcccctgtcccaaaatgatgagccagattagcattaaaccagtacttgtcagtccatcttaatactgttcattaaggcactctctgtctctaatccttaggagttgttttaaaagacataatcactttgaacttccatgaaacctgtcttccaccacaacaaccctgggagagaaaaacatgctaaaggaggtatcttggcttaataattccttatagccaatatcaacagtggcaatcagcacacagaggaaaggacccaaatcactatgtagcttaaagatttctgttaatttgaaagaacaaaaacaagacagaacttctggtactctaatcaggatgattcctaacaagtcagtcatttgtgaacttagtggactttttggttactttaatttgcatatattctccagttacatcggactctatctgtggccttgttcttcatttcagtgttaatcagctaaacagaagttgttgcttatgatgtgtgagtgaacatatgccactgcctggcctttttttcttcagagcttgttgtctttttcgctatattagactttgcagtatgcccagaagctttccttcataaaatagaaagaaaaaaacatttggcttatttttcactgtagctagtcttttatacaataatcttgtaagaaaatttcttgaattctaaatattactctttctagatttttgaaatcaaaaagttttcagtaaaaagtttcttactttattttattatattaggtagtaaaaaatgtagggttatttaccataacctgttcattaatatcagaaatttacaatagcattttaagaccatagtaggattctagcataccgtgtagtacctatggagtattgtaagagctaattgttggagatgaattgcttctcatcttgttctccagtttccattgttggtttattgcagatttgtatcctgtgtcaaattcaaggtattattgataaaccttttcaaccagcagcaagaagttcaaatttttttctgtcactgtaacagaaaacacaatatgtatataacatttatgtagcaataaatgtgccatctttttttt

SEQ ID NO: 192092 - DNA, 4786 bp, Homo sapiens
  Payload ID: 17959
  Gene Name: transcription factor 12
  Uniprot ID: Q99081
  ENST ID: ENST00000438423
  CDS Start-End: 297-2417
ggcgcggagggatccggaggcgagccgagcgcggtggtgaggccgcctcagcgaaaaaaatgtccgcctgaagagacccacaagttctattcggggggaccgacagcccgccccgggaggaaggggcggccaggcccgaaagccgcctccccctcccagacccgagagctcgtgcggggcaaagtgaaccgagccgctgggcggtgcaaggggaagcccaagcccgttctcccggccaaagtgaactttaatcggggtggttggatgcggagacggggcggcagaagtggccgaagatgaatccccagcaacaacgcatggccgctatagggaccgacaaggagctgagcgacctactggacttcagtgcgatgttttccccacctgttaatagtgggaaaactagaccaactacactgggaagcagtcaattcagtggatcaggtattgatgaaagaggaggtacaacatcttggggaacaagtggtcaaccaagtccttcctatgattcatctagaggttttacagacagccctcattacagtgatcacttgaatgacagtcgattaggagcccatgaaggcttgtccccaacacctttcatgaactcaaatctgatgggaaaaacatcagagagaggctcattttccctgtacagcagagatactggattaccaggctgtcaatctagtctcctgagacaagatctggggcttgggagcccagcacagctatcttcttcaggaaaacctgggacagcatactattcattctctgctacaagttccaggaggagaccactccatgactctgcagcgcttgatcccttgcaagcaaaaaaagtcagaaaggtgcctcctggtttgccttcttctgtatatgcaccatccccaaattcagatgatttcaaccgtgaatctcctagttatccatctcctaagccaccaaccagtatgttcgctagcactttctttatgcaagatgggacccacaattcttctgacctttggagttcatcaaatgggatgagccagcctggttttggtggaattctggggacctccacttcccacatgtctcaatccagtagttatggcaaccttcattcacatgaccgcttgagttatcctccacactcagtttcaccaacagacataaacacgagtcttccaccaatgtccagctttcatcgcggcagtaccagcagttcaccttacgttgctgcctcacacactcctcccatcaatggatcagacagcattctaggaaccagagggaatgctgctggaagctcacagacaggtgatgcacttggaaaggctttggcatctatttattctcctgaccataccagcagtagttttccgtcaaatccatcaacaccagttggatcaccttcacctctcacaggtaccagtcagtggccaagacctggagggcaagcaccttcatccccaagctatgaaaactcactccactccctgaaaaatcgagttgagcagcaacttcacgagcatttgcaagatgcaatgtccttcttaaaggatgtctgtgagcagtctcgaatggaggatcgtttagacagactggatgatgcaatccatgtgctgcggaaccatgctgtgggaccttccaccagtttgcctgctggtcacagtgatatacatagtttattgggaccatcccataatgcaccaattggaagcctcaattcaaactatggaggatcaagccttgttgcaagcagtcgatcagcttcaatggttggaactcatcgggaagactctgtcagtctcaatggcaatcattcagtcctgtctagtacagtcactacttcaagcacagacctgaaccataaaacacaagaaaattatagaggtggcttgcaaagtcagtctggaactgttgttacaacagaaatcaagactgaaaacaaagaaaaggatgaaaaccttcatgaacctccttcatcagatgacatgaagtcagatgatgaatcctcccaaaaagatatcaaggtttcatctagaggcagaacaagcagtactaatgaagatgaggatttgaaccctgaacagaagatagaaagggagaaggagaggcggatggctaacaatgccagagaacgcttacgcgtgcgggatattaatgaagcattcaaagagcttggccgaatgtgtcagcttcacttgaagagtgaaaaaccccaaacaaaactccttattcttcatcaagccgtggcagtcatccttagtctagaacagcaagtcagagagaggaaccttaaccccaaagcagcctgccttaagagaagggaagaagaaaaagtttctgccgtatcggcagagccgccaaccacactgccaggaacccatcctgggcttagtgaaactaccaaccctatgggtcatatgtaaacatcagccagttccagagttatcagtaggctagatagaaggtgacctctcctcataaggacttggacaactcagattatctgaagacacaaacctgacaggagggagaagaaaaaacaaaacacttgaaccaagaaactcaaatgtaatcctacgatcaaagcaactggtcaacacttccatcagaagtgaagataggaagctcatcagatagaacatcagcccatgagatgtttgcaacaaatcttttgttgcaagcagtgtgtcgcttctgcacaatcagagactgtctcgatctctccactcaccgtggaagttgccttgtgcctaaactgaattgacaaatgcattgtaactacaaattttatttattgttatgaaactgtaaggtctacatataaagggaaaaagttaatgtggaaagctgatctacactcagctgatgccagcatacattaaagcggttcacgtgcagagaacaaagcagtgacaaccattggcccttagcattcccggcatacctattagtgtcttaaaaaggaagggaaaagtcttttgttgccctctcctatcctcttgccatatgaatagcgttttccatgaaataggaaaatattacttggtatagcatttctcttgctctcattttttgatttatttttattttctctttgtgggtgttatatttgatctctaaatctgaacagtttatggtcacagtccagcctcctccgtgcagccctgtgtgctttgcacatttaccttacagtggtaagcagagaccatctgtgaccatagcctagctagcattttaaaaggggaaattttgttctctaggttttcccccaaataaacattgctttatttctaataataaccaagacttttcaagcttctagatctcataggaaagcttgtaatagcaaaattgtaaattacaagggaagaatctactttttagaaatcgctttgttttccaagcagtaagtactacatacagtacttgtaaagtgttagctgtaagtaagcacaaaatacatttaaaatacaaagacgattttttcaggctgtgattatggtgaacataacaaaacccagtagtcaccaaggcaggtagtgtgataaatgaacacaccactctgaggctaattacctaatggaatacaagagcaatggtcacccgtatttccttatcctagcctttatttctctgtcatttggatggctggtcaatggggaagaattgagtgggtgatttaatcaactgcaaaccatctgcccctgtcccaaaatgatgagccagattagcattaaaccagtacttgtcagtccatcttaatactgttcattaaggcactctctgtctctaatccttaggagttgttttaaaagacataatcactttgaacttccatgaaacctgtcttccaccacaacaaccctgggagagaaaaacatgctaaaggaggtatcttggcttaataattccttatagccaatatcaacagtggcaatcagcacacagaggaaaggacccaaatcactatgtagcttaaagatttctgttaatttgaaagaacaaaaacaagacagaacttctggtactctaatcaggatgattcctaacaagtcagtcatttgtgaacttagtggactttttggttactttaatttgcatatattctccagttacatcggactctatctgtggccttgttcttcatttcagtgttaatcagctaaacagaagttgttgcttatgatgtgtgagtgaacatatgccactgcctggcctttttttcttcagagcttgttgtctttttcgctatattagactttgcagtatgcccagaagctttccttcataaaatagaaagaaaaaaacatttggcttatttttcactgtagctagtcttttatacaataatcttgtaagaaaatttcttgaattctaaatattactctttctagatttttgaaatcaaaaagttttcagtaaaaagtttcttactttattttattatattaggtagtaaaaaatgtagggttatttaccataacctgttcattaatatcagaaatttacaatagcattttaagaccatagtaggattctagcataccgtgtagtacctatggagtattgtaagagctaattgttggagatgaattgcttctcatcttgttctccagtttccattgttggtttattgcagatttgtatcctgtgtcaaattcaaggtattattgataaaccttttcaaccagcagcaagaagttcaaatttttttctgtcactgtaacagaaaacacaatatgtatataacatttatgtagcaataaatgtgccatcttttttttaacacagt

SEQ ID NO: 192093 - DNA, 1809 bp, Homo sapiens
  Payload ID: 17959
  Gene Name: transcription factor 12
  ENST ID: ENST00000543579
  CDS Start-End: 93-1703
actgaagacttactccctttgcctgtgtggatatatgtcttggagagaggctgtgtgcattagctacaaatagtaacattttcaaaatcaacatgtattgtgcttatcctgtccctggaatgggcagcaattctttgatgtattactacaatgggaaaacggtatatgcaccatccccaaattcagatgatttcaaccgtgaatctcctagttatccatctcctaagccaccaaccagtatgttcgctagcactttctttatgcaagatgggacccacaattcttctgacctttggagttcatcaaatgggatgagccagcctggttttggtggaattctggggacctccacttcccacatgtctcaatccagtagttatggcaaccttcattcacatgaccgcttgagttatcctccacactcagtttcaccaacagacataaacacgagtcttccaccaatgtccagctttcatcgcggcagtaccagcagttcaccttacgttgctgcctcacacactcctcccatcaatggatcagacagcattctaggaaccagagggaatgctgctggaagctcacagacaggtgatgcacttggaaaggctttggcatctatttattctcctgaccataccagcagtagttttccgtcaaatccatcaacaccagttggatcaccttcacctctcacaggtaccagtcagtggccaagacctggagggcaagcaccttcatccccaagctatgaaaactcactccactccctgaaaaatcgagttgagcagcaacttcacgagcatttgcaagatgcaatgtccttcttaaaggatgtctgtgagcagtctcgaatggaggatcgtttagacagactggatgatgcaatccatgtgctgcggaaccatgctgtgggaccttccaccagtttgcctgctggtcacagtgatatacatagtttattgggaccatcccataatgcaccaattggaagcctcaattcaaactatggaggatcaagccttgttgcaagcagtcgatcagcttcaatggttggaactcatcgggaagactctgtcagtctcaatggcaatcattcagtcctgtctagtacagtcactacttcaagcacagacctgaaccataaaacacaagaaaattatagaggtggcttgcaaagtcagtctggaactgttgttacaacagaaatcaagactgaaaacaaagaaaaggatgaaaaccttcatgaacctccttcatcagatgacatgaagtcagatgatgaatcctcccaaaaagatatcaaggtttcatctagaggcagaacaagcagtactaatgaagatgaggatttgaaccctgaacagaagatagaaagggagaaggagaggcggatggctaacaatgccagagaacgcttacgcgtgcgggatattaatgaagcattcaaagagcttggccgaatgtgtcagcttcacttgaagagtgaaaaaccccaaacaaaactccttattcttcatcaagccgtggcagtcatccttagtctagaacagcaagtcagagagaggaaccttaaccccaaagcagcctgccttaagagaagggaagaagaaaaagtttctgccgtatcggcagagccgccaaccacactgccaggaacccatcctgggcttagtgaaactaccaaccctatgggtcatatgtaaacatcagccagttccagagttatcagtaggctagatagaaggtgacctctcctcataaggacttggacaactcagattatctgaagacacaaacctgacaggaggg

SEQ ID NO: 192094 - DNA, 1598 bp, Homo sapiens
  Payload ID: 17959
  Gene Name: transcription factor 12
  Uniprot ID: Q99081
  ENST ID: ENST00000537840
  CDS Start-End: 146-1486
agacttactccctttgcctgtgtggatatatgtcttggagagaggctgtgtgcattagctacaaatagtaacattttcaaaatcaacatgtattgtgcttatcctgtccctggaatgggcagcaattctttgatgtattactacaatgggaaaacggtatatgcaccatccccaaattcagatgatttcaaccgtgaatctcctagttatccatctcctaagccaccaaccagtatgttcgctagcactttctttatgcaagagttatcctccacactcagtttcaccaacagacataaacacgagtcttccaccaatgtccagctttcatcgcggcagtaccagcagttcaccttacgttgctgcctcacacactcctcccatcaatggatcagacagcattctaggaaccagagggaatgctgctggaagctcacagacaggtgatgcacttggaaaggctttggcatctatttattctcctgaccataccagcagtagttttccgtcaaatccatcaacaccagttggatcaccttcacctctcacaggtaccagtcagtggccaagacctggagggcaagcaccttcatccccaagctatgaaaactcactccactccctgcagtctcgaatggaggatcgtttagacagactggatgatgcaatccatgtgctgcggaaccatgctgtgggaccttccaccagtttgcctgctggtcacagtgatatacatagtttattgggaccatcccataatgcaccaattggaagcctcaattcaaactatggaggatcaagccttgttgcaagcagtcgatcagcttcaatggttggaactcatcgggaagactctgtcagtctcaatggcaatcattcagtcctgtctagtacagtcactacttcaagcacagacctgaaccataaaacacaagaaaattatagaggtggcttgcaaagtcagtctggaactgttgttacaacagaaatcaagactgaaaacaaagaaaaggatgaaaaccttcatgaacctccttcatcagatgacatgaagtcagatgatgaatcctcccaaaaagatatcaaggtttcatctagaggcagaacaagcagtactaatgaagatgaggatttgaaccctgaacagaagatagaaagggagaaggagaggcggatggctaacaatgccagagaacgcttacgcgtgcgggatattaatgaagcattcaaagagcttggccgaatgtgtcagcttcacttgaagagtgaaaaaccccaaacaaaactccttattcttcatcaagccgtggcagtcatccttagtctagaacagcaagtcagagagaggaaccttaaccccaaagcagcctgccttaagagaagggaagaagaaaaagtttctgccgtatcggcagagccgccaaccacactgccaggaacccatcctgggcttagtgaaactaccaaccctatgggtcatatgtaaacatcagccagttccagagttatcagtaggctagatagaaggtgacctctcctcataaggacttggacaactcagattatctgaagacacaaacctgacaggagggagaaga

SEQ ID NO: 192095 - DNA, 1314 bp, Homo sapiens
  Payload ID: 17959
  Gene Name: transcription factor 12
  ENST ID: ENST00000559710
  CDS Start-End: 51-1001
gcagttgggcagcggttttacctccattttgagaccagacaactggactcatgtcttccaactcaagtaccagtcagtggccaagacctggagggcaagcaccttcatccccaagctatgaaaactcactccactccctgcagtctcgaatggaggatcgtttagacagactggatgatgcaatccatgtgctgcggaaccatgctgtgggaccttccaccagtttgcctgctggtcacagtgatatacatagtttattgggaccatcccataatgcaccaattggaagcctcaattcaaactatggaggatcaagccttgttgcaagcagtcgatcagcttcaatggttggaactcatcgggaagactctgtcagtctcaatggcaatcattcagtcctgtctagtacagtcactacttcaagcacagacctgaaccataaaacacaagaaaattatagaggtggcttgcaaagtcagtctggaactgttgttacaacagaaatcaagactgaaaacaaagaaaaggatgaaaaccttcatgaacctccttcatcagatgacatgaagtcagatgatgaatcctcccaaaaagatatcaaggtttcatctagaggcagaacaagcagtactaatgaagatgaggatttgaaccctgaacagaagatagaaagggagaaggagaggcggatggctaacaatgccagagaacgcttacgcgtgcgggatattaatgaagcattcaaagagcttggccgaatgtgtcagcttcacttgaagagtgaaaaaccccaaacaaaactccttattcttcatcaagccgtggcagtcatccttagtctagaacagcaagtcagagagaggaaccttaaccccaaagcagcctgccttaagagaagggaagaagaaaaagtttctgccgtatcggcagagccgccaaccacactgccaggaacccatcctgggcttagtgaaactaccaaccctatgggtcatatgtaaacatcagccagttccagagttatcagtaggctagatagaaggtgacctctcctcataaggacttggacaactcagattatctgaagacacaaacctgacaggagggagaagaaaaaacaaaacacttgaaccaagaaactcaaatgtaatcctacgatcaaagcaactggtcaacacttccatcagaagtgaagataggaagctcatcagatagaacatcagcccatgagatgtttgcaacaaatcttttgttgcaagcagtgtgtcgcttctgcacaatcagagactgtctcgatctctccactcaccgtgg

SEQ ID NO: 192096 - DNA, 675 bp, Homo sapiens
  Payload ID: 17959
  Gene Name: transcription factor 12
  ENST ID: ENST00000561152
  CDS Start-End: 398-574
attgcccctcaccccgctcctcgagaccccagccgcggccgggcccggcgcgcggagcacccggcggcggcgcggagcagggggcgccgaggaggtggcagagactggctcggaaacttgggggagaggcggcgagttgcgggagccgccgcgtcgatctcgggccgcggcgaggaacgcgtggattccgggacccggcgcgggcactgagccctcccgccccttgctcgcgccgcggtgggagcgagtcggggtcctggaagtcatcccggcgcccccagcgctcttgcgtaatcttccccagtacctctctctgttccctcacacactttgggcctcggtggtctctcgctgagcccgtttcctctgccctaggacctgctagaagtggccgaagatgaatccccagcaacaacgcatggccgctatagggaccgacaaggagctgagcgacctactggacttcagtgcgatgttttccccacctgttaatagtgggaaaactagaccaactacactgggaagcagtcaattcagtggatcagggttttacagacagccctcattacagtgatcacttgaatgacagtcgattaggagcccatgaaggcttgtccccaacacctttcatgaactcaaatctgatgggaaaaacatcagagagaggctcatttt

SEQ ID NO: 192097 - DNA, 4076 bp, Homo sapiens
  Payload ID: 17959
  Gene Name: transcription factor 12
  Uniprot ID: Q99081
  ENST ID: ENST00000557843
  CDS Start-End: 88-2136
ggggaagcccaagcccgttctcccggccaaagtgaactttaatcggggtggttggatgcggagacggggcggcagaagtggccgaagatgaatccccagcaacaacgcatggccgctatagggaccgacaaggagctgagcgacctactggacttcagtgcgatgttttccccacctgttaatagtgggaaaactagaccaactacactgggaagcagtcaattcagtggatcaggtattgatgaaagaggaggtacaacatcttggggaacaagtggtcaaccaagtccttcctatgattcatctagaggttttacagacagccctcattacagtgatcacttgaatgacagtcgattaggagcccatgaaggcttgtccccaacacctttcatgaactcaaatctgatgggaaaaacatcagagagaggctcattttccctgtacagcagagatactggattaccaggctgtcaatctagtctcctgagacaagatctggggcttgggagcccagcacagctatcttcttcaggaaaacctgggacagcatactattcattctctgctacaagttccaggaggagaccactccatgactctgcagcgcttgatcccttgcaagcaaaaaaagtcagaaaggtgcctcctggtttgccttcttctgtatatgcaccatccccaaattcagatgatttcaaccgtgaatctcctagttatccatctcctaagccaccaaccagtatgttcgctagcactttctttatgcaagatgggacccacaattcttctgacctttggagttcatcaaatgggatgagccagcctggttttggtggaattctggggacctccacttcccacatgtctcaatccagtagttatggcaaccttcattcacatgaccgcttgagttatcctccacactcagtttcaccaacagacataaacacgagtcttccaccaatgtccagctttcatcgcggcagtaccagcagttcaccttacgttgctgcctcacacactcctcccatcaatggatcagacagcattctaggaaccagagggaatgctgctggaagctcacagacaggtgatgcacttggaaaggctttggcatctatttattctcctgaccataccagcagtagttttccgtcaaatccatcaacaccagttggatcaccttcacctctcacaggtaccagtcagtggccaagacctggagggcaagcaccttcatccccaagctatgaaaactcactccactccctgcagtctcgaatggaggatcgtttagacagactggatgatgcaatccatgtgctgcggaaccatgctgtgggaccttccaccagtttgcctgctggtcacagtgatatacatagtttattgggaccatcccataatgcaccaattggaagcctcaattcaaactatggaggatcaagccttgttgcaagcagtcgatcagcttcaatggttggaactcatcgggaagactctgtcagtctcaatggcaatcattcagtcctgtctagtacagtcactacttcaagcacagacctgaaccataaaacacaagaaaattatagaggtggcttgcaaagtcagtctggaactgttgttacaacagaaatcaagactgaaaacaaagaaaaggatgaaaaccttcatgaacctccttcatcagatgacatgaagtcagatgatgaatcctcccaaaaagatatcaaggtttcatctagaggcagaacaagcagtactaatgaagatgaggatttgaaccctgaacagaagatagaaagggagaaggagaggcggatggctaacaatgccagagaacgcttacgcgtgcgggatattaatgaagcattcaaagagcttggccgaatgtgtcagcttcacttgaagagtgaaaaaccccaaacaaaactccttattcttcatcaagccgtggcagtcatccttagtctagaacagcaagtcagagagaggaaccttaaccccaaagcagcctgccttaagagaagggaagaagaaaaagtttctgccgtatcggcagagccgccaaccacactgccaggaacccatcctgggcttagtgaaactaccaaccctatgggtcatatgtaaacatcagccagttccagagttatcagtaggctagatagaaggtgacctctcctcataaggacttggacaactcagattatctgaagacacaaacctgacaggagggagaagaaaaaacaaaacacttgaaccaagaaactcaaatgtaatcctacgatcaaagcaactggtcaacacttccatcagaagtgaagataggaagctcatcagatagaacatcagcccatgagatgtttgcaacaaatcttttgttgcaagcagtgtgtcgcttctgcacaatcagagactgtctcgatctctccactcaccgtggaagttgccttgtgcctaaactgaattgacaaatgcattgtaactacaaattttatttattgttatgaaactgtaaggtctacatataaagggaaaaagttaatgtggaaagctgatctacactcagctgatgccagcatacattaaagcggttcacgtgcagagaacaaagcagtgacaaccattggcccttagcattcccggcatacctattagtgtcttaaaaaggaagggaaaagtcttttgttgccctctcctatcctcttgccatatgaatagcgttttccatgaaataggaaaatattacttggtatagcatttctcttgctctcattttttgatttatttttattttctctttgtgggtgttatatttgatctctaaatctgaacagtttatggtcacagtccagcctcctccgtgcagccctgtgtgctttgcacatttaccttacagtggtaagcagagaccatctgtgaccatagcctagctagcattttaaaaggggaaattttgttctctaggttttcccccaaataaacattgctttatttctaataataaccaagacttttcaagcttctagatctcataggaaagcttgtaatagcaaaattgtaaattacaagggaagaatctactttttagaaatcgctttgttttccaagcagtaagtactacatacagtacttgtaaagtgttagctgtaagtaagcacaaaatacatttaaaatacaaagacgattttttcaggctgtgattatggtgaacataacaaaacccagtagtcaccaaggcaggtagtgtgataaatgaacacaccactctgaggctaattacctaatggaatacaagagcaatggtcacccgtatttccttatcctagcctttatttctctgtcatttggatggctggtcaatggggaagaattgagtgggtgatttaatcaactgcaaaccatctgcccctgtcccaaaatgatgagccagattagcattaaaccagtacttgtcagtccatcttaatactgttcattaaggcactctctgtctctaatccttaggagttgttttaaaagacataatcactttgaacttccatgaaacctgtcttccaccacaacaaccctgggagagaaaaacatgctaaaggaggtatcttggcttaataattccttatagccaatatcaacagtggcaatcagcacacagaggaaaggacccaaatcactatgtagcttaaagatttctgttaatttgaaagaacaaaaacaagacagaacttctggtactctaatcaggatgattcctaacaagtcagtcatttgtgaacttagtggactttttggttactttaatttgcatatattctccagttacatcggactctatctgtggccttgttcttcatttcagtgttaatcagctaaacagaagttgttgcttatgatgtgtgagtgaacatatgccactgcctggcctttttttcttcagagcttgttgtctttttcgctatattagactttgcagtatgcccagaagctttccttcataaaatagaaagaaaaaaacatttggcttatttttcactgtagctagtcttttatacaataatcttgtaagaaaa

SEQ ID NO: 192098 - DNA, 2252 bp, Homo sapiens
  Payload ID: 17959
  Gene Name: transcription factor 12
  ENST ID: ENST00000559609
  CDS Start-End: 255-2252
gaaaaaaatgtccgcctgaagagacccacaagttctattcggggggaccgacagcccgccccgggaggaaggggcggccaggcccgaaagccgcctccccctcccagacccgagagctcgtgcggggcaaagtgaaccgagccgctgggcggtgcaaggggaagcccaagcccgttctcccggccaaagtgaactttaatcggggtggttggatgcggagacggggcggcaggacctgctagaagtggccgaagatgaatccccagcaacaacgcatggccgctatagggaccgacaaggagctgagcgacctactggacttcagtgcgatgttttccccacctgttaatagtgggaaaactagaccaactacactgggaagcagtcaattcagtggatcaggtacaatacacgagatgaagcagttaaatagcaaagcaagacagaagggtcagagaattaaaggttttacagacagccctcattacagtgatcacttgaatgacagtcgattaggagcccatgaaggcttgtccccaacacctttcatgaactcaaatctgatgggaaaaacatcagagagaggctcattttccctgtacagcagagatactggattaccaggctgtcaatctagtctcctgagacaagatctggggcttgggagcccagcacagctatcttcttcaggaaaacctgggacagcatactattcattctctgctacaagttccaggaggagaccactccatgactctgcagcgcttgatcccttgcaagcaaaaaaagtcagaaaggtgcctcctggtttgccttcttctgtatatgcaccatccccaaattcagatgatttcaaccgtgaatctcctagttatccatctcctaagccaccaaccagtatgttcgctagcactttctttatgcaagatgggacccacaattcttctgacctttggagttcatcaaatgggatgagccagcctggttttggtggaattctggggacctccacttcccacatgtctcaatccagtagttatggcaaccttcattcacatgaccgcttgagttatcctccacactcagtttcaccaacagacataaacacgagtcttccaccaatgtccagctttcatcgcggcagtaccagcagttcaccttacgttgctgcctcacacactcctcccatcaatggatcagacagcattctaggaaccagagggaatgctgctggaagctcacagacaggtgatgcacttggaaaggctttggcatctatttattctcctgaccataccagcagtagttttccgtcaaatccatcaacaccagttggatcaccttcacctctcacaggtaccagtcagtggccaagacctggagggcaagcaccttcatccccaagctatgaaaactcactccactccctgaaaaatcgagttgagcagcaacttcacgagcatttgcaagatgcaatgtccttcttaaaggatgtctgtgagcagtctcgaatggaggatcgtttagacagactggatgatgcaatccatgtgctgcggaaccatgctgtgggaccttccaccagtttgcctgctggtcacagtgatatacatagtttattgggaccatcccataatgcaccaattggaagcctcaattcaaactatggaggatcaagccttgttgcaagcagtcgatcagcttcaatggttggaactcatcgggaagactctgtcagtctcaatggcaatcattcagtcctgtctagtacagtcactacttcaagcacagacctgaaccataaaacacaagaaaattatagaggtggcttgcaaagtcagtctggaactgttgttacaacagaaatcaagactgaaaacaaagaaaaggatgaaaaccttcatgaacctccttcatcagatgacatgaagtcagatgatgaatcctcccaaaaagatatcaaggtttcatctagaggcagaacaagcagtactaatgaagatgaggatttgaaccctgaacagaagatagaaagggagaaggagaggcggatggctaacaatgccagagaacgcttacgcgtgcgggatattaatgaagcattcaaagagcttggccgaatgtgtcagcttcacttgaagagtgaaaaaccccaaacaaaactccttattcttcatcaagccgtggcagtcatccttagtctagaacagcaagtcagagagaggaaccttaaccccaaagcagcctgcctt

SEQ ID NO: 192099 - DNA, 1544 bp, Homo sapiens
  Payload ID: 17959
  Gene Name: transcription factor 12
  ENST ID: ENST00000559703
  CDS Start-End: 26-1045
attttgagaccagacaactggactcatgtcttccaactcaagtaccagtcagtggccaagacctggagggcaagcaccttcatccccaagctatgaaaactcactccactccctgaaaaatcgagttgagcagcaacttcacgagcatttgcaagatgcaatgtccttcttaaaggatgtctgtgagcagtctcgaatggaggatcgtttagacagactggatgatgcaatccatgtgctgcggaaccatgctgtgggaccttccaccagtttgcctgctggtcacagtgatatacatagtttattgggaccatcccataatgcaccaattggaagcctcaattcaaactatggaggatcaagccttgttgcaagcagtcgatcagcttcaatggttggaactcatcgggaagactctgtcagtctcaatggcaatcattcagtcctgtctagtacagtcactacttcaagcacagacctgaaccataaaacacaagaaaattatagaggtggcttgcaaagtcagtctggaactgttgttacaacagaaatcaagactgaaaacaaagaaaaggatgaaaaccttcatgaacctccttcatcagatgacatgaagtcagatgatgaatcctcccaaaaagatatcaaggtttcatctagaggcagaacaagtactaatgaagatgaggatttgaaccctgaacagaagatagaaagggagaaggagaggcggatggctaacaatgccagagaacgcttacgcgtgcgggatattaatgaagcattcaaagagcttggccgaatgtgtcagcttcacttgaagagtgaaaaaccccaaacaaaactccttattcttcatcaagccgtggcagtcatccttagtctagaacagcaagtcagagagaggaaccttaaccccaaagcagcctgccttaagagaagggaagaagaaaaagtttctgccgtatcggcagagccgccaaccacactgccaggaacccatcctgggcttagtgaaactaccaaccctatgggtcatatgtaaacatcagccagttccagagttatcagtaggctagatagaaggtgacctctcctcataaggacttggacaactcagattatctgaagacacaaacctgacaggagggagaagaaaaaacaaaacacttgaaccaagaaactcaaatgtaatcctacgatcaaagcaactggtcaacacttccatcagaagtgaagataggaagctcatcagatagaacatcagcccatgagatgtttgcaacaaatcttttgttgcaagcagtgtgtcgcttctgcacaatcagagactgtctcgatctctccactcaccgtggaagttgccttgtgcctaaactgaattgacaaatgcattgtaactacaaattttatttattgttatgaaactgtaaggtctacatataaagggaaaaagttaatgtggaaagctgatctacactcagctgatgccagcatacattaaagcggttcacgtgcagagaacaaagcagtgacaaccattg

SEQ ID NO: 192100 - DNA, 575 bp, Homo sapiens
  Payload ID: 17959
  Gene Name: transcription factor 12
  ENST ID: ENST00000557947
  CDS Start-End: 104-575
gactcgggccggcgcccaggctccggggcgcgcgggagatcgggcggcttcggccgcggagccaggctcattgttcggcaggacctgctagaagtggccgaagatgaatccccagcaacaacgcatggccgctatagggaccgacaaggagctgagcgacctactggacttcagtgcgatgttttccccacctgttaatagtgggaaaactagaccaactacactgggaagcagtcaattcagtggatcaggtattgatgaaagaggaggtacaacatcttggggaacaagtggtcaaccaagtccttcctatgattcatctagaggttttacagacagccctcattacagtgatcacttgaatgacagtcgattaggagcccatgaaggcttgtccccaacacctttcatgaactcaaatctgatgggaaaaacatcagagagaggctcattttccctgtacagcagagatactggattaccaggctgtcaatctagtctcctgagacaagatctggggcttgggagcccagcacagctatcttcttcaggaaaacctgggacagcatactatt

SEQ ID NO: 192101 - DNA, 212 bp, Homo sapiens
  Payload ID: 17959
  Gene Name: transcription factor 12
  ENST ID: ENST00000560836
  CDS Start-End: 1-145
agagaggaaccttaaccccaaagcagcctgccttaagagaagggaagaagaaaaagtttctgccgtatcggcagagccgccaaccacactgccaggaacccatcctgggcttagtgaaactaccaaccctatgggtcatatgtaaacatcagccaggaggagaggctatgggagcctcaggtaccgagcatctggtgtctggagagatgcag

SEQ ID NO: 192102 - DNA, 440 bp, Homo sapiens
  Payload ID: 17959
  Gene Name: transcription factor 12
  ENST ID: ENST00000560948
  CDS Start-End: 1-133
taaccccaaagcagcctgccttaagagaagggaagaagaaaaagtttctgccgtatcggcagagccgccaaccacactgccaggaacccatcctgggcttagtgaaactaccaaccctatgggtcatatgtaaacatcagccaggttgtctttgaagggagacctcaggtgcacctcatggcttccacagcacctcatcttcctacaaaagagcaaaataaaaccaaagggtcttctgaagtcactgagacaatagctgatctcattgggccaatgagtcttctaaaaattgcagttccttctcccttggcattccacagtcaagtaaacttacacgtattgtctggaagaatgaatcccattcctcctccatcttctttggctctggtgtgggcttatgtaatctggatacaatcccataaagttgctgtgtttagtaa

SEQ ID NO: 192103 - DNA, 1555 bp, Homo sapiens
  Payload ID: 17960
  Gene Name: transcription factor 15 (basic helix-loop-helix)
  Uniprot ID: Q12870
  ENST ID: ENST00000246080
  CDS Start-End: 162-761
ggccgggcggagccctccgcccccggccggggcggccttgccattggcccctccctcgcctataaggcgggggccggcggggccgtgggagcgcgcgggagcgcacggcggggcgcggccgacgctgggacgcggcgcacggagggacgcggccggcgcccatggcgttcgcgctgctgcggcccgtcggcgcgcacgtgctgtacccggacgtgcggctgctgagcgaggacgaggagaaccgcagcgagagcgacgcgtcggaccagtcgttcggctgctgcgagggcccggaggcggcgcggcgcggcccgggccccgggggcgggcggcgggcgggcggcggcggcggcgcgggccccgtggtggtggtgcgacagcggcaggcggccaacgcgcgggagcgggaccgcactcagagcgtgaacacggccttcacggcgctgcgcacgctcatccccaccgagccggtggaccgcaagctgtccaagatcgagaccgtgcgcctggcgtccagctacatcgcgcacctggccaacgtgctgctgctgggcgactcggccgacgacgggcagccgtgcttccgtgccgcgggcagtgccaagggcgccgtccccgccgccgccgacggcggccgccagccgcgctccatctgcaccttctgcctcagcaaccagcgcaaggggggtggccgtcgtgacctggggggcagctgcttgaaggtgaggggggtggccccccttcgagggccacggagatgagcctggaccctggagaaggaggccaggagccagccactggctggacagggaagaagaccccaggagccaagcccaccccttctttgtgtagggaccgggggaccatggcctgttccgggacactctgggcagggccctcgggacatctccacccgatcctggagagctgtgaggatccattcagcctgcccagctctggctggtcagagacaaggcagaacttttggaaaaacaaagactgttggtgacagggtgtgtgtgtatctgtgcgtgagtgtgagtgtgtgtgagagagaattggtgagtttaaaataaaagctatttttaaataaaagacgtcgttctgagctgaggagagtcccgtggacatcggaggtcagaggtgggccctcccctggacctagagagaggcacagatgttctgggggctgccctgagccctggaagggtgggggtggggcgggggaaggcaggcagagccccctctccgggcgccataaccaaactttcctcagtctgctgtttatcagatgttcttaacaactgttaggtgtctgatatggttggtaaagaaatcttaattttacttatttttgaataaggcctgtgttcatttcattcacatggttcaaaactcagaaggtaccagagggtatgtgttgaaaagtctccgtgcccctgtcctccagccaccagctctcctctctgcaagcagcctagggcaccagtttcctgtgatgtcccattcactatgaatgatcaggcaaatacacaaatgacagcacatcgtacac

SEQ ID NO: 192104 - DNA, 958 bp, Homo sapiens
  Payload ID: 17960
  Gene Name: transcription factor 15 (basic helix-loop-helix)
  ENST ID: ENST00000621005
  CDS Start-End: 30-626
cggcgcacggagggacgcggccggcgcccatggcgttcgcgctgctgcggcccgtcggcgcgcacgtgctgtacccggacgtgcggctgctgagcgaggacgaggagaaccgcagcgagagcgacgcgtcggaccagtcgttcggctgctgcgagggcccggaggcggcgcggcgcggcccgggccccgggggcgggcggcgggcgggcggcggcggcggcgcgggccccgtggtggtggtgcgacagcggcaggcggccaacgcgcgggagcgggaccgcactcagagcgtgaacacggccttcacggcgctgcgcacgctcatccccaccgagccggtggaccgcaagctgtccaagatcgagaccgtgcgcctggcgtccagctacatcgcgcacctggccaacgtgctgctgctgggcgactcggccgacgacgggcagccgtgcttccgtgccgcgggcagtgccaagggcgccgtccccgccgccccgacgggccgccagccgcgctccatctgcaccttctgcctcagcaaccagcgcaaggggggtggccgtcgtgacctggggggcagctgcttgaaggtgaggggggtggccccccttcgagggccacggagatgagcctggaccctggagaaggaggccaggagccagccactggctggacagggaagaagaccccaggagccaagcccaccccttctttgtgtagggaccgggggaccatggcctgttccgggacactctgggcagggccctcgggacatctccacccgatcctggagagctgtgaggatccattcagcctgcccagctctggctggtcagagacaaggcagaacttttggaaaaacaaagactgttggtgacagggtgtgtgtgtatctgtgcgtgagtgtgagtgtgtgtgagagagaattggtgagtttaaaataaaagctatttttaaataa

SEQ ID NO: 192105 - DNA, 3039 bp, Homo sapiens
  Payload ID: 17961
  Gene Name: transcription factor 19
  Uniprot ID: Q9Y242
  ENST ID: ENST00000376255
  CDS Start-End: 504-1541
aggaggggtaggcgctgcccgcgcgcagaggccgcgcccctcctggccccggcttcttggctgtcaaacagatgcagcaacgtcggctcctgccgaggagcccaaggggtcccgggatccgccgcacaggctggcactgcttgaagaggaggctactcggagactgcgccgcgcggattggaggctccccaaatattttgcgatctgaggatccagctcaagtgaggtgccataggacgtgttcctgagtttgcattgcacggagaccttcctggaatttttcatttgcaagtcggcttaaccaattttgcattgagtcctaggctgcttgcactctgaatttgggctattcaggtagtgtgctcaaagttgaaaccgcatacagcacaactcaagtttgcatcagactgggaagcgaacttaagccagcggtgcgtggcccaggagtgggaaaggaaatggatgcctgaagtggaagaggtggtgcagagggggcaccgcccatgctgccctgcttccaactgctgcgcatagggggcggcaggggcggtgatctctacaccttccacccccccgccggggctggctgcacctatcgcttgggccacagggccgacctgtgtgatgtggccctgcggccccagcaggagcctggcctcatctctgggatccacgccgaactgcatgccgagccccggggtgatgactggagggtcagcctggaagaccacagcagccaaggtactttggtcaataatgtccgactcccaagaggtcacaggctggaattgagtgatggagacctcctgacctttggccctgaagggcccccaggaaccagcccctcggagttctacttcatgttccaacaagtacgagtcaagcctcaggactttgctgccattaccatcccacggtctaggggagaagcccgggttggggctggtttccggcctatgctgccctcccagggggctccacagcggcctctcagcaccttctcccctgcccccaaggccacactgatcctaaactccataggcagcctcagcaagctccggccccagcccctcaccttctcccctagttggggtggaccaaagagcctgcctgttcccgccccacctggggaaatggggaccacgccttctgctccaccacaacgcaatcggaggaaatctgttcaccgagtgttggcggaactggatgatgagagtgagcctcctgagaacccgccaccggtccttatggagcccaggaagaaactccgtgtagacaaagccccactgactcccactggaaatcgacgtggccgtcctcggaagtacccagtgagcgctcccatggctccccctgcagttgggggcggggagccctgtgcagctccttgttgctgcctgccccaggaagagacagtggcctgggttcagtgtgatggctgtgacgtctggttccatgtggcctgtgttggctgcagcatccaggctgccagggaggccgacttccgatgcccagggtgccgggctggcattcagacctaaggtccactgccaaggcaccatcggacacacctgcccatgagtagacacagcagcgagcaaataggtctgataaataccccccttcccttccctccccaggagggaatgactacagggaagaaggatggattgatgtggactcattcagggcctggagcagaccctggtggccaagacagaagagatggtttcctgccaaagatattgccacctccaggaaattgccagtgagctggaagttcccactattacaagccataaggccatgttgccatggacaccagaatatctgtagtcagagcacctatcagttgcaaaagccatgcctgcaaccgatggaaaatgtaagagggagttcttaaggttcttggtggcatcacccaaggcattctgggaaaacctagggcctggccccaaaacttccctactctgtggctagtcctgctgccaacaaaatcgtagcgacctggcttttcacagctttgcttttatttccaagtcaaggacaagccgcttcattcactcctgggcatttactcttcttgtgggtctgtgatattccttgctttccagggagaatgtgcttggcaaggtctggagaactaattcagaatcttaggggaaggggagagatggaaatacaaacctgcttactggaaaggtgcaaatatatgggttgagctggaggtaggaatacaggtaattaaggtttctagtttaagggaaaacagatctattgccatttaaataaggtaactgggatttggttaagttcacaaagatagcagaagatttatttacaggcttcacctgtactgtcagggcaagagaaagcctggtaaaccagctacagcagtttaccagtgtgatggctgtgacacagctccactccacgggtggacacagcagagggcaactgggctggcctggttcagtgtgaatcaaaccgcttaacccacacatggtacatgtgattttcttttgtgagccttacaccaagccaaactattgtcaaagcatcatttctatagaaataaagccttatcttgacctgttctattaaaacctgccacacccgccctttcctacctagatttaatgagcccaagtttttaaaatggaagaaatgactctggggcaaagacccctaatgaactagtggcagagccaggaataaaacttgagtaactaatgagtcacttatgggcagagtatgcaaaaaccttaagtggaaaccaaatagaccctggtatcaagaaagcacaaagtattaatagaagtttctggttggggtgatctaggttcaacagaaataagatgatttctaagtataaagccatttaagaattccagagtagggtgggaaagcaaaaagccagctctgaacaggtaacagctacatggtgactgagtctatgggcaaaagttcttgcatcacaggcttttgggaactagcctatcacagggccctgtacaaataaacttggctgcaatccca

SEQ ID NO: 192106 - DNA, 3290 bp, Homo sapiens
  Payload ID: 17961
  Gene Name: transcription factor 19
  Uniprot ID: Q9Y242
  ENST ID: ENST00000376257
  CDS Start-End: 755-1792
tccgaaggaggggtaggcgctgcccgcgcgcagaggccgcgcccctcctggccccggcttcttggctgtcaaacagatgcagcaacgtcggctcctgccgaggagcccaaggggtcccgggatccgccgcacaggctggcactgcttgaagaggaggctactcggagactgcgccgcgcggtggattcattgccctcggaggttcaaccagttatgagtgagggattggccagaagatcggggcgcaggcaagcaggagtgctctattaggataagcaagtttgacaggaagaagctactcttctccgaattacacagaggtgatgtgttcgtattgcacgtagacgtgtgtataacaggacctccttccccgcgccccgccaccccgacacacacaggagctgcctaaagtatccttgccttgcagattggaggctccccaaatattttgcgatctgaggatccagctcaagtgaggtgccataggacgtgttcctgagtttgcattgcacggagaccttcctggaatttttcatttgcaagtcggcttaaccaattttgcattgagtcctaggctgcttgcactctgaatttgggctattcaggtagtgtgctcaaagttgaaaccgcatacagcacaactcaagtttgcatcagactgggaagcgaacttaagccagcggtgcgtggcccaggagtgggaaaggaaatggatgcctgaagtggaagaggtggtgcagagggggcaccgcccatgctgccctgcttccaactgctgcgcatagggggcggcaggggcggtgatctctacaccttccacccccccgccggggctggctgcacctatcgcttgggccacagggccgacctgtgtgatgtggccctgcggccccagcaggagcctggcctcatctctgggatccacgccgaactgcatgccgagccccggggtgatgactggagggtcagcctggaagaccacagcagccaaggtactttggtcaataatgtccgactcccaagaggtcacaggctggaattgagtgatggagacctcctgacctttggccctgaagggcccccaggaaccagcccctcggagttctacttcatgttccaacaagtacgagtcaagcctcaggactttgctgccattaccatcccacggtctaggggagaagcccgggttggggctggtttccggcctatgctgccctcccagggggctccacagcggcctctcagcaccttctcccctgcccccaaggccacactgatcctaaactccataggcagcctcagcaagctccggccccagcccctcaccttctcccctagttggggtggaccaaagagcctgcctgttcccgccccacctggggaaatggggaccacgccttctgctccaccacaacgcaatcggaggaaatctgttcaccgagtgttggcggaactggatgatgagagtgagcctcctgagaacccgccaccggtccttatggagcccaggaagaaactccgtgtagacaaagccccactgactcccactggaaatcgacgtggccgtcctcggaagtacccagtgagcgctcccatggctccccctgcagttgggggcggggagccctgtgcagctccttgttgctgcctgccccaggaagagacagtggcctgggttcagtgtgatggctgtgacgtctggttccatgtggcctgtgttggctgcagcatccaggctgccagggaggccgacttccgatgcccagggtgccgggctggcattcagacctaaggtccactgccaaggcaccatcggacacacctgcccatgagtagacacagcagcgagcaaataggtctgataaataccccccttcccttccctccccaggagggaatgactacagggaagaaggatggattgatgtggactcattcagggcctggagcagaccctggtggccaagacagaagagatggtttcctgccaaagatattgccacctccaggaaattgccagtgagctggaagttcccactattacaagccataaggccatgttgccatggacaccagaatatctgtagtcagagcacctatcagttgcaaaagccatgcctgcaaccgatggaaaatgtaagagggagttcttaaggttcttggtggcatcacccaaggcattctgggaaaacctagggcctggccccaaaacttccctactctgtggctagtcctgctgccaacaaaatcgtagcgacctggcttttcacagctttgcttttatttccaagtcaaggacaagccgcttcattcactcctgggcatttactcttcttgtgggtctgtgatattccttgctttccagggagaatgtgcttggcaaggtctggagaactaattcagaatcttaggggaaggggagagatggaaatacaaacctgcttactggaaaggtgcaaatatatgggttgagctggaggtaggaatacaggtaattaaggtttctagtttaagggaaaacagatctattgccatttaaataaggtaactgggatttggttaagttcacaaagatagcagaagatttatttacaggcttcacctgtactgtcagggcaagagaaagcctggtaaaccagctacagcagtttaccagtgtgatggctgtgacacagctccactccacgggtggacacagcagagggcaactgggctggcctggttcagtgtgaatcaaaccgcttaacccacacatggtacatgtgattttcttttgtgagccttacaccaagccaaactattgtcaaagcatcatttctatagaaataaagccttatcttgacctgttctattaaaacctgccacacccgccctttcctacctagatttaatgagcccaagtttttaaaatggaagaaatgactctggggcaaagacccctaatgaactagtggcagagccaggaataaaacttgagtaactaatgagtcacttatgggcagagtatgcaaaaaccttaagtggaaaccaaatagaccctggtatcaagaaagcacaaagtattaatagaagtttctggttggggtgatctaggttcaacagaaataagatgatttctaagtataaagccatttaagaattccagagtagggtgggaaagcaaaaagccagctctgaacaggtaacagctacatggtgactgagtctatgggcaaaagttcttgcatcacaggcttttgggaactagcctatcacagggccctgtacaaataaacttggctgcaatccca

SEQ ID NO: 192107 - DNA, 3040 bp, Homo sapiens
  Payload ID: 17961
  Gene Name: transcription factor 19
  ENST ID: ENST00000383526
  CDS Start-End: 504-1541
aggaggggtaggcgctgcccgcgcgcagaggccgcgcccctcctggccccggcttcttggctgtcaaacagatgcagcaacgtcggctcctgccgaggagcccaaggggtcccgggatccgccgcacaggctggcactgcttgaagaggaggctactcggagactgcgccgcgcggattggaggctccccaaatattttgcgatctgaggatccagctcaagtgaggtgccataggacgtgttcctgagtttgcattgcacggagaccttcctggaatttttcatttgcaagtcggcttaaccaattttgcattgagtcctaggctgcttgcactctgaatttgggctattcaggtagtgtgctcaaagttgaaaccgcatacagcacaactcaagtttgcatcagactgggaagcgaacttaagccagcggtgcgtggcccaggagtgggaaaggaaatggatgcctgaagtggaagaggtggtgcagagggggcaccgcccatgctgccctgcttccaactgctgcgcatagggggcggcaggggcggtgatctctacaccttccacccccccgccggggctggctgcacctatcgcttgggccacagggccgacctgtgtgatgtggccctgcggccccagcaggagcctggcctcatctctgggatccacgccgaactgcatgccgagccccggggtgatgactggagggtcagcctggaagaccacagcagccaaggtactttggtcaataatgtccgactcccaagaggtcacaggctggaattgagtgatggagacctcctgacctttggccctgaagggcccccaggaaccagcccctcggagttctacttcatgttccaacaagtacgagtcaagcctcaggactttgctgccattaccatcccacggtctaggggagaagcccgggttggggctggtttccggcctatgctgccctcccagggggctccacagcggcctctcagcaccttctcccctgcccccaaggccacactgatcctaaactccataggcagcctcagcaagctccggccccagcccctcaccttctcccctagttggggtggaccaaagagcctgcctgttcccgccccacctggggaagtggggaccacgccttctgctccaccccaacgcaatcggaggaaatctgttcaccgagtgttggcggaactggatgatgagagtgagcctcctgagaacccgccaccggtccttatggagcccaggaagaaactccgtgtagacaaagccccactgactcccactggaaatcgacgtggccgtcctcggaagtacccagtgagcgctcccatggctccccctgcagttgggggcggggagccctgtgcagctccttgttgctgcctgccccaggaagagacagtggcctgggttcagtgtgatggctgtgacgtctggttccatgtggcctgtgttggctgcagcatccaggctgccagggaggccgacttccgatgcccagggtgccgggctggcattcagacctaaggtccaccgccaaggcaccatcggacacacctgcccatgagtagacacagcagcgagcaaataggtctgataaataccccccttcccttccctccccaggagggaatgactacagggaagaaggatggattgatgtggactcattcagggcctggagcagaccctggtggccaagacagaagagatggtttcctgccaaagatattgccacctccaggaaattgccagtgagctggaagttcccactattacaagccataaggccatgttgccatggacaccagaatatctgtagtcagagcacctatcagttgcaaaagccatgcttgcaaccgatggaaaatgtaagagggagttcttaaggttcttggtggcatcacccaaggcattctgggaaaacctagggcctggccccaaaacttccctactctgtggctagtcctgctgccaacaaaatcgtagcgacctggcttttcacagctttgcttttatttccaagtcaaggacaagccgcttcattcactcctgggcatttactcttcttgtgggtctgtgatattccttgctttccagggagaatgtgcttggcaaggtctggagaactaattcagaatcttaggggaaggggagagatggaaatacaaacctgcttactggaaaggtgcaaatatatgggttgagctggaggtaggaatacaggtaattaaggtttctagtttaagggaaaacagatctattgccatttaaataaggtaactgggatttggttaagttcacaaagatagcagaagatttatttacaggcttcacctgtactgtcagggcaagagaaagcctggtaaaccagctacagcagtttaccagtgtgatggctgtgacacagctccactccacgggtggacacagcagagggcaactgggctggcctggttcagtgtgaatcaaaccgcttaacccacacatggtacatgtgattttcttttgtgagccttacaccaagccaaactattgtcaaagcatcatttctatagaaataaagccttatcttgacctgttctattaaaacctgccacatccgccctttcctacctagatttaatgagcccaagtttttttacatggaagaaatgactctggggcaaagacccctaatgaactagtggcagagccaggaataaaacttgagtaactaatgagtcacttatgggcagagtatgcaaaaaccttaagtggaaaccaaatagaccctggtatcaagaaagcacaaagtattaatagaagtttctggttggggtgatctaggttcaacagaaataagatgatttctaagtataaagccatttaagaattccagagtagggtgggaaagcaaaaagccagctctgaacaggtaacagctacatggtgactgagtctatgggcaaaagttcttgcatcacaggcttttgggaactagcctatcacagggccctgtacaaataaacttggctgcaatccca

SEQ ID NO: 192108 - DNA, 3291 bp, Homo sapiens
  Payload ID: 17961
  Gene Name: transcription factor 19
  ENST ID: ENST00000400401
  CDS Start-End: 755-1792
tccgaaggaggggtaggcgctgcccgcgcgcagaggccgcgcccctcctggccccggcttcttggctgtcaaacagatgcagcaacgtcggctcctgccgaggagcccaaggggtcccgggatccgccgcacaggctggcactgcttgaagaggaggctactcggagactgcgccgcgcggtggattcattgccctcggaggttcaaccagttatgagtgagggattggccagaagatcggggcgcaggcaagcaggagtgctctattaggataagcaagtttgacaggaagaagctactcttctccgaattacacagaggtgatgtgttcgtattgcacgtagacgtgtgtataacaggacctccttccccgcgccccgccaccccgacacacacaggagctgcctaaagtatccttgccttgcagattggaggctccccaaatattttgcgatctgaggatccagctcaagtgaggtgccataggacgtgttcctgagtttgcattgcacggagaccttcctggaatttttcatttgcaagtcggcttaaccaattttgcattgagtcctaggctgcttgcactctgaatttgggctattcaggtagtgtgctcaaagttgaaaccgcatacagcacaactcaagtttgcatcagactgggaagcgaacttaagccagcggtgcgtggcccaggagtgggaaaggaaatggatgcctgaagtggaagaggtggtgcagagggggcaccgcccatgctgccctgcttccaactgctgcgcatagggggcggcaggggcggtgatctctacaccttccacccccccgccggggctggctgcacctatcgcttgggccacagggccgacctgtgtgatgtggccctgcggccccagcaggagcctggcctcatctctgggatccacgccgaactgcatgccgagccccggggtgatgactggagggtcagcctggaagaccacagcagccaaggtactttggtcaataatgtccgactcccaagaggtcacaggctggaattgagtgatggagacctcctgacctttggccctgaagggcccccaggaaccagcccctcggagttctacttcatgttccaacaagtacgagtcaagcctcaggactttgctgccattaccatcccacggtctaggggagaagcccgggttggggctggtttccggcctatgctgccctcccagggggctccacagcggcctctcagcaccttctcccctgcccccaaggccacactgatcctaaactccataggcagcctcagcaagctccggccccagcccctcaccttctcccctagttggggtggaccaaagagcctgcctgttcccgccccacctggggaagtggggaccacgccttctgctccaccccaacgcaatcggaggaaatctgttcaccgagtgttggcggaactggatgatgagagtgagcctcctgagaacccgccaccggtccttatggagcccaggaagaaactccgtgtagacaaagccccactgactcccactggaaatcgacgtggccgtcctcggaagtacccagtgagcgctcccatggctccccctgcagttgggggcggggagccctgtgcagctccttgttgctgcctgccccaggaagagacagtggcctgggttcagtgtgatggctgtgacgtctggttccatgtggcctgtgttggctgcagcatccaggctgccagggaggccgacttccgatgcccagggtgccgggctggcattcagacctaaggtccaccgccaaggcaccatcggacacacctgcccatgagtagacacagcagcgagcaaataggtctgataaataccccccttcccttccctccccaggagggaatgactacagggaagaaggatggattgatgtggactcattcagggcctggagcagaccctggtggccaagacagaagagatggtttcctgccaaagatattgccacctccaggaaattgccagtgagctggaagttcccactattacaagccataaggccatgttgccatggacaccagaatatctgtagtcagagcacctatcagttgcaaaagccatgcttgcaaccgatggaaaatgtaagagggagttcttaaggttcttggtggcatcacccaaggcattctgggaaaacctagggcctggccccaaaacttccctactctgtggctagtcctgctgccaacaaaatcgtagcgacctggcttttcacagctttgcttttatttccaagtcaaggacaagccgcttcattcactcctgggcatttactcttcttgtgggtctgtgatattccttgctttccagggagaatgtgcttggcaaggtctggagaactaattcagaatcttaggggaaggggagagatggaaatacaaacctgcttactggaaaggtgcaaatatatgggttgagctggaggtaggaatacaggtaattaaggtttctagtttaagggaaaacagatctattgccatttaaataaggtaactgggatttggttaagttcacaaagatagcagaagatttatttacaggcttcacctgtactgtcagggcaagagaaagcctggtaaaccagctacagcagtttaccagtgtgatggctgtgacacagctccactccacgggtggacacagcagagggcaactgggctggcctggttcagtgtgaatcaaaccgcttaacccacacatggtacatgtgattttcttttgtgagccttacaccaagccaaactattgtcaaagcatcatttctatagaaataaagccttatcttgacctgttctattaaaacctgccacatccgccctttcctacctagatttaatgagcccaagtttttttacatggaagaaatgactctggggcaaagacccctaatgaactagtggcagagccaggaataaaacttgagtaactaatgagtcacttatgggcagagtatgcaaaaaccttaagtggaaaccaaatagaccctggtatcaagaaagcacaaagtattaatagaagtttctggttggggtgatctaggttcaacagaaataagatgatttctaagtataaagccatttaagaattccagagtagggtgggaaagcaaaaagccagctctgaacaggtaacagctacatggtgactgagtctatgggcaaaagttcttgcatcacaggcttttgggaactagcctatcacagggccctgtacaaataaacttggctgcaatccca

SEQ ID NO: 192109 - DNA, 2993 bp, Homo sapiens
  Payload ID: 17961
  Gene Name: transcription factor 19
  ENST ID: ENST00000428957
  CDS Start-End: 457-1494
cccggcttcttggctgtcaaacagatgcagcaacgtcggctcctgccgaggagcccaaggggtcccgggatccgccgcacaggctggcactgcttgaagaggaggctactcggagactgcgccgcgcggattggaggctccccaaatattttgtgatctgaggatccagctcaagtgaggtgccataggacgtgttcctgagtttgcattgcacggagaccttcctggaatttttcatttgcaagtcggcttaaccaattttgcattgagtcctaggctgcttgcactctgaatttgggctattcaggtagtgtgctcaaagttgaaaccgcatacagcacaactcaagtttgcatcagactgggaagcgaacttaagccagcggtgcgtggcccaggagtgggaaaggaaatggatgcctgaagtggaagaggtggtgcagagggggcaccgcccatgctgccctgcttccaactgctgcgcatagggggcggcaggggcggtgatctctacaccttccacccccccgccggggctggctgcacctatcgcttgggccacagggccgacctgtgtgatgtggccctgcggccccagcaggagcctggcctcatctctgggatccacgccgaactgcatgccgagccccggggtgatgactggagggtcagcctggaagaccacagcagccaaggtactttggtcaataatgtccgactcccaagaggtcacaggctggaattgagtgatggagacctcctgacctttggccctgaagggcccccaggaaccagcccctcggagttctacttcatgttccaacaagtacgagtcaagcctcaggactttgctgccattaccatcccacggtctaggggagaagcccgggttggggctggtttccggcctatgctgccctcccagggggctccacagcggcctctcagcaccttctcccctgcccccaaggccacactgatcctaaactccataggcagcctcagcaagctccggccccagcccctcaccttctcccctagttggggtggaccaaagagcctgcctgttcccgccccacctggggaagtggggaccacgccttctgctccaccccaacgcaatcggaggaaatctgttcaccgagtgttggcggaactggatgatgagagtgagcctcctgagaacccgccaccggtccttatggagcccaggaagaaactccgtgtagacaaagccccactgactcccactggaaatcgacgtggccgtcctcggaagtacccagtgagcgctcccatggctccccctgcagttgggggcggggagccctgtgcagctccttgttgctgcctgccccaggaagagacagtggcctgggttcagtgtgatggctgtgacgtctggttccatgtggcctgtgttggctgcagcatccaggctgccagggaggccgacttccgatgcccagggtgccgggctggcattcagacctaaggtccaccgccaaggcaccatcggacacacctgcccatgagtagacacagcagcgagcaaataggtctgataaataccccccttcccttccctccccaagagggaatgactacagggaagaaggatggattgatgtggactcattcagggcctggagcagaccctggtggccaagacagaagagatggtttcctgccaaagatattgccacctccaggaaattgccagtgagctggaagttcccactattacaagccataaggccatgttgccatggacaccagaatatctgtagtcagagcacctatcagttgcaaaagccatgcctgcaaccgatggaaaatgtaagagggagttcttaaggttcttggtggcatcacccaaggcattctgggaaaacctagggcctggccccaaaacttccctactctgtggctagtcctgctgccaacaaaatcgtagcgacctggcttttcacagctttgcttttatttccaagtcaaggacaagccgcttcattcactcctgggcatttactcttcttgtgggtctgtgatattccttgctttccagggagaatgtgcttggcaaggtctggagaactaattcagaatcttaggggaaggggagagatggaaatacaaacctgcttactggaaaggtgcaaatatatgggttgagctggaggtaggaatacaggtaattaaggtttctagtttaagggaaaacagatctattgccatttaaataaggtaactgggatttggttaagttcacaaagatagcagaagatttatttacaggcttcacctgtactgtcagggcaagagaaagcctggtaaaccagctacagcagtttaccagtgtgatggctgtgacacagctccactccacgggtggacacagcagagggcaactgggctggcctggttcagtgtgaatcaaaccgcttaacccacacatggtacatgtgattttcttttgtgagccttacaccaagccaaactattgtcaaagcatcatttctatagaaataaagccttatcttgacctgttctattaaaacctgccacatccgccctttcctacctagatttaatgagcccaagtttttttacatggaagaaatgactctggggcaaagacccctaatgaactagtggcagagccaggaataaaacttgagtaactaatgagtcacttatgggcagagtatgcaaaaaccttaagtggaaaccaaatagaccctggtatcaagaaagcacaaagtattaatagaagtttctggttggggtgatctaggttcaacagaaataagatgatttctaagtataaagccatttaagaattccagagtagggtgggaaagcaaaaagccagctctgaacaggtaacagctacatggtgactgagtctatgggcaaaagttcttgcatcacaggcttttgggaactagcctatcacagggccctgtacaaataaacttggctgcaatccca

SEQ ID NO: 192110 - DNA, 3040 bp, Homo sapiens
  Payload ID: 17961
  Gene Name: transcription factor 19
  ENST ID: ENST00000446042
  CDS Start-End: 504-1541
aggaggggtaggcgctgcccgcgcgcagaggccgcgcccctcctggccccggcttcttggctgtcaaacagatgcagcaacgtcggctcctgccgaggagcccaaggggtcccgggatccgccgcacaggctggcactgcttgaagaggaggctactcggagactgcgccgcgcggattggaggctccccaaatattttgtgatctgaggatccagctcaagtgaggtgccataggacgtgttcctgagtttgcattgcacggagaccttcctggaatttttcatttgcaagtcggcttaaccaattttgcattgagtcctaggctgcttgcactctgaatttgggctattcaggtagtgtgctcaaagttgaaaccgcatacagcacaactcaagtttgcatcagactgggaagcgaacttaagccagcggtgcgtggcccaggagtgggaaaggaaatggatgcctgaagtggaagaggtggtgcagagggggcaccgcccatgctgccctgcttccaactgctgcgcatagggggcggcaggggcggtgatctctacaccttccacccccccgccggggctggctgcacctatcgcttgggccacagggccgacctgtgtgatgtggccctgcggccccagcaggagcctggcctcatctctgggatccacgccgaactgcatgccgagccccggggtgatgactggagggtcagcctggaagaccacagcagccaaggtactttggtcaataatgtccgactcccaagaggtcacaggctggaattgagtgatggagacctcctgacctttggccctgaagggcccccaggaaccagcccctcggagttctacttcatgttccaacaagtacgagtcaagcctcaggactttgctgccattaccatcccacggtctaggggagaagcccgggttggggctggtttccggcctatgctgccctcccagggggctccacagcggcctctcagcaccttctcccctgcccccaaggccacactgatcctaaactccataggcagcctcagcaagctccggccccagcccctcaccttctcccctagttggggtggaccaaagagcctgcctgttcccgccccacctggggaagtggggaccacgccttctgctccaccccaacgcaatcggaggaaatctgttcaccgagtgttggcggaactggatgatgagagtgagcctcctgagaacccgccaccggtccttatggagcccaggaagaaactccgtgtagacaaagccccactgactcccactggaaatcgacgtggccgtcctcggaagtacccagtgagcgctcccatggctccccctgcagttgggggcggggagccctgtgcagctccttgttgctgcctgccccaggaagagacagtggcctgggttcagtgtgatggctgtgacgtctggttccatgtggcctgtgttggctgcagcatccaggctgccagggaggccgacttccgatgcccagggtgccgggctggcattcagacctaaggtccaccgccaaggcaccatcggacacacctgcccatgagtagacacagcagcgagcaaataggtctgataaataccccccttcccttccctccccaagagggaatgactacagggaagaaggatggattgatgtggactcattcagggcctggagcagaccctggtggccaagacagaagagatggtttcctgccaaagatattgccacctccaggaaattgccagtgagctggaagttcccactattacaagccataaggccatgttgccatggacaccagaatatctgtagtcagagcacctatcagttgcaaaagccatgcctgcaaccgatggaaaatgtaagagggagttcttaaggttcttggtggcatcacccaaggcattctgggaaaacctagggcctggccccaaaacttccctactctgtggctagtcctgctgccaacaaaatcgtagcgacctggcttttcacagctttgcttttatttccaagtcaaggacaagccgcttcattcactcctgggcatttactcttcttgtgggtctgtgatattccttgctttccagggagaatgtgcttggcaaggtctggagaactaattcagaatcttaggggaaggggagagatggaaatacaaacctgcttactggaaaggtgcaaatatatgggttgagctggaggtaggaatacaggtaattaaggtttctagtttaagggaaaacagatctattgccatttaaataaggtaactgggatttggttaagttcacaaagatagcagaagatttatttacaggcttcacctgtactgtcagggcaagagaaagcctggtaaaccagctacagcagtttaccagtgtgatggctgtgacacagctccactccacgggtggacacagcagagggcaactgggctggcctggttcagtgtgaatcaaaccgcttaacccacacatggtacatgtgattttcttttgtgagccttacaccaagccaaactattgtcaaagcatcatttctatagaaataaagccttatcttgacctgttctattaaaacctgccacatccgccctttcctacctagatttaatgagcccaagtttttttacatggaagaaatgactctggggcaaagacccctaatgaactagtggcagagccaggaataaaacttgagtaactaatgagtcacttatgggcagagtatgcaaaaaccttaagtggaaaccaaatagaccctggtatcaagaaagcacaaagtattaatagaagtttctggttggggtgatctaggttcaacagaaataagatgatttctaagtataaagccatttaagaattccagagtagggtgggaaagcaaaaagccagctctgaacaggtaacagctacatggtgactgagtctatgggcaaaagttcttgcatcacaggcttttgggaactagcctatcacagggccctgtacaaataaacttggctgcaatccca

SEQ ID NO: 192111 - DNA, 3291 bp, Homo sapiens
  Payload ID: 17961
  Gene Name: transcription factor 19
  ENST ID: ENST00000439112
  CDS Start-End: 755-1792
tccgaaggaggggtaggcgctgcccgcgcgcagaggccgcgcccctcctggccccggcttcttggctgtcaaacagatgcagcaacgtcggctcctgccgaggagcccaaggggtcccgggatccgccgcacaggctggcactgcttgaagaggaggctactcggagactgcgccgcgcggtggattcattgccctcggaggttcaaccagttatgagtgagggattggccagaagatcggggcgcaggcaagcaggagtgctctattaggataagcaagtttgacaggaagaagctgctcttctccgaattacacagaggtgatgtgttcgtattgcacgtagacgtgtgtataacaggacctccttccccgcgccccgccaccccgacacacacaggagctgcctaaagtatccttgccttgcagattggaggctccccaaatattttgtgatctgaggatccagctcaagtgaggtgccataggacgtgttcctgagtttgcattgcacggagaccttcctggaatttttcatttgcaagtcggcttaaccaattttgcattgagtcctaggctgcttgcactctgaatttgggctattcaggtagtgtgctcaaagttgaaaccgcatacagcacaactcaagtttgcatcagactgggaagcgaacttaagccagcggtgcgtggcccaggagtgggaaaggaaatggatgcctgaagtggaagaggtggtgcagagggggcaccgcccatgctgccctgcttccaactgctgcgcatagggggcggcaggggcggtgatctctacaccttccacccccccgccggggctggctgcacctatcgcttgggccacagggccgacctgtgtgatgtggccctgcggccccagcaggagcctggcctcatctctgggatccacgccgaactgcatgccgagccccggggtgatgactggagggtcagcctggaagaccacagcagccaaggtactttggtcaataatgtccgactcccaagaggtcacaggctggaattgagtgatggagacctcctgacctttggccctgaagggtccccaggaaccagcccctcggagttctacttcatgttccaacaagtacgagtcaagcctcaggactttgctgccattaccatcccacggtctaggggagaagcccgggttggggctggtttccggcctatgctgccctcccagggggctccacagcggcctctcagcaccttctcccctgcccccaaggccacactgatcctaaactccataggcagcctcagcaagctccggccccagcccctcaccttctcccctagttggggtggaccaaagagcctgcctgttcccgccccacctggggaagtggggaccacgccttctgctccaccccaacgcaatcggaggaaatctgttcaccgagtgttggcggaactggatgatgagagtgagcctcctgagaacccgccaccggtccttatggagcccaggaagaaactccgtgtagacaaagccccactgactcccactggaaatcgacgtggccgtcctcggaagtacccagtgagcgctcccatggctccccctgcagttgggggcggggagccctgtgcagctccttgttgctgcctgccccaggaagagacagtggcctgggttcagtgtgatggctgtgacgtctggttccatgtggcctgtgttggctgcagcatccaggctgccagggaggccgacttccgatgcccagggtgccgggctggcattcagacctaaggtccaccgccaaggcaccatcggacacacctgcccatgagtagacacagcagcgagcaaataggtctgataaataccccccttcccttccctccccaagagggaatgactacagggaagaaggatggattgatgtggactcattcagggcctggagcagaccctggtggccaagacagaagagatggtttcctgccaaagatattgccacctccaggaaattgccagtgagctggaagttcccactattacaagccataaggccatgttgccatggacaccagaatatctgtagtcagagcacctatcagttgcaaaagccatgcctgcaaccgatggaaaatgtaagagggagttcttaaggttcttggtggcatcacccaaggcattctgggaaaacctagggcctggccccaaaacttccctactctgtggctagtcctgctgccaacaaaatcgtagcgacctggcttttcacagctttgcttttatttccaagtcaaggacaagccgcttcattcactcctgggcatttactcttcttgtgggtctgtgatattccttgctttccagggagaatgtgcttggcaaggtctggagaactaattcagaatcttaggggaaggggagagatggaaatacaaacctgcttactggaaaggtgcaaatatatgggttgagctggaggtaggaatacaggtaattaaggtttctagtttaagggaaaacagatctattgccatttaaataaggtaactgggatttggttaagttcacaaagatagcagaagatttatttacaggcttcacctgtactgtcagggcaagagaaagcctggtaaaccagctacagcagtttaccagtgtgatggctgtgacacagctccactccacgggtggacacagcagagggcaactgggctggcctggttcagtgtgaatcaaaccgcttaacccacacatggtacatgtgattttcttttgtgagccttacaccaagccaaactattgtcaaagcatcatttctatagaaataaagccttatcttgacctgttctattaaaacctgccacatccgccctttcctacctagatttaatgagcccaagtttttttacatggaagaaatgactctggggcaaagacccctaatgaactagtggcagagccaggaataaaacttgagtaactaatgagtcacttatgggcagagtatgcaaaaaccttaagtggaaaccaaatagaccctggtatcaagaaagcacaaagtattaatagaagtttctggttggggtgatctaggttcaacagaaataagatgatttctaagtataaagccatttaagaattccagagtagggtgggaaagcaaaaagccagctctgaacaggtaacagctacatggtgactgagtctatgggcaaaagttcttgcatcacaggcttttgggaactagcctatcacagggccctgtacaaataaacttggctgcaatccca

SEQ ID NO: 192112 - DNA, 3281 bp, Homo sapiens
  Payload ID: 17961
  Gene Name: transcription factor 19
  ENST ID: ENST00000441405
  CDS Start-End: 745-1782
gggtaggcgctgcccgcgcgcagaggccgcgcccctcctggccccggcttcttggctgtcaaacagatgcagcaacgtcggctcctgccgaggagcccaaggggtcccgggatccgccgcacaggctggcactgcttgaagaggaggctactcggagactgcgccgcgcggtggattcattgccctcggaggttcaaccagttatgagtgagggattggccagaagatcggggcgcaggcaagcaggagtgctctattaggataagcaagtttgacaggaagaagctgctcttctccgaattacacagaggtgatgtgttcgtattgcacgtagacgtgtgtataacaggacctccttccccgcgccccgccaccccgacacacacaggagctgcctaaagtatccttgccttgcagattggaggctccccaaatattttgtgatctgaggatccagctcaagtgaggtgccataggacgtgttcctgagtttgcattgcacggagaccttcctggaatttttcatttgcaagtcggcttaaccaattttgcattgagtcctaggctgcttgcactctgaatttgggctattcaggtagtgtgctcaaagttgaaaccgcatacagcacaactcaagtttgcatcagactgggaagcgaacttaagccagcggtgcgtggcccaggagtgggaaaggaaatggatgcctgaagtggaagaggtggtgcagagggggcaccgcccatgctgccctgcttccaactgctgcgcatagggggcggcaggggcggtgatctctacaccttccacccccccgccggggctggctgcacctatcgcttgggccacagggccgacctgtgtgatgtggccctgcggccccagcaggagcctggcctcatctctgggatccacgccgaactgcatgccgagccccggggtgatgactggagggtcagcctggaagaccacagcagccaaggtactttggtcaataatgtccgactcccaagaggtcacaggctggaattgagtgatggagacctcctgacctttggccctgaagggcccccaggaaccagcccctcggagttctacttcatgttccaacaagtacgagtcaagcctcaggactttgctgccattaccatcccacggtctaggggagaagcccgggttggggctggtttccggcctatgctgccctcccagggggctccacagcggcctctcagcaccttctcccctgcccccaaggccacactgatcctaaactccataggcagcctcagcaagctccggccccagcccctcaccttctcccctagttggggtggaccaaagagcctgcctgttcccgccccacctggggaagtggggaccacgccttctgctccaccccaacgcaatcggaggaaatctgttcaccgagtgttggcggaactggatgatgagagtgagcctcctgagaacccgccaccggtccttatggagcccaggaagaaactccgtgtagacaaagccccactgactcccactggaaatcgacgtggccgtcctcggaagtacccagtgagcgctcccatggctccccctgcagttgggggcggggagccctgtgcagctccttgttgctgcctgccccaggaagagacagtggcctgggttcagtgtgatggctgtgacgtctggttccatgtggcctgtgttggctgcagcatccaggctgccagggaggccgacttccgatgcccagggtgccgggctggcattcagacctaaggtccaccgccaaggcaccatcggacacacctgcccatgagtagacacagcagcgagcaaataggtctgataaataccccccttcccttccctccccaagagggaatgactacagggaagaaggatggattgatgtggactcattcagggcctggagcagaccctggtggccaagacagaagagatggtttcctgccaaagatattgccacctccaggaaattgccagtgagctggaagttcccactattacaagccataaggccatgttgccatggacaccagaatatctgtagtcagagcacctatcagttgcaaaagccatgcctgcaaccgatggaaaatgtaagagggagttcttaaggttcttggtggcatcacccaaggcattctgggaaaacctagggcctggccccaaaacttccctactctgtggctagtcctgctgccaacaaaatcgtagcgacctggcttttcacagctttgcttttatttccaagtcaaggacaagccgcttcattcactcctgggcatttactcttcttgtgggtctgtgatattccttgctttccagggagaatgtgcttggcaaggtctggagaactaattcagaatcttaggggaaggggagagatggaaatacaaacctgcttactggaaaggtgcaaatatatgggttgagctggaggtaggaatacaggtaattaaggtttctagtttaagggaaaacagatctattgccatttaaataaggtaactgggatttggttaagttcacaaagatagcagaagatttatttacaggcttcacctgtactgtcagggcaagagaaagcctggtaaaccagctacagcagtttaccagtgtgatggctgtgacacagctccactccacgggtggacacagcagagggcaactgggctggcctggttcagtgtgaatcaaaccgcttaacccacacatggtacatgtgattttcttttgtgagccttacaccaagccaaactattgtcaaagcatcatttctatagaaataaagccttatcttgacctgttctattaaaacctgccacatccgccctttcctacctagatttaatgagcccaagtttttttacatggaagaaatgactctggggcaaagacccctaatgaactagtggcagagccaggaataaaacttgagtaactaatgagtcacttatgggcagagtatgcaaaaaccttaagtggaaaccaaatagaccctggtatcaagaaagcacaaagtattaatagaagtttctggttggggtgatctaggttcaacagaaataagatgatttctaagtataaagccatttaagaattccagagtagggtgggaaagcaaaaagccagctctgaacaggtaacagctacatggtgactgagtctatgggcaaaagttcttgcatcacaggcttttgggaactagcctatcacagggccctgtacaaataaacttggctgcaatccca

SEQ ID NO: 192113 - DNA, 3040 bp, Homo sapiens
  Payload ID: 17961
  Gene Name: transcription factor 19
  ENST ID: ENST00000453201
  CDS Start-End: 504-1541
aggaggggtaggcgctgcccgcgcgcagaggccgcgcccctcctggccccggcttcttggctgtcaaacagatgcagcaacgtcggctcctgccgaggagcccaaggggtcccgggatccgccgcacaggctggcactgcttgaagaggaggctactcggagactgcgccgcgcggattggaggctccccaaatattttgtgatctgaggatccagctcaagtgaggtgccataggacgtgttcctgagtttgcattgcacggagaccttcctggaatttttcatttgcaagtcggcttaaccaattttgcattgagtcctaggctgcttgcactctgaatttgggctattcaggtagtgtgctcaaagttgaaaccgcatacagcacaactcaagtttgcatcagactgggaagcgaacttaagccagcggtgcgtggcccaggagtgggaaaggaaatggatgcctgaagtggaagaggtggtgcagagggggcaccgcccatgctgccctgcttccaactgctgcgcatagggggcggcaggggcggtgatctctacaccttccacccccccgccggggctggctgcacctatcgcttgggccacagggccgacctgtgtgatgtggccctgcggccccagcaggagcctggcctcatctctgggatccacgccgaactgcatgccgagccccggggtgatgactggagggtcagcctggaagaccacagcagccaaggtactttggtcaataatgtccgactcccaagaggtcacaggctggaattgagtgatggagacctcctgacctttggccctgaagggtccccaggaaccagcccctcggagttctacttcatgttccaacaagtacgagtcaagcctcaggactttgctgccattaccatcccacggtctaggggagaagcccgggttggggctggtttccggcctatgctgccctcccagggggctccacagcggcctctcagcaccttctcccctgcccccaaggccacactgatcctaaactccataggcagcctcagcaagctccggccccagcccctcaccttctcccctagttggggtggaccaaagagcctgcctgttcccgccccacctggggaagtggggaccacgccttctgctccaccccaacgcaatcggaggaaatctgttcaccgagtgttggcggaactggatgatgagagtgagcctcctgagaacccgccaccggtccttatggagcccaggaagaaactccgtgtagacaaagccccactgactcccactggaaatcgacgtggccgtcctcggaagtacccagtgagcgctcccatggctccccctgcagttgggggcggggagccctgtgcagctccttgttgctgcctgccccaggaagagacagtggcctgggttcagtgtgatggctgtgacgtctggttccatgtggcctgtgttggctgcagcatccaggctgccagggaggccgacttccgatgcccagggtgccgggctggcattcagacctaaggtccaccgccaaggcaccatcggacacacctgcccatgagtagacacagcagcgagcaaataggtctgataaataccccccttcccttccctccccaagagggaatgactacagggaagaaggatggattgatgtggactcattcagggcctggagcagaccctggtggccaagacagaagagatggtttcctgccaaagatattgccacctccaggaaattgccagtgagctggaagttcccactattacaagccataaggccatgttgccatggacaccagaatatctgtagtcagagcacctatcagttgcaaaagccatgcctgcaaccgatggaaaatgtaagagggagttcttaaggttcttggtggcatcacccaaggcattctgggaaaacctagggcctggccccaaaacttccctactctgtggctagtcctgctgccaacaaaatcgtagcgacctggcttttcacagctttgcttttatttccaagtcaaggacaagccgcttcattcactcctgggcatttactcttcttgtgggtctgtgatattccttgctttccagggagaatgtgcttggcaaggtctggagaactaattcagaatcttaggggaaggggagagatggaaatacaaacctgcttactggaaaggtgcaaatatatgggttgagctggaggtaggaatacaggtaattaaggtttctagtttaagggaaaacagatctattgccatttaaataaggtaactgggatttggttaagttcacaaagatagcagaagatttatttacaggcttcacctgtactgtcagggcaagagaaagcctggtaaaccagctacagcagtttaccagtgtgatggctgtgacacagctccactccacgggtggacacagcagagggcaactgggctggcctggttcagtgtgaatcaaaccgcttaacccacacatggtacatgtgattttcttttgtgagccttacaccaagccaaactattgtcaaagcatcatttctatagaaataaagccttatcttgacctgttctattaaaacctgccacatccgccctttcctacctagatttaatgagcccaagtttttttacatggaagaaatgactctggggcaaagacccctaatgaactagtggcagagccaggaataaaacttgagtaactaatgagtcacttatgggcagagtatgcaaaaaccttaagtggaaaccaaatagaccctggtatcaagaaagcacaaagtattaatagaagtttctggttggggtgatctaggttcaacagaaataagatgatttctaagtataaagccatttaagaattccagagtagggtgggaaagcaaaaagccagctctgaacaggtaacagctacatggtgactgagtctatgggcaaaagttcttgcatcacaggcttttgggaactagcctatcacagggccctgtacaaataaacttggctgcaatccca

SEQ ID NO: 192114 - DNA, 3291 bp, Homo sapiens
  Payload ID: 17961
  Gene Name: transcription factor 19
  ENST ID: ENST00000430947
  CDS Start-End: 755-1792
tccgaaggaggggtaggcgctgcccgcgcgcagaggccgcgcccctcctggccccggcttcttggctgtcaaacagatgcagcaacgtcggctcctgccgaggagcccaaggggtcccgggatccgccgcacaggctggcactgcttgaagaggaggctactcggagactgcgccgcgcggtggattcattgccctcggaggttcaaccagttatgagtgagggattggccagaagatcggggcgcaggcaagcaggagtgctctattaggataagcaagtttgacaggaagaagctgctcttctccgaattacacagaggtgatgtgttcgtattgcacgtagacgtgtgtataacaggacctccttccccgcgccccgccaccccgacacacacaggagctgcctaaagtatccttgccttgcagattggaggctccccaaatattttgtgatctgaggatccagctcaagtgaggtgccataggacgtgttcctgagtttgcattgcacggagaccttcctggaatttttcatttgcaagtcggcttaaccaattttgcattgagtcctaggctgcttgcactctgaatttgggctattcaggtagtgtgctcaaagttgaaaccgcatacagcacaactcaagtttgcatcagactgggaagcgaacttaagccagcggtgcgtggcccaggagtgggaaaggaaatggatgcctgaagtggaagaggtggtgcagagggggcaccgcccatgctgccctgcttccaactgctgcgcatagggggcggcaggggcggtgatctctacaccttccacccccccgccggggctggctgcacctatcgcttgggccacagggccgacctgtgtgatgtggccctgcggccccagcaggagcctggcctcatctctgggatccacgccgaactgcatgccgagccccggggtgatgactggagggtcagcctggaagaccacagcagccaaggtactttggtcaataatgtccgactcccaagaggtcacaggctggaattgagtgatggagacctcctgacctttggccctgaagggcccccaggaaccagcccctcggagttctacttcatgttccaacaagtacgagtcaagcctcaggactttgctgccattaccatcccacggtctaggggagaagcccgggttggggctggtttccggcctatgctgccctcccagggggctccacagcggcctctcagcaccttctcccctgcccccaaggccacactgatcctaaactccataggcagcctcagcaagctccggccccagcccctcaccttctcccctagttggggtggaccaaagagcctgcctgttcccgccccacctggggaagtggggaccacgccttctgctccaccccaacgcaatcggaggaaatctgttcaccgagtgttggcggaactggatgatgagagtgagcctcctgagaacccgccaccggtccttatggagcccaggaagaaactccgtgtagacaaagccccactgactcccactggaaatcgacgtggccgtcctcggaagtacccagtgagcgctcccatggctccccctgcagttgggggcggggagccctgtgcagctccttgttgctgcctgccccaggaagagacagtggcctgggttcagtgtgatggctgtgacgtctggttccatgtggcctgtgttggctgcagcatccaggctgccagggaggccgacttccgatgcccagggtgccgggctggcattcagacctaaggtccaccgccaaggcaccatcggacacacctgcccatgagtagacacagcagcgagcaaataggtctgataaataccccccttcccttccctccccaagagggaatgactacagggaagaaggatggattgatgtggactcattcagggcctggagcagaccctggtggccaagacagaagagatggtttcctgccaaagatattgccacctccaggaaattgccagtgagctggaagttcccactattacaagccataaggccatgttgccatggacaccagaatatctgtagtcagagcacctatcagttgcaaaagccatgcctgcaaccgatggaaaatgtaagagggagttcttaaggttcttggtggcatcacccaaggcattctgggaaaacctagggcctggccccaaaacttccctactctgtggctagtcctgctgccaacaaaatcgtagcgacctggcttttcacagctttgcttttatttccaagtcaaggacaagccgcttcattcactcctgggcatttactcttcttgtgggtctgtgatattccttgctttccagggagaatgtgcttggcaaggtctggagaactaattcagaatcttaggggaaggggagagatggaaatacaaacctgcttactggaaaggtgcaaatatatgggttgagctggaggtaggaatacaggtaattaaggtttctagtttaagggaaaacagatctattgccatttaaataaggtaactgggatttggttaagttcacaaagatagcagaagatttatttacaggcttcacctgtactgtcagggcaagagaaagcctggtaaaccagctacagcagtttaccagtgtgatggctgtgacacagctccactccacgggtggacacagcagagggcaactgggctggcctggttcagtgtgaatcaaaccgcttaacccacacatggtacatgtgattttcttttgtgagccttacaccaagccaaactattgtcaaagcatcatttctatagaaataaagccttatcttgacctgttctattaaaacctgccacatccgccctttcctacctagatttaatgagcccaagtttttttacatggaagaaatgactctggggcaaagacccctaatgaactagtggcagagccaggaataaaacttgagtaactaatgagtcacttatgggcagagtatgcaaaaaccttaagtggaaaccaaatagaccctggtatcaagaaagcacaaagtattaatagaagtttctggttggggtgatctaggttcaacagaaataagatgatttctaagtataaagccatttaagaattccagagtagggtgggaaagcaaaaagccagctctgaacaggtaacagctacatggtgactgagtctatgggcaaaagttcttgcatcacaggcttttgggaactagcctatcacagggccctgtacaaataaacttggctgcaatccca

SEQ ID NO: 192115 - DNA, 3291 bp, Homo sapiens; identical to SEQ ID NO: 192108
  Payload ID: 17961
  Gene Name: transcription factor 19
  ENST ID: ENST00000446038
  CDS Start-End: 755-1792

SEQ ID NO: 192116 - DNA, 3040 bp, Homo sapiens; identical to SEQ ID NO: 192107
  Payload ID: 17961
  Gene Name: transcription factor 19
  ENST ID: ENST00000416433
  CDS Start-End: 504-1541

SEQ ID NO: 192117 - DNA, 2993 bp, Homo sapiens; identical to SEQ ID NO: 192109
  Payload ID: 17961
  Gene Name: transcription factor 19
  ENST ID: ENST00000449558
  CDS Start-End: 457-1494

SEQ ID NO: 192118 - DNA, 3281 bp, Homo sapiens; identical to SEQ ID NO: 192112
  Payload ID: 17961
  Gene Name: transcription factor 19
  ENST ID: ENST00000442190
  CDS Start-End: 745-1782

SEQ ID NO: 192119 - DNA, 805 bp, Homo sapiens
  Payload ID: 17961
  Gene Name: transcription factor 19
  ENST ID: ENST00000542218
  CDS Start-End: 1-654
actttggtcaataatgtccgactcccaagaggtcacaggctggaattgagtgatggagacctcctgacctttggccctgaagggcccccaggaaccagcccctcggagttctacttcatgttccaacaagtacgagtcaagcctcaggactttgctgccattaccatcccacggtctaggggagaagcccgggttggggctggtttccggcctatgctgccctcccagggggctccacagcggcctctcagcaccttctcccctgcccccaaggccacactgatcctaaactccataggcagcctcagcaagctccggccccagcccctcaccttctcccctagttggggtggaccaaagagcctgcctgttcccgccccacctggggaaatggggaccacgccttctgctccaccacaacgcaatcggaggaaatctgttcaccgagtgttggcggaactggatgatgagagtgagcctcctgagaacccgccaccggtccttatggagcccaggaagaaactccgtgtagacaaagccccactgactcccactggaaactggcacatccaagggatgcagagcatcgtgaaaggacagaaagagagaccctggcctcgagaacacctgtcaggttatgaagaggcatcctaattgatttttaaattcaagagatttatcgagcaccttctataagccagcggctatacaaagtggacaaagagccctgacatccagcatgacagaagtgctatttggcacttgttcttcaagttgcccacttggatctcttccaagtgcactt

SEQ ID NO: 192120 - DNA, 6237 bp, Homo sapiens
  Payload ID: 17962
  Gene Name: transcription factor 20 (AR1)
  Uniprot ID: Q9UGU0
  ENST ID: ENST00000335626
  CDS Start-End: 136-5952
tgggcctctgattcatctttattccctccatcatctagacttgattttatttgtaccaaggagatgcgtgtctaatgtttttctttcttctatttctaggagggctgttggcctgctgctgtgctgctgaacagtatgcagtcctttcgggagcaaagcagttaccacggaaaccagcaaagctacccacaggaggtacacggctcatcccggctagaagagttcagccctcgtcaggcccagatgttccagaattttggaggtacaggtggcagtagtggcagcagtggcagtggcagtggtggtggacgacgaggagcagcagctgctgcggcagcgatggctagcgagacctctggccatcaaggttaccagggtttcaggaaagaggctggagatttttactacatggcaggcaacaaagaccccgtgactacaggaaccccacagcctcctcagcgaaggccttctgggcctgtgcagagctatggacccccccaggggagcagctttggcaatcagtatgggagtgagggtcatgtgggccagtttcaagcacagcactctggccttggcggtgtgtcacattatcagcaggattacactgggcctttctctccagggagtgctcagtaccaacagcaggcttccagccagcagcagcagcagcaagtccagcagttgagacaacagctttaccagtcccatcagcccctgccacaggccactggccaaccagcatccagctcatcccatctacagccaatgcagcggccctcaactctgccatcctctgctgctggttaccagttaagagtgggtcagtttggccaacactatcagtcttctgcttcctcctcctcctcctcctccttcccttcaccacagcgttttagccagtctggacagagctatgatggcagttacaatgtgaatgctggatctcagtatgaaggacacaatgtgggttctaatgcacaggcttatggaacacaatccaattacagctatcagcctcaatctatgaagaattttgaacaggcaaagattccacaagggacccaacaggggcagcagcagcagcaaccgcagcaacaacaacacccttctcagcatgtgatgcagtatactaacgctgccaccaagctgcccctgcaaagccaagtggggcagtacaaccagcctgaggttcctgtgaggtcccccatgcagtttcaccagaacttcagccccatttctaacccttctccagctgcctctgtggttcagtctccaagctgtagttctaccccatctcctctcatgcagactggggagaatctccagtgtgggcaaggcagtgtgcctatgggttccagaaacagaattttacagttaatgcctcaactcagtccaaccccatcaatgatgcccagtcctaattctcatgctgcaggcttcaaagggtttggactagaaggggtaccagaaaagcgactgacagatcctgggttgagtagtttgagtgctctgagtactcaagtggccaatcttcctaacactgtccagcacatgttactttctgatgccctgactcctcagaagaagacctccaagaggccctcatcttccaagaaagcagatagctgcacaaattctgaaggctcctcacaacctgaagaacagctgaagtcccctatggcagagtcattagatggaggctgctccagcagttcagaggatcaaggcgagagagtgcggcaactaagtggccagagcaccagctctgacaccacctacaagggtggagcctctgagaaagctggctcctcaccggcacaaggtgctcagaatgaaccccccagactcaatgctagtcctgccgcaagagaagaggccacctcaccaggcgctaaggacatgccattgtcatccgacgggaacccaaaggttaatgagaagactgttggggtgattgtctcccgggaagccatgacaggtcgggtagaaaagcctggtggacaagataaaggctcccaagaggatgatcctgcagccactcaaaggccacctagcaatggtggggcaaaggaaaccagtcatgcatcacttccccagccagagcctccaggaggaggagggagcaaaggaaacaagaatggcgataacaactccaaccataatggagaaggaaatggccagagtggccactctgcagcgggccctggttttacgagcagaactgagcctagcaaatctcctggaagtctgcgctatagttacaaagatagtttcgggtcagccgtgccacgaaatgtcagtggctttcctcagtatcctacagggcaagaaaagggagatttcactggccatggggaacgaaagggtagaaatgaaaaattcccaagcctcctgcaggaagtgcttcagggttaccaccaccaccctgacaggagatattctaggagtactcaagagcatcaggggatggctggtagcctagaaggaaccacaaggcccaatgtcttggttagtcaaaccaatgaattagctagcaggggccttctgaacaaaagcattgggtctctattagaaaatccccactggggcccctgggaaaggaaatcaagcagcacagctcctgaaatgaaacagatcaatttgactgactatccaattcccagaaagtttgaaatagagcctcagtcatcagcacatgagcctgggggttccctctctgaaagaagatcagtgatctgtgatatttctccactaagacagattgtcagggacccaggggctcactcactgggacacatgagtgccgacaccagaattgggaggaatgaccgtctcaatccaactttaagtcagtcggtcattcttcctggtggtttggtgtccatggaaaccaagctgaaatcccagagcgggcagataaaagaggaagactttgaacagtctaaatctcaagctagtttcaacaacaagaaatctggagaccactgccatcctcctagcatcaagcatgagtcttaccgcggcaatgccagccctggagcagcaacccatgattccctttcagactatggcccgcaagacagcagacccacgccaatgcggcgggtccctggcagagttggtggtcgggagggcatgaggggtcggtccccttctcaatatcatgactttgcagaaaaattgaaaatgtctcctgggcggagcagaggcccagggggagaccctcatcacatgaatccacacatgaccttttcagagagggctaaccggagttctttacacactcccttttctcccaactcagaaaccctggcctctgcttatcatgcaaatactcgggctcatgcttatggggaccctaacgcaggtttgaattctcagctgcattataagagacagatgtaccaacagcaaccagaggagtataaagactggagcagcggttctgctcagggagtaattgctgcagcacagcacaggcaggaggggccacggaagagtccaaggcagcagcagtttcttgacagagtacggagccctctgaaaaatgacaaagatggtatgatgtatggcccaccagtggggacttaccatgaccccagtgcccaggaggctgggcgctgcctaatgtctagtgatggtctgcctaacaagggcatggaattaaagcatggctcccagaagttacaagaatcctgttgggatctttctcggcaaacttctccagccaaaagcagcggtcctccaggaatgtccagtcaaaaaaggtatgggccgccccatgagactgatggacatggactagctgaggctacacagtcatccaaacctggtagtgttatgctgagacttccaggccaggaggatcattcttctcaaaaccccttaatcatgaggaggcgtgttcgttcttttatctctcccattcccagtaagagacagtcacaagatgtaaagaacagtagcactgaagataaaggtcgcctccttcactcatcaaaagaaggcgctgataaagcattcaattcctatgcccatctttctcacagtcaggatatcaagtctatccctaagagagattcctccaaggaccttccaagtccagatagtagaaactgccctgctgttaccctcacaagccctgctaagaccaaaatactgcccccacggaaaggacggggattgaaattggaagctatagttcagaagattacatccccaaatattaggaggagcgcatcttcgaacagtgcggaggctgggggagacacggttacgcttgatgatatactgtctttgaagagtggtcctcctgaaggtgggagtgttgctgttcaggatgctgacatagagaagagaaaaggtgaggtggcttcggacctagtcagtccagcaaaccaggagttgcacgtagagaaacctcttccaaggtcttcagaagagtggcgtggcagcgtggatgacaaagtgaagacagagacacatgcagaaacagttactgccggaaaggaaccccctggtgccatgacatccacaacctcacagaagcctggtagtaaccaagggagaccagatggttccctgggtggaacagcacctttaatctttccagactcaaagaatgtacctccagtgggcatattggcccctgaggcaaaccccaaggctgaagagaaggagaacgatacagtgacgatttcaccgaagcaagagggtttccctccaaagggatatttcccatcaggaaagaagaaggggagacccattggtagtgtgaataagcaaaagaaacagcagcagccaccgcctccaccccctcagcccccacagataccagaaggttctgcagatggagagccaaagccaaaaaaacagaggcaaaggagggagagaaggaagcctggggcccagccgaggaagcgaaaaaccaaacaagcagttcccattgtggaaccccaagaacctgagatcaaactaaaatatgccacccagccactggataaaactgatgccaagaacaagtctttttacccttacatccatgtagtaaataagtgtgaacttggagccgtttgtacaatcatcaatgctgaggaagaagaacagaccaaattagtgaggggcaggaagggtcagaggtcactgacccctccacctagcagcactgaaagcaaggcgctcccggcctcgtcctttatgctgcagggacctgttgtgacagagtcttcggttatggggcacctggtttgctgtctgtgtggcaagtgggccagttaccggaacatgggtgacctctttggacctttttatccccaagattatgcagccactctcccgaagaatccacctcctaagagggccacagaaatgcagagcaaagttaaggtacggcacaaaagtgcttctaatggctccaagacggacactgaggaggaggaagagcagcagcagcagcagaaggagcagagaagcctggccgcacaccccaggtttaagcggcgccaccgctcggaagactgtggtggaggccctcggtccctgtccagggggctcccttgtaaaaaagcagccactgagggcagcagtgaaaagactgttttggactcgaagccctccgtgcccaccacttcagaaggtggccctgagctggagttacaaatccctgaactacctcttgacagcaatgaattttgggtccatgagggttgtattctctgggccaatggaatctacctggtttgtggcaggctctatggcctgcaggaagcgctggaaatagccagagagatgaaatgttcccactgccaggaggcaggcgccaccttgggctgctacaacaaaggctgctccttccgataccattacccgtgtgccattgatgcagattgtttgctacatgaggagaacttctcggtgaggtgccctaagcacaaggtgagactgtggagatgagaaggtggtggacactcgtgatggaatggaaatcgtcctaccgtgcagccacaccctgccctgccccgccccgccccgcccgcgtgcctgcccatgccagcacttccttaagttctcacatcacactcaaaccagtgacaccacaggaaagaaagacccaagacgttggaatggctgtttccatggacacaatctccatagtgacaatgtggggggaggggggaggggtgggatgatggggaaagggtggggggaattaaaagggagggataaatatatatatat

SEQ ID NO: 192121 - DNA, 7410 bp, Homo sapiens
  Payload ID: 17962
  Gene Name: transcription factor 20 (AR1)
  Uniprot ID: Q9UGU0
  ENST ID: ENST00000359486
  CDS Start-End: 138-6020
tctgggcctctgattcatctttattccctccatcatctagacttgattttatttgtaccaaggagatgcgtgtctaatgtttttctttcttctatttctaggagggctgttggcctgctgctgtgctgctgaacagtatgcagtcctttcgggagcaaagcagttaccacggaaaccagcaaagctacccacaggaggtacacggctcatcccggctagaagagttcagccctcgtcaggcccagatgttccagaattttggaggtacaggtggcagtagtggcagcagtggcagtggcagtggtggtggacgacgaggagcagcagctgctgcggcagcgatggctagcgagacctctggccatcaaggttaccagggtttcaggaaagaggctggagatttttactacatggcaggcaacaaagaccccgtgactacaggaaccccacagcctcctcagcgaaggccttctgggcctgtgcagagctatggacccccccaggggagcagctttggcaatcagtatgggagtgagggtcatgtgggccagtttcaagcacagcactctggccttggcggtgtgtcacattatcagcaggattacactgggcctttctctccagggagtgctcagtaccaacagcaggcttccagccagcagcagcagcagcaagtccagcagttgagacaacagctttaccagtcccatcagcccctgccacaggccactggccaaccagcatccagctcatcccatctacagccaatgcagcggccctcaactctgccatcctctgctgctggttaccagttaagagtgggtcagtttggccaacactatcagtcttctgcttcctcctcctcctcctcctccttcccttcaccacagcgttttagccagtctggacagagctatgatggcagttacaatgtgaatgctggatctcagtatgaaggacacaatgtgggttctaatgcacaggcttatggaacacaatccaattacagctatcagcctcaatctatgaagaattttgaacaggcaaagattccacaagggacccaacaggggcagcagcagcagcaaccgcagcaacaacaacacccttctcagcatgtgatgcagtatactaacgctgccaccaagctgcccctgcaaagccaagtggggcagtacaaccagcctgaggttcctgtgaggtcccccatgcagtttcaccagaacttcagccccatttctaacccttctccagctgcctctgtggttcagtctccaagctgtagttctaccccatctcctctcatgcagactggggagaatctccagtgtgggcaaggcagtgtgcctatgggttccagaaacagaattttacagttaatgcctcaactcagtccaaccccatcaatgatgcccagtcctaattctcatgctgcaggcttcaaagggtttggactagaaggggtaccagaaaagcgactgacagatcctgggttgagtagtttgagtgctctgagtactcaagtggccaatcttcctaacactgtccagcacatgttactttctgatgccctgactcctcagaagaagacctccaagaggccctcatcttccaagaaagcagatagctgcacaaattctgaaggctcctcacaacctgaagaacagctgaagtcccctatggcagagtcattagatggaggctgctccagcagttcagaggatcaaggcgagagagtgcggcaactaagtggccagagcaccagctctgacaccacctacaagggtggagcctctgagaaagctggctcctcaccggcacaaggtgctcagaatgaaccccccagactcaatgctagtcctgccgcaagagaagaggccacctcaccaggcgctaaggacatgccattgtcatccgacgggaacccaaaggttaatgagaagactgttggggtgattgtctcccgggaagccatgacaggtcgggtagaaaagcctggtggacaagataaaggctcccaagaggatgatcctgcagccactcaaaggccacctagcaatggtggggcaaaggaaaccagtcatgcatcacttccccagccagagcctccaggaggaggagggagcaaaggaaacaagaatggcgataacaactccaaccataatggagaaggaaatggccagagtggccactctgcagcgggccctggttttacgagcagaactgagcctagcaaatctcctggaagtctgcgctatagttacaaagatagtttcgggtcagccgtgccacgaaatgtcagtggctttcctcagtatcctacagggcaagaaaagggagatttcactggccatggggaacgaaagggtagaaatgaaaaattcccaagcctcctgcaggaagtgcttcagggttaccaccaccaccctgacaggagatattctaggagtactcaagagcatcaggggatggctggtagcctagaaggaaccacaaggcccaatgtcttggttagtcaaaccaatgaattagctagcaggggccttctgaacaaaagcattgggtctctattagaaaatccccactggggcccctgggaaaggaaatcaagcagcacagctcctgaaatgaaacagatcaatttgactgactatccaattcccagaaagtttgaaatagagcctcagtcatcagcacatgagcctgggggttccctctctgaaagaagatcagtgatctgtgatatttctccactaagacagattgtcagggacccaggggctcactcactgggacacatgagtgccgacaccagaattgggaggaatgaccgtctcaatccaactttaagtcagtcggtcattcttcctggtggtttggtgtccatggaaaccaagctgaaatcccagagcgggcagataaaagaggaagactttgaacagtctaaatctcaagctagtttcaacaacaagaaatctggagaccactgccatcctcctagcatcaagcatgagtcttaccgcggcaatgccagccctggagcagcaacccatgattccctttcagactatggcccgcaagacagcagacccacgccaatgcggcgggtccctggcagagttggtggtcgggagggcatgaggggtcggtccccttctcaatatcatgactttgcagaaaaattgaaaatgtctcctgggcggagcagaggcccagggggagaccctcatcacatgaatccacacatgaccttttcagagagggctaaccggagttctttacacactcccttttctcccaactcagaaaccctggcctctgcttatcatgcaaatactcgggctcatgcttatggggaccctaacgcaggtttgaattctcagctgcattataagagacagatgtaccaacagcaaccagaggagtataaagactggagcagcggttctgctcagggagtaattgctgcagcacagcacaggcaggaggggccacggaagagtccaaggcagcagcagtttcttgacagagtacggagccctctgaaaaatgacaaagatggtatgatgtatggcccaccagtggggacttaccatgaccccagtgcccaggaggctgggcgctgcctaatgtctagtgatggtctgcctaacaagggcatggaattaaagcatggctcccagaagttacaagaatcctgttgggatctttctcggcaaacttctccagccaaaagcagcggtcctccaggaatgtccagtcaaaaaaggtatgggccgccccatgagactgatggacatggactagctgaggctacacagtcatccaaacctggtagtgttatgctgagacttccaggccaggaggatcattcttctcaaaaccccttaatcatgaggaggcgtgttcgttcttttatctctcccattcccagtaagagacagtcacaagatgtaaagaacagtagcactgaagataaaggtcgcctccttcactcatcaaaagaaggcgctgataaagcattcaattcctatgcccatctttctcacagtcaggatatcaagtctatccctaagagagattcctccaaggaccttccaagtccagatagtagaaactgccctgctgttaccctcacaagccctgctaagaccaaaatactgcccccacggaaaggacggggattgaaattggaagctatagttcagaagattacatccccaaatattaggaggagcgcatcttcgaacagtgcggaggctgggggagacacggttacgcttgatgatatactgtctttgaagagtggtcctcctgaaggtgggagtgttgctgttcaggatgctgacatagagaagagaaaaggtgaggtggcttcggacctagtcagtccagcaaaccaggagttgcacgtagagaaacctcttccaaggtcttcagaagagtggcgtggcagcgtggatgacaaagtgaagacagagacacatgcagaaacagttactgccggaaaggaaccccctggtgccatgacatccacaacctcacagaagcctggtagtaaccaagggagaccagatggttccctgggtggaacagcacctttaatctttccagactcaaagaatgtacctccagtgggcatattggcccctgaggcaaaccccaaggctgaagagaaggagaacgatacagtgacgatttcaccgaagcaagagggtttccctccaaagggatatttcccatcaggaaagaagaaggggagacccattggtagtgtgaataagcaaaagaaacagcagcagccaccgcctccaccccctcagcccccacagataccagaaggttctgcagatggagagccaaagccaaaaaaacagaggcaaaggagggagagaaggaagcctggggcccagccgaggaagcgaaaaaccaaacaagcagttcccattgtggaaccccaagaacctgagatcaaactaaaatatgccacccagccactggataaaactgatgccaagaacaagtctttttacccttacatccatgtagtaaataagtgtgaacttggagccgtttgtacaatcatcaatgctgaggaagaagaacagaccaaattagtgaggggcaggaagggtcagaggtcactgacccctccacctagcagcactgaaagcaaggcgctcccggcctcgtcctttatgctgcagggacctgttgtgacagagtcttcggttatggggcacctggtttgctgtctgtgtggcaagtgggccagttaccggaacatgggtgacctctttggacctttttatccccaagattatgcagccactctcccgaagaatccacctcctaagagggccacagaaatgcagagcaaagttaaggtacggcacaaaagtgcttctaatggctccaagacggacactgaggaggaggaagagcagcagcagcagcagaaggagcagagaagcctggccgcacaccccaggtttaagcggcgccaccgctcggaagactgtggtggaggccctcggtccctgtccagggggctcccttgtaaaaaagcagccactgagggcagcagtgaaaagactgttttggactcgaagccctccgtgcccaccacttcagaaggtggccctgagctggagttacaaatccctgaactacctcttgacagcaatgaattttgggtccatgagggttgtattctctgggccaatggaatctacctggtttgtggcaggctctatggcctgcaggaagcgctggaaatagccagagagatgaaatgttcccactgccaggaggcaggcgccaccttgggctgctacaacaaaggctgctccttccgataccattacccgtgtgccattgatgcagattgtttgctacatgaggagaacttctcggtgaggtgccctaagcacaagcctccccttccgtgccctctcccccccttgcagaacaagaccgcgaaaggcagcctcagcacagagcagtcggagcgggggtgaggggggcagtgtgctcgtgggaatggaaaggacagcaagcacaggtgagactgtggagatgagaaggtggtggacactcgtgatggaatggaaatcgtcctaccgtgcagccacaccctgccctgccccgccccgccccgcccgcgtgcctgcccatgccagcacttccttaagttctcacatcacactcaaaccagtgacaccacaggaaagaaagacccaagacgttggaatggctgtttccatggacacaatctccatagtgacaatgtggggggaggggggaggggtgggatgatggggaaagggtggggggaattaaaagggagggataaatatatatatataaatctatttttagtctggaaagactttgtttaaatgaaaggtgcgctatcccttttgattctgttttaaaattatctcgttaaagatctccaaatttgttccgatgacaagtgaaatttaaatgtgagattgaactgaacaaaccctcatctcatgaaggacggggtgtgtgtgtggcgttgatctttagcctgtctcacaccagttcagaaaacactagacccaggattgaaaaagcaaaccacagcagaaccatccttttgtcattaatttgtctcaaagtgggaaggttttgggggagggggaaatacagggatggtccatgttttcaagagtaggggaatgatgtttaaacacaaaaataaattttttttcatttccagaaacactatttatttatggttttttttttttaattttttctttttgggggtgaaattggcagatgcctgaggtcatagctgtgtcctgggtcactgtggctggtgaggacctcaaggaccccatcaagtgtacacagcagcagcaaaatcaagggatgaccctcctctggggccccctgtcctcagcacattccaggcagctgtgccctgacccacagggacccgtggggatgggaggaggtccaggcctgtgttgccagagctggcagtgtgagctgtaggcagggacggggagggactgtcgctgtgatcagagtgggttaagctgaccaggaacacccatttaacccctttttctttttgctttcatttttataaaggaaaagaggacctgtcagataggcagccccatgctacgtgattctttatgttgtgttgttttgttttgtaaattgtataatttttaaatatctgagttttaaaaaaagaaaaaagtacaaaaaaatcttgttatggccttaagaaggggttagtgcatctttcaggggtcactctgccatggggataaaatagctgtttcacaaacagttttatttaaaaaaacaaaaaacaaaaaaaatcaaaaaatcaaaaaaataataaacttcattttaaccttg

SEQ ID NO: 192122 - DNA, 1058 bp, Homo sapiens
  Payload ID: 17962
  Gene Name: transcription factor 20 (AR1)
  ENST ID: ENST00000404876
  CDS Start-End: 1-753
atggggcacctggtttgctgtctgtgtggcaagtgggccagttaccggaacatgggtgacctctttggacctttttatccccaagattatgcagccactctcccgaagaatccacctcctaagagggccacagaaatgcagagcaaagttaaggtacggcacaaaagtgcttctaatggctccaagacggacactgaggaggaggaagagcagcagcagcagcagaaggagcagagaagcctggccgcacaccccaggtttaagcggcgccaccgctcggaagactgtggtggaggccctcggtccctgtccagggggctcccttgtaaaaaagcagccactgagggcagcagtgaaaagactgttttggactcgaagccctccgtgcccaccacttcagaaggtggccctgagctggagttacaaatccctgaactacctcttgacagcaatgaattttgggtccatgagggttgtattctctgggccaatggaatctacctggtttgtggcaggctctatggcctgcaggaagcgctggaaatagccagagagatgaaatgttcccactgccaggaggcaggcgccaccttgggctgctacaacaaaggctgctccttccgataccattacccgtgtgccattgatgcagattgtttgctacatgaggagaacttctcggtgaggtgccctaagcacaagaacaagaccgcgaaaggcagcctcagcacagagcagtcggagcgggggtgaggggggcagtgtgctcgtgggaatggaaaggacagcaagcacaggtgagactgtggagatgagaaggtggtggacactcgtgatggaatggaaatcgtcctaccgtgcagccacaccctgccctgccccgccccgccccgcccgcgtgcctgcccatgccagcacttccttaagttctcacatcacactcaaaccagtgacaccacaggaaagaaagacccaagacgttggaatggctgtttccatggacacaatctccatagtgacaatgtggggggaggggggaggggtgggatgatggggaa

SEQ ID NO: 192123 - DNA, 633 bp, Homo sapiens
  Payload ID: 17962
  Gene Name: transcription factor 20 (AR1)
  ENST ID: ENST00000515426
  CDS Start-End: 175-633
cggccgcggggcgcacggcccggagcgcgcggcccgcgcccccgcgcgccctgctcgcgcccgcgccccgcgctccggagcccggccccgctgcccgggctctcctgcgggaccgatgccggccctccggccgccagggagggctgttggcctgctgctgtgctgctgaacagtatgcagtcctttcgggagcaaagcagttaccacggaaaccagcaaagctacccacaggaggtacacggctcatcccggctagaagagttcagccctcgtcaggcccagatgttccagaattttggaggtacaggtggcagtagtggcagcagtggcagtggcagtggtggtggacgacgaggagcagcagctgctgcggcagcgatggctagcgagacctctggccatcaaggttaccagggtttcaggaaagaggctggagatttttactacatggcaggcaacaaagaccccgtgactacaggaaccccacagcctcctcagcgaaggccttctgggcctgtgcagagctatggacccccccaggggagcagctttggcaatcagtatgggagtgagggtcatgtgggccagtttcaagcacagcactctggccttggcggtgtgtcacattatcag

SEQ ID NO: 192124 - DNA, 1058 bp, Homo sapiens; identical to SEQ ID NO: 192122
  Payload ID: 17962
  Gene Name: transcription factor 20 (AR1)
  ENST ID: ENST00000574269
  CDS Start-End: 1-753

SEQ ID NO: 192125 - DNA, 7410 bp, Homo sapiens; identical to SEQ ID NO: 192121
  Payload ID: 17962
  Gene Name: transcription factor 20 (AR1)
  Uniprot ID: Q9UGU0
  ENST ID: ENST00000574943
  CDS Start-End: 138-6020

SEQ ID NO: 192126 - DNA, 6237 bp, Homo sapiens; identical to SEQ ID NO: 192120
  Payload ID: 17962
  Gene Name: transcription factor 20 (AR1)
  Uniprot ID: Q9UGU0
  ENST ID: ENST00000576946
  CDS Start-End: 136-5952

SEQ ID NO: 192127 - DNA, 495 bp, Homo sapiens
  Payload ID: 17962
  Gene Name: transcription factor 20 (AR1)
  ENST ID: ENST00000574164
  CDS Start-End: 37-495
gagggctgttggcctgctgctgtgctgctgaacagtatgcagtcctttcgggagcaaagcagttaccacggaaaccagcaaagctacccacaggaggtacacggctcatcccggctagaagagttcagccctcgtcaggcccagatgttccagaattttggaggtacaggtggcagtagtggcagcagtggcagtggcagtggtggtggacgacgaggagcagcagctgctgcggcagcgatggctagcgagacctctggccatcaaggttaccagggtttcaggaaagaggctggagatttttactacatggcaggcaacaaagaccccgtgactacaggaaccccacagcctcctcagcgaaggccttctgggcctgtgcagagctatggacccccccaggggagcagctttggcaatcagtatgggagtgagggtcatgtgggccagtttcaagcacagcactctggccttggcggtgtgtcacattatcag

SEQ ID NO: 192128 - DNA, 6237 bp, Homo sapiens; identical to SEQ ID NO: 192120
  Payload ID: 17962
  Gene Name: transcription factor 20 (AR1)
  Uniprot ID: Q9UGU0
  ENST ID: ENST00000619505
  CDS Start-End: 136-5952

SEQ ID NO: 192129 - DNA, 7410 bp, Homo sapiens; identical to SEQ ID NO: 192121
  Payload ID: 17962
  Gene Name: transcription factor 20 (AR1)
  Uniprot ID: Q9UGU0
  ENST ID: ENST00000621408
  CDS Start-End: 138-6020

SEQ ID NO: 192130 - DNA, 1058 bp, Homo sapiens; identical to SEQ ID NO: 192122
  Payload ID: 17962
  Gene Name: transcription factor 20 (AR1)
  ENST ID: ENST00000626821
  CDS Start-End: 1-753

SEQ ID NO: 192131 - DNA, 633 bp, Homo sapiens; identical to SEQ ID NO: 192123
  Payload ID: 17962
  Gene Name: transcription factor 20 (AR1)
  ENST ID: ENST00000628031
  CDS Start-End: 175-633

SEQ ID NO: 192132 - DNA, 6237 bp, Homo sapiens; identical to SEQ ID NO: 192120
  Payload ID: 17962
  Gene Name: transcription factor 20 (AR1)
  Uniprot ID: Q9UGU0
  ENST ID: ENST00000629538
  CDS Start-End: 136-5952

SEQ ID NO: 192133 - DNA, 1058 bp, Homo sapiens; identical to SEQ ID NO: 192122
  Payload ID: 17962
  Gene Name: transcription factor 20 (AR1)
  ENST ID: ENST00000631350
  CDS Start-End: 1-753

SEQ ID NO: 192134 - DNA, 495 bp, Homo sapiens; identical to SEQ ID NO: 192127
  Payload ID: 17962
  Gene Name: transcription factor 20 (AR1)
  ENST ID: ENST00000630841
  CDS Start-End: 37-495

SEQ ID NO: 192135 - DNA, 633 bp, Homo sapiens; identical to SEQ ID NO: 192123
  Payload ID: 17962
  Gene Name: transcription factor 20 (AR1)
  ENST ID: ENST00000630248
  CDS Start-End: 175-633

SEQ ID NO: 192136 - DNA, 7410 bp, Homo sapiens; identical to SEQ ID NO: 192121
  Payload ID: 17962
  Gene Name: transcription factor 20 (AR1)
  Uniprot ID: Q9UGU0
  ENST ID: ENST00000628774
  CDS Start-End: 138-6020

SEQ ID NO: 192137 - DNA, 7410 bp, Homo sapiens; identical to SEQ ID NO: 192121
  Payload ID: 17962
  Gene Name: transcription factor 20 (AR1)
  Uniprot ID: Q9UGU0
  ENST ID: ENST00000626726
  CDS Start-End: 138-6020

SEQ ID NO: 192138 - DNA, 6237 bp, Homo sapiens; identical to SEQ ID NO: 192120
  Payload ID: 17962
  Gene Name: transcription factor 20 (AR1)
  Uniprot ID: Q9UGU0
  ENST ID: ENST00000626486
  CDS Start-End: 136-5952

SEQ ID NO: 192139 - DNA, 1058 bp, Homo sapiens; identical to SEQ ID NO: 192122
  Payload ID: 17962
  Gene Name: transcription factor 20 (AR1)
  ENST ID: ENST00000627133
  CDS Start-End: 1-753

SEQ ID NO: 192140 - DNA, 633 bp, Homo sapiens; identical to SEQ ID NO: 192123
  Payload ID: 17962
  Gene Name: transcription factor 20 (AR1)
  ENST ID: ENST00000635187
  CDS Start-End: 175-633

SEQ ID NO: 192141 - DNA, 1058 bp, Homo sapiens; identical to SEQ ID NO: 192122
  Payload ID: 17962
  Gene Name: transcription factor 20 (AR1)
  ENST ID: ENST00000635629
  CDS Start-End: 1-753

SEQ ID NO: 192142 - DNA, 6237 bp, Homo sapiens; identical to SEQ ID NO: 192120
  Payload ID: 17962
  Gene Name: transcription factor 20 (AR1)
  ENST ID: ENST00000635421
  CDS Start-End: 136-5952

SEQ ID NO: 192143 - DNA, 6237 bp, Homo sapiens; identical to SEQ ID NO: 192120
  Payload ID: 17962
  Gene Name: transcription factor 20 (AR1)
  ENST ID: ENST00000634489
  CDS Start-End: 136-5952

SEQ ID NO: 192144 - DNA, 7410 bp, Homo sapiens; identical to SEQ ID NO: 192121
  Payload ID: 17962
  Gene Name: transcription factor 20 (AR1)
  ENST ID: ENST00000635146
  CDS Start-End: 138-6020

SEQ ID NO: 192145 - DNA, 1058 bp, Homo sapiens; identical to SEQ ID NO: 192122
  Payload ID: 17962
  Gene Name: transcription factor 20 (AR1)
  ENST ID: ENST00000634848
  CDS Start-End: 1-753

SEQ ID NO: 192146 - DNA, 633 bp, Homo sapiens; identical to SEQ ID NO: 192123
  Payload ID: 17962
  Gene Name: transcription factor 20 (AR1)
  ENST ID: ENST00000635601
  CDS Start-End: 175-633

SEQ ID NO: 192147 - DNA, 7410 bp, Homo sapiens; identical to SEQ ID NO: 192121
  Payload ID: 17962
  Gene Name: transcription factor 20 (AR1)
  ENST ID: ENST00000634616
  CDS Start-End: 138-6020

SEQ ID NO: 192148 - DNA, 3010 bp, Homo sapiens
  Payload ID: 17963
  Gene Name: transcription factor 21
  Uniprot ID: O43680
  ENST ID: ENST00000237316
  CDS Start-End: 64-603
cttcctcgctttctctgtctctctgtctctctctctctctctccctcgtccactcccccaaacatgtccaccggctccctcagcgatgtggaggaccttcaagaggtggagatgttggaatgtgacgggttgaaaatggattcgaacaaggaatttgtgacttccaacgagagcaccgaggagagctccaactgcgagaatgggtctccccagaagggccgcggcggcctgggcaagaggaggaaggcgcccaccaagaagagccccctgagcggggtcagccaggaggggaagcaggtccagcgcaacgccgccaacgcgcgagagcgggcccgcatgcgagtgctgagcaaggccttctccagactcaagaccaccctgccctgggtgccccccgacaccaagctctccaagctggacacgctcaggctggcgtccagctacatcgcccacttgaggcagatcctggctaacgacaaatacgagaacgggtacattcacccggtcaacctgacgtggccctttatggtggccgggaaacccgagagtgacctgaaagaagtggtgaccgcgagccgcttatgtggaaccaccgcgtcctgaccttggagtttggtacctggagcgagagcttctccgcccttccaccaaccccacaggccgcttcgcgggtggagccctctgcctggccatggaggaaggatcccgctaggctggtcccgactggagaagctgctctgccaggtgtgctctctgtcagcaatagtgacctcattaccaaggggtggcgaccacattaccaagcgcaattccccattctccaagggctgagaacttcggtgacttcatccacctgtctatttgcacatggaggacttttcaagatgtcaggatacccttccatcaccccaccaccgccaccccaacttgactttcaagaacacatttcaagctctggccagagtcccgttcctcaaattcatgtgttctctcctttctaccagagggatagagcccatgcctcaacctatccagagttcaaatcaaagagtccccagtgtgattcaattgattgcctttcacgtttcgcaaattttccaatctcccactcacgtttttacaaaacgaatgctctaaattctgaggattccaggcaggccatccatagagaaataactttttcttgctcattcccttacaaccccaatctatacatggatttttagaaagtcttcatggctatctatagttccctaccaataatttgaagcctttgctttaggcaggaggcatgtggctatgaatagggaacacgtagatttgaccctggttctgcatccaactagctgtttcttgaaagagcctggatcctcagttttcccatctctgcaagcagggataacggtaatgagaatgataataatcattatatgcagaccttcctctttcatcttacagaggcttagtgaggctcagatgagattatatctgtaaaatcccttggtaaaggaaaagctccgtgaaaatgtcagttacttttactaagtggcgggtagtgaattatctgtgcctagacccaaactgaaagtgtctcaggcaggaagttccaagggatgtatgtttatagcatccaggcaatgatctttttttttccacgaactaaaatacctctttttggtatctattgactctttctctctctctttctgtctctctttcaccttgcacctctccctaatgctctctaaatttgtccagagctttctttttcctagaaatccagagagcaaagtcagagcctggcacctgcagataggataacactggtgtctgatggtgaggctgcccagtcccatcaggagcctcagccaaggaggggcctgggcacactcaggtccccatggttgtccattgaatggagtgaggatcaaggtgggaatgactgggtggtggctgccactagcccaggaacatgacaacgtgaccacaccacacatgcctccaacacacacccacagtctaaacatctctccttctcagtgagcccttctcccattccagatcatcagcacacccacacccaccataggtctctctcctccggtcttcccagaagggtaaaactcccagcctaccctgctccagcttcagcccaggtagttggtgtgtctcaatatgaatagggggtgagtagcttcatagaaagaatggggaactcccttggcctcaagccagtatagtttggaagttgggggtcggggatgttaagggtggggagtatcctgcctgtgacctctaggttatgaaaactatcttagaaggtgcttttagaaagaaccaggagaacaaccaaagcagcttacagacgcctgaacggagaatgaagtgtttcaagtaagcgagtctgcaagttctcagaagcagacagatatccaatctggactgcagccagggaagtcctctctctcgctctctctctctctctctctctctctcattgcttgtatgacttcacaagcaactcaggatcattctagcaggctttcccactgtcaaacagagacttcattctaaaaagagaagtgataaacagagctccagctctgctagctctatatatttactgattagtggaaagcactgaccaaggagacttttaagccagtggttcttcagaatcacctagatgcctccaccctccagagatcctgagtccaggagtctgaagtggggccccaggtgatgtcattgctgctggtcccaggaccacattttaacaatcaatgttttcaggtgtctcatgaggaacactacttaatgcagtgggaaagaaaatatttcagaggagaattttttcttaaagaagctgcatattctggactctaatttagtttaattcactccaggatggcacgcaggattcctaattcttaaatgccattcagtctggacttcaaatcacttgtcttcagaaaataaaagatttgttccacccgggtgtgtggacatg

SEQ ID NO: 192149 - DNA, 4551 bp, Homo sapiens
  Payload ID: 17963
  Gene Name: transcription factor 21
  Uniprot ID: O43680
  ENST ID: ENST00000367882
  CDS Start-End: 261-800
ccacgactctgggagtggggaaacagagagccggttcctctgctgcagaagtcctcggggttccttctcacaactctgcgaaggggaaagggttgtgagacccaaccagaccccaactccagctcccagcaggaggtggctgcgccacactcgggaggcctcttggtttcagggtctctctgtctctctctcaccctcttcctcgctttctctgtctctctgtctctctctctctctctccctcgtccactcccccaaacatgtccaccggctccctcagcgatgtggaggaccttcaagaggtggagatgttggaatgtgacgggttgaaaatggattcgaacaaggaatttgtgacttccaacgagagcaccgaggagagctccaactgcgagaatgggtctccccagaagggccgcggcggcctgggcaagaggaggaaggcgcccaccaagaagagccccctgagcggggtcagccaggaggggaagcaggtccagcgcaacgccgccaacgcgcgagagcgggcccgcatgcgagtgctgagcaaggccttctccagactcaagaccaccctgccctgggtgccccccgacaccaagctctccaagctggacacgctcaggctggcgtccagctacatcgcccacttgaggcagatcctggctaacgacaaatacgagaacgggtacattcacccggtcaacctgacgtggccctttatggtggccgggaaacccgagagtgacctgaaagaagtggtgaccgcgagccgcttatgtggaaccaccgcgtcctgaccttggaggtgcgagtctgggaaaggcgcgctcccggggggagcgggccccgggaaggcgacccctgccctcagtgctctctgtctctgcttccccctcgcaatgctcctctctctgtcccaccccgcgagaacactttacaacgacgaggagattcgtttccaaaccagaggagatcaattgtacttacaaagattcccatctatttaactttattaacttctaccgtgaatgactctgcaagccttgctggtccaagtgcaatatgtaattataaatatataaatagataagagcctatcaatgtatcttttgtacaatatgttgtaaaatgtagatcataggatagctgactttgacagtcacatttataaagtaattcacttaaagatatatatttttttcaaacaagttttgctacttttgaaaataaatctttctttatattgctaaaagctctgatatttggagtgatttttaaaaatatttggaataagaaagtgggaaactatggggaagcttgataatgaaaatggttcttttaaacctcaatctaaacttctagagatagaagaaaattgcatatgagtttcataatgaagatgcagattatgttttatactgaaaccttaaaaaagaaatatatcggttacttttaaggctaatagaaattatataactgaaaacaaagaatgggcagtattaaagttatccacagttatacagttcaagagtaaaacgcaccagaaaaaggaaatccaattttcatggattccaccgtatgactgctgacacgggcgagaaagtaaactccaccttttgtcaccttccaggtgtgagcatagctgcaaactagtgaagaaataatagaagctatgaaagatgtaaattccataacccttagggtgtgtttcaggattttcaaagctctgcagcatacattatctacatttcttattaatagtccattaattaattctaacaataaacccgcatgcctgccttttggttgctgttagcgggtgcgtttagctcccgccacgacttccggcggactgggtttaatttaaacattttccaggctacggaacagctcctaagggaagattaagttgagataaacagagaagcaaggccgaggagcctgcgacccggctccctcactgccccagcgcagcccgcggcggccgatgcgccagatgccaccggggctgtttaatgttcggggttatgaccgcagtgtttacaagacgtcttcggttatttatactgttattcctcgcagagagccttgaaacttccgcttcatttgctctttcttttcgattttttacccttttttctcggcttagtttggtacctggagcgagagcttctccgcccttccaccaaccccacaggccgcttcgcgggtggagccctctgcctggccatggaggaaggatcccgctaggctggtcccgactggagaagctgctctgccaggtgtgctctctgtcagcaatagtgacctcattaccaaggggtggcgaccacattaccaagcgcaattccccattctccaagggctgagaacttcggtgacttcatccacctgtctatttgcacatggaggacttttcaagatgtcaggatacccttccatcaccccaccaccgccaccccaacttgactttcaagaacacatttcaagctctggccagagtcccgttcctcaaattcatgtgttctctcctttctaccagagggatagagcccatgcctcaacctatccagagttcaaatcaaagagtccccagtgtgattcaattgattgcctttcacgtttcgcaaattttccaatctcccactcacgtttttacaaaacgaatgctctaaattctgaggattccaggcaggccatccatagagaaataactttttcttgctcattcccttacaaccccaatctatacatggatttttagaaagtcttcatggctatctatagttccctaccaataatttgaagcctttgctttaggcaggaggcatgtggctatgaatagggaacacgtagatttgaccctggttctgcatccaactagctgtttcttgaaagagcctggatcctcagttttcccatctctgcaagcagggataacggtaatgagaatgataataatcattatatgcagaccttcctctttcatcttacagaggcttagtgaggctcagatgagattatatctgtaaaatcccttggtaaaggaaaagctccgtgaaaatgtcagttacttttactaagtggcgggtagtgaattatctgtgcctagacccaaactgaaagtgtctcaggcaggaagttccaagggatgtatgtttatagcatccaggcaatgatctttttttttccacgaactaaaatacctctttttggtatctattgactctttctctctctctttctgtctctctttcaccttgcacctctccctaatgctctctaaatttgtccagagctttctttttcctagaaatccagagagcaaagtcagagcctggcacctgcagataggataacactggtgtctgatggtgaggctgcccagtcccatcaggagcctcagccaaggaggggcctgggcacactcaggtccccatggttgtccattgaatggagtgaggatcaaggtgggaatgactgggtggtggctgccactagcccaggaacatgacaacgtgaccacaccacacatgcctccaacacacacccacagtctaaacatctctccttctcagtgagcccttctcccattccagatcatcagcacacccacacccaccataggtctctctcctccggtcttcccagaagggtaaaactcccagcctaccctgctccagcttcagcccaggtagttggtgtgtctcaatatgaatagggggtgagtagcttcatagaaagaatggggaactcccttggcctcaagccagtatagtttggaagttgggggtcggggatgttaagggtggggagtatcctgcctgtgacctctaggttatgaaaactatcttagaaggtgcttttagaaagaaccaggagaacaaccaaagcagcttacagacgcctgaacggagaatgaagtgtttcaagtaagcgagtctgcaagttctcagaagcagacagatatccaatctggactgcagccagggaagtcctctctctcgctctctctctctctctctctctctctcattgcttgtatgacttcacaagcaactcaggatcattctagcaggctttcccactgtcaaacagagacttcattctaaaaagagaagtgataaacagagctccagctctgctagctctatatatttactgattagtggaaagcactgaccaaggagacttttaagccagtggttcttcagaatcacctagatgcctccaccctccagagatcctgagtccaggagtctgaagtggggccccaggtgatgtcattgctgctggtcccaggaccacattttaacaatcaatgttttcaggtgtctcatgaggaacactacttaatgcagtgggaaagaaaatatttcagaggagaattttttcttaaagaagctgcatattctggactctaatttagtttaattcactccaggatggcacgcaggattcctaattcttaaatgccattcagtctggacttcaaatcacttgtcttcagaaaataaaagatttgttccacccgggtgtgtggacatg

SEQ ID NO: 192150 - DNA, 4882 bp, Homo sapiens
  Payload ID: 17964
  Gene Name: transcription factor 23
  Uniprot ID: Q7RTU1
  ENST ID: ENST00000296096
  CDS Start-End: 131-775
gagttggcgccagcttcctcggatgtagatattgctggctggatgaccagccacagccagctagcttgagtccaaggcctcctcaggcactgtgtttctgctctgtgggctgcagccccagtggggtggcatgtcacagaggaaggccagagggccaccagccatgccaggggtggggcatagccagactcaggccaaagcacggttgctgccaggcgctgacaggaagaggagccgcctcagcaggacaaggcaggacccgtgggaagaaagaagctggagcaaccagagatggagcagagctacccctggccctcgagggaccagggctgggggcctggctcttggcaggagcgaggccagtcctgagaatgccgcgcgggagcggagccgggtcaggacgctgcgccaggccttcttggccttgcaggctgctctgcctgccgtgccgcccgacaccaagctctccaagttggacgtgctggtgctcgccgccagctacatagcccacctcacccgcacactcggccacgagttgcctggccctgcctggccgcccttcctgcgtggactccgctacttgcaccctctcaagaagtggccgatgcgatctcgtctctatgctggaggcctggggtactccgatcttgactccaccacagccagcacccccagccaaagaacaagagatgcagaggtggggtcccaagtccctggagaggcagatgctctcctttccaccacaccactctcaccagctcttggtgacaaataattatcacactcgcccttttctcctagactgtgactcatgcttatgggcctggattttctaccagcccccagattctcagccatcagacttgactcagactcagctcccaagttccagcatgcagaccaagagaagcagtagcacttctgtgatggacagtacctagaggggcacaggttggagagcctcctccttggtccccaggaggggacttccccatggctcttctgtgacagctactgggaagtgggagagaaagaggtataattgggctcaaagttgaggtagggaaccaccctagctttcttcccctaaggtttctacaaaccctctgcagatagcaaaaaggcaggtgcagagggaggggcctgggatggcaccagccccaggtgctgatgggaaagccaggtggccggataggctcctggtagctccaagtgtaaacagatctgggctgggtcacacagccagaggggaaactgaagaaggaaatgtgctttctaactgcatcatgagatgcttacctgatgttagagagatagtgaggaattcaggattcctccctctgtagtatgggcctttccagaagctgcccctcaccactacattttctctccctctcggctcctgcactcttccactcttttcttttcttttcttttcttttcgtttcttcttctttttatgtagagatgggggtcttgatatgttgcccaggctggcctcgaacccctggcctcaagtgatcctcccacctcagcctcctaaagtgctgggattacaggcatgagccaccatgcccaaccccactgttttcttgacatgagttatatctacaggttaagccatacatcttgcattgcttacattccagtttccagagaaacttttagatagtcccagatgcctagtttgagatcttaaccagaagcaattctaccttaattgaaccaagcagcaacttatggccttaaatatgaaggatattgacagaatcaattacatccttgaaggaccttaagagaagatcaggtatatagggggtgatcattacagtcttctctttccattatgttagaaacctgccctcaagcaaaaacaagataggcctgccttcaactgctcaaccactcaattggctccttgtaaaatttgtgttcgaggcttccctggctctggagttatttctatagtctattagctccctagggccggctccgcctcatggagatcgtccttgggggctttctctaagtcctaccatggggtgccagaaatgtgatatagcttcggtgaaactcatctctggccctaaagaaataacttgaggactaatcatagaatctacacacactgaaaataactttccagatcggatgtagcctcaaacctggcacctgaagtccagatggaacaaattacctttcggttaaatttcagcccttcagagtgggaggggacgggcatgaccaactagagtcccaacaaggttatccttagacacacaccattgttgttatcatgaatgtaagtgagctctgggcaggctgggaatggttggggtctgggttctggcatgacaggaccctgtacctccacagggctggccagggcagagctgaaatagggctgggggtgcgactgagccagttgtggtagaggtagaaaaagagacacagaacatcccagccccgagctgcctgggatgtgggagaacagctggaatgtggatgggagccatggggagaaggcctcggccaaggctgaactcgtaaatctgccttgaaccacgtctctgcagagggaccctgaagagcttgtgcagagctgatgtgggcagctggacagggccaggcaggggcagaggccaggtgtgggagggcatgagcacagtgttcttcacaagaccataaaagtccagctagaatgtactatttttaaagccaaacagcagtatcttcctggttgagttcacgggagtgctaggaagagaagcagatacatttcctcctcagttggtggcacactttcctggggatgaagggaaattggcttggggtgtgtgtcggggtcctctggatagcatggagcttctcctgataatagagtagactttgggttggagcttgccccaccctgtcctgctcagactcaggcctttgcctagtaacattagagccctcaggggtgaccgcatggccctggtgtagacaaggagggcacaggaaggatgacgcaggtggagggctgcaggaggcaggtcccatcgctacaagtttctcagggtgtcttgggccctttccaggcaaagctgttctcctttgtgcccaggacagtcgaggggggtggggcagaggccatctcctccagccacagagacccagccccgtcaggccagcaagcaaaggggcctggcagggggcagggtgagccaagggaaggcctaggggatggatgggaataaccagaggatggactgggccctccctccctgacaagcacagtaatgcccttgagacatgtcaggacttggatgcgtgaatgaaccagaagtaacccgctttgtctctgcaatgagaaagaaaaacacagccaggctcagtggctcatgcctgtaatcccagcactttggggagtcgaggcgggcggatcatgaggtcaggagttcgagaccagcctcgccaacatgatgaaaccccttctttactaaaaatacaaaaattagccagatgtcgtagtgggcacctgtaatcctagctacttgggaggctgaggcaggagaattgcttgaacctaggaggcggaggttgcagtgagccaagatcacgccactgcactccagcctgggcgacagagcaagaccccatctcgggaaaaaaaaatgaaagaaaaaaaaagaaaagaaaagaaataaaagaaaatatggatgaaaacatttgagcatggatgacaaatgacactagggtggcctggctcaggagttggaggctcagctgctccataggggattggcctggcctacctggtcttcctgcaccacctgccccatccccaggacttgggattgggatggaggtggaggtggggaacaagacttccctgctggctccctccacagagcatgtgctttctgaggaacaggatggcagggtggaggcttagatggggctgtggggctgggtgtggtggctgatgcctgtaatcccagcactttgggaggccggggtcgggggtggatcatctgaggtcaggagttcaagaccagcctgaccaacatggtgaaaccctgtctctactaaaaatacgaaattagctgggtgtggtggcacatgcctataaccccagctacttgggaggctgaggcaggagaattgcttgatcccaggaggtggagtttgcagtgagctgagattgtgccattgcactccagcctgggcaacaagagtaaaactccgtctaaaaaaaaaaaaaaaatgcggctgtgggagaagcagagctggcccagtgatttctttttttttgttttttgagacagagtctcactctgtcaccgaggctggagcgcagtggcgtgatctcggctcactgcaagctccgcctcctgggttcacgcgattctcctgcctcagcctcccgagcagctgggactacaggcacccgccaacacgcccggctaatttttttttttttttgtatttttagtagagacggggtttcaccatgttagccaggatggtcttgatctcctgacctcgtgatccgcccgcctcggcctcccaaagtgctgggattacaggcatgagccaccgcacccggctggcccagtgatttctaagtaatacagtggacactggattttaccaaattgggaactagagaagtagaggatctagccttctctgagactccttttctcttcctctgggaggagcctggctagggtgagtcagatggcactgtcctctcccttttgtggcatgagccctaaacccagggcccctaaaagcttattctattctagatcaaggtaggcaaactatggccagtgggccaaacccagccccccatgtatttttgtaaataaagttttattggaacacatccaca

SEQ ID NO: 192151 - DNA, 2450 bp, Homo sapiens
  Payload ID: 17965
  Gene Name: transcription factor 24
  Uniprot ID: Q7RTU0
  ENST ID: ENST00000563496
  CDS Start-End: 397-900
agccgcctcagcccccggcgtagcctctccggtgggccaggtcctccgcccgacctgccttagccggtcggagcacacacgcctggccgcggggcgcccgcataaaagtcacagccagcggaggttggaaacagccgtcgacttgggcatcggccggacgaggatggagtgaccagcgcggccctggccacacaggccctgctccacgcccctcgcccgccctcacgacggagcggagctccactcagccgctccaggaaaggaagcccaagaactccggagttccgcaactctccccagacgtccggaagcaaatcgcgtcccaggcaaaacgagctcgcttgagagcgcccttagccccgttgggctgctgcgcgcgcggcgcgggaagctgccatggaccgcggccgcccagcgggcagccccctcagcgccagcgccgagcccgcgcccctggccgccgccatccgcgactcgcgtcccgggcggaccgggccggggccggcgggccctgggggcggctcgcgttccgggagcgggcggccggcggcggcgaatgcggcgcgggagcgcagccgggtgcagaccctgcggcacgctttcctggagctgcagcgcacgctgccgtccgtgccgcccgacaccaagctgtccaagctggacgtgctgctgctggccaccacctacatcgcgcatctcacccgcagcctgcaggacgacgccgaggcgccggcggacgccgggttgggcgccctgcgcggcgatggctacctgcacccggtcaagaaatggcccatgcgatcaagattgtacatcggtgctactggtcagtttctgaagcattctgtttctggagaaaaaacaaatcatgacaacactccaacagactcacagccttaggctctcccctggtgggggctggtagaagtggtggctattgtttttaaatactatgacataattctatatttattatatgagacataacaaaatttctgaaagtttacatgtgaacccatagttggatgttcaggtttatctgtctaaatgtggaatgaaataatcagtgttatataaaacacacagcttatctgttcagtgtgagagtcactactatatagtgcaagagaaattattagaaaaaagtcacatgaaagcaaacaattgtgtatatagctaaagaatgcaatatagatattgctatagtgtatctattacaaacagaaaagttcatatctattggtgcagtcttcctagtttaaaaagataaaaatctgtgtttataatatacgagtattccttttttgtgaaaaccatactgttcttaagttgatctaagacaccatttcaattgaagaaaactgttgcagtaatatgaagatgcaataaattcaataagtagttacttttccctcttagaaaacttgtttggagtattagaaatggtttgctcagaggacagggcttggtcaccttcctagagggttattctgtatcttacagtgtttgcaacttgtggaaggcactgggaatccctgcagtccagtgtgaacaggagaccaggtgtcagcggacagcagagttcacaatgtaggtgcatgtcaccacacctggctaattcttttattttttgtagagatggagtctcactgtgttgcctaggctactcttgaaatcctggctcaataaatcctcctgcctcacctaccaaagtgttgggattataggctagagccaccgtgcctggcccagttttattgttttaatgtgaatatactcataatgtgacagaagcatatctttttgcaagaaagatatataatagttctctacatattaatatgtagaaaagtacttgcatatttaaatatttgtaaacatatttacctactcatggaaagaaataaaaagtaaaatgagatttggattcagccattcactattataagttattgacataagaagtgctaaaaagaatctttatcctaaggaatgaaatcaaaacttcttcaaagttacctcaaactgaattgtaaacactaaatttaacagcaagaatttcagaaaaatgattttcttgctaataattcttaagatttattagtttggctagtttttaaagcatttaactggggaaaaaactatgtgttgaataattagatttctaagtcatcctgttaaatagttagtagagctttgcctttgatggtattactttttaattcttctcatccagttacaagttgtattaatgccaaagaagtgtatttgttacagattttcataacattttattaaattgctagatatgatgataggttttggtatgtttacagaggagaaattgcatattttcactcagattcaaaagagcatgctcttttaatgctttaatggtgaatggtcatgataagaggtattataaaaataaagtactaatttgaaaatta

SEQ ID NO: 192152 - DNA, 2233 bp, Homo sapiens
  Payload ID: 17966
  Gene Name: transcription factor 25 (basic helix-loop-helix)
  Uniprot ID: Q9BQ70
  ENST ID: ENST00000263346
  CDS Start-End: 57-2087
ccgagttttctgcgcttccttctccctctctccagacgtcgtggtcgttcggtcctatgtcgcgccgggccctccggaggctgaggggggaacagcgcggccaggagcccctcgggcccggcgccttgcatttcgatctccgtgatgacgatgacgcggaagaagaagggcccaagcgggagcttggtgtccggcgtcccgggggcgcagggaaggagggcgtccgagtcaacaaccgcttcgagctgataaacattgacgatcttgaggatgaccctgtggtgaacggggagaggtctggctgtgcgctcacagacgctgtggcaccagggaacaaaggaaggggtcagcgtggaaacacagagagcaagacggatggagatgacaccgagacagtgccctcagagcagtctcatgcaagtggcaaactccggaagaagaaaaaaaaacagaaaaacaagaaaagcagcacgggagaagcatcggaaaacggactagaagatatcgatcgcatcctagagaggattgaggacagcactgggttgaaccgtcccggcccagctcccctgagctccaggaagcacgttctctacgtggagcacagacacttgaatccagacacagaactgaaaaggtattttggtgcccgggcaatcctgggggagcaaaggccacggcagagacaacgtgtgtaccccaagtgcacatggctgaccacccctaaaagcacctggccccgctacagcaaaccaggtctgtccatgcggctgctggaatcaaaaaaaggcctctccttctttgcgtttgagcacagtgaggagtaccagcaggctcagcacaagttcctggtggccgtggagtctatggagccgaacaacatcgtggttctgctccagacgagcccttaccacgttgactcactcctgcagctcagcgatgcctgccgctttcaagaggatcaggagatggctcgagacctcgtagagagagcgctgtacagcatggaatgtgcgttccaccccctgttcagtctcaccagtggggcctgccggctggattaccgcagacccgagaacaggagcttctacctggccctctacaagcagatgagcttcctggagaagcgaggctgcccgcgcacggcgctggagtactgcaagctcatcctgagtctcgagccggatgaggaccccctctgcatgctgctgctcatcgaccacctggccttgcgggcccggaactacgagtacctgatccgcctcttccaggagtgggaggctcatcggaacctgtcccagctccctaattttgccttctctgttccactggcgtatttcctgctgagccagcagacagacctccctgagtgtgagcagagctctgccaggcagaaggcctctctcctgatacagcaggcgctcaccatgttccctggagtcctcctgcccctgctcgagtcttgcagtgtgcggcccgacgccagcgtttccagtcaccgcttctttggacccaatgctgaaataagccagccccctgccctgagccagctggtgaacctgtaccttgggaggtcacactttctctggaaagagcccgccaccatgagctggctggaggagaacgtccacgaggttctgcaagcagtggacgccggggacccagccgtggaagcctgtgagaaccggcggaaggtgctctaccagcgtgcacccaggaatatccaccgccatgtgatcctctctgagatcaaggaagccgtcgctgccctgcccccggacgtgaccacgcagtctgtgatggggtttgatcctctgcctccttcggacacaatctactcctacgtcaggccagagaggctaagtcctatcagccatggaaacaccattgctctcttcttccggtcactgttgccaaactataccatggagggggagaggcccgaggaaggagtggctgggggtctgaaccgcaaccagggcctgaacaggctgatgctggctgtgcgcgacatgatggccaacttccacctcaacgacctggaggcgccgcacgaggacgacgctgagggggagggggagtgggactgagcgtccgcagaggtgaccgaaaagccgtatgatgatgttcccgatttctctgttggtcggagtcggccagttgcctgaagtagggaagctgagtgtgtcgctccctggtccactgtttctcctataaatgtaaatgggtcacgctc

SEQ ID NO: 192153 - DNA, 2377 bp, Homo sapiens
  Payload ID: 17966
  Gene Name: transcription factor 25 (basic helix-loop-helix)
  ENST ID: ENST00000263347
  CDS Start-End: 788-2209
cgaagagtgcgcaggcgcgccgacagccgagttttctgcgcttccttctccctctctccagacgtcgtggtcgttcggtcctatgtcgcgccgggccctccggaggctgaggggggaacagcgcggccaggagcccctcgggcccggcgccttgcatttcgatctccgtgatgacgatgacgcggaagaagaagggcccaagcgggagcttggtgtccggcgtcccgggggcgcagggaaggagggcgtccgagtcaacaaccgcttcgagctgataaacattgacgatcttgaggatgaccctgtggtgaacggggagaggtctggctgtgcgctcacagacgctgtggcaccagggaacaaaggaaggggtcagcgtggaaacacagagagcaagacggatggagatgacaccgagacagtgccctcagagcagtctcatgcaagtggcaaactccggaagaagaaaaaaaaacagaaaaacaagaaaagcagcacgggagaagcatcggaaaacggactagaagatatcgatcgcatcctagagaggattgaggacagcactgggttgaaccgtcccggcccagctcccctgagctccaggaagcacgttctctacgtggagcacagacacttgaatccagacacagaactgaaaaggtattttggtgcccgggcaatcctgggggagcaaaggccacggcagagacaacgtgtgtaccccaagtgcacatggctgaccacccctaaaagcacctggccccgctacagcaaaccaggtctgtccatgcggctgctggaatcaaaaaaaggcctctccttctttgcgtttgagcacagtgaggagtaccagcaggctcagcacaagttcctggtggccgtggagtctatggagccgaacaacatcgtggttctgctccagacgagcccttaccacgttgactcactcctgcagctcagcgatgcctgccgctttcaagaggatcaggagatggctcgagacctcgtagagagagcgctgtacagcatggaatgtgcgttccaccccctgttcagtctcaccagtggggcctgccggctggattaccgcagacccgagaacaggagcttctacctggccctctacaagcagatgagcttcctggagaagcgaggctgcccgcgcacggcgctggagtactgcaagctcatcctgagtctcgagccggatgaggaccccctctgcatgctgctgctcatcgaccacctggccttgcgggcccggaactacgagtacctgatccgcctcttccaggagtgggaggctcatcggaacctgtcccagctccctaattttgccttctctgttccactggcgtatttcctgctgagccagcagacagacctccctgagtgtgagcagagctctgccaggcagaaggcctctctcctgatacagcaggcgctcaccatgttccctggagtcctcctgcccctgctcgagtcttgcagtgtgcggcccgacgccagcgtttccagtcaccgcttctttggacccaatgctgaaataagccagccccctgccctgagccagctggtgaacctgtaccttgggaggtcacactttctctggaaagagcccgccaccatgagctggctggaggagaacgtccacgaggttctgcaagcagtggacgccggggacccagccgtggaagcctgtgagaaccggcggaaggtgctctaccagcgtgcacccaggaatatccaccgccatgtgatcctctctgagatcaaggaagccgtcgctgccctgcccccggacgtgaccacgcagtctgtgatggggtttgatcctctgcctccttcggacacaatctactcctacgtcaggccagagaggaagggagaggaggagaggaacagtgttatttgggggtcacagctctgcgtttgcaggccacgttctttcccatctccaccgaatgtacaagcgcttgcgtgtcggcctctgtggcaggctaagtcctatcagccatggaaacaccattgctctcttcttccggtcactgttgccaaactataccatggagggggagaggcccgaggaaggagtggctgggggtctgaaccgcaaccagggcctgaacaggctgatgctggctgtgcgcgacatgatggccaacttccacctcaacgacctggaggcgccgcacgaggacgacgctgagggggagggggagtgggactgagcgtccgcagaggtgaccgaaaagccgtatgatgatgttcccgatttctctgttggtcggagtcggccagttgcctgaagtagggaagctgagtgtgtcgctccctggtccactgtttctcctataaatgtaaatgggtcacgctc

SEQ ID NO: 192154 - DNA, 655 bp, Homo sapiens
  Payload ID: 17966
  Gene Name: transcription factor 25 (basic helix-loop-helix)
  ENST ID: ENST00000565196
  CDS Start-End: 25-655
cagacgtcgtggtcgttcggtcctatgtcgcgccgggccctccggaggctgaggggggaacagcgcggccaggagcccctcgggcccggcgccttgcatttcgatctccgtgatgacgatgacgcggaagaagaagggcccaagcgggagcttggtgtccggcgtcccgggggcgcagggaaggagggcgtccgagtcaacaaccgcttcgagctgataaacattgacgatcttgaggatgaccctgtggtgaacggggagaggtctggctgtgcgctcacagacgctgtggcaccagggaacaaaggaaggggtcagcgtggaaacacagagagcaagacggatggagatgacaccgagacagtgccctcagagcagtctcatgcaagtggcaaactccggaagaagaaaaaaaaacagaaaaacaagaaaagcagcacgggagaagcatcggaaaacggactagaagatatcgatcgcatcctagagaggattgaggacagcactgggttgaaccgtcccggcccagctcccctgagctccaggaagcacgttctctacgtggagcacaggccacggcagagacaacgtgtgtaccccaagtgcacatggctgaccacccctaaaagcacctggccccgctacagcaaaccag

SEQ ID NO: 192155 - DNA, 515 bp, Homo sapiens
  Payload ID: 17966
  Gene Name: transcription factor 25 (basic helix-loop-helix)
  ENST ID: ENST00000566283
  CDS Start-End: 1-352
gaagggagaggaggagaggaacagtgttatttgggggtcacagctctgcgtttgcaggccacgttctttcccatctccaccgaatgtacaagcgcttgcgtgtcggcctctgtggcaggtgcgagtgacacagtggaagcaggctaagtcctatcagccatggaaacaccattgctctcttcttccggtcactgttgccaaactataccatggagggggagaggcccgaggaaggagtggctgggggtctgaaccgcaaccagggcctgaacaggctgatgctggctgtgcgcgacatgatggccaacttccacctcaacgacctggaggcgccgcacgaggacgacgctgagggggagggggagtgggactgagcgtccgcagaggtgaccgaaaagccgtatgatgatgttcccgatttctctgttggtcggagtcggccagttgcctgaagtagggaagctgagtgtgtcgctccctggtccactgtttctcctataaatgtaaatgggtca

SEQ ID NO: 192156 - DNA, 1879 bp, Homo sapiens
  Payload ID: 17966
  Gene Name: transcription factor 25 (basic helix-loop-helix)
  ENST ID: ENST00000562256
  CDS Start-End: 1-1711
gggagaagcatcggaaaacggactagaagatatcgatcgcatcctagagaggattgaggacagcactgggttgaaccgtcccggcccagctcccctgagctccaggaagcacgttctctacgtggagcacagacacttgaatccagacacagaactgaaaaggtattttggtgcccgggcaatcctgggggagcaaaggccacggcagagacaacgtgtgtaccccaagtgcacatggctgaccacccctaaaagcacctggccccgctacagcaaaccaggtctgtccatgcggctgctggaatcaaaaaaaggcctctccttctttgcgtttgagcacagtgaggagtaccagcaggctcagcacaagttcctggtggccgtggagtctatggagccgaacaacatcgtggttctgctccagacgagcccttaccacgttgactcactcctgcagctcagcgatgcctgccgctttcaagaggatcaggagatggctcgagacctcgtagagagagcgctgtacagcatggaatgtgcgttccaccccctgttcagtctcaccagtggggcctgccggctggattaccgcagacccgagaacaggagcttctacctggccctctacaagcagatgagcttcctggagaagcgaggctgcccgcgcacggcgctggagtactgcaagctcatcctgagtctcgagccggatgaggaccccctctgcatgctgctgctcatcgaccacctggccttgcgggcccggaactacgagtacctgatccgcctcttccaggagtgggaggctcatcggaacctgtcccagctccctaattttgccttctctgttccactggcgtatttcctgctgagccagcagacagacctccctgagtgtgagcagagctctgccaggcagaaggcctctctcctgatacagcaggcgctcaccatgttccctggagtcctcctgcccctgctcgagtcttgcagtgtgcggcccgacgccagcgtttccagtcaccgcttctttggacccaatgctgaaataagccagccccctgccctgagccagctggtgaacctgtaccttgggaggtcacactttctctggaaagagcccgccaccatgagctggctggaggagaacgtccacgaggttctgcaagcagtggacgccggggacccagccgtggaagcctgtgagaaccggcggaaggtgctctaccagcgtgcacccaggaatatccaccgccatgtgatcctctctgagatcaaggaagccgtcgctgccctgcccccggacgtgaccacgcagtctgtgatggggtttgatcctctgcctccttcggacacaatctactcctacgtcaggccagagaggaagggagaggaggagaggaacagtgttatttgggggtcacagctctgcgtttgcaggccacgttctttcccatctccaccgaatgtacaagcgcttgcgtgtcggcctctgtggcaggctaagtcctatcagccatggaaacaccattgctctcttcttccggtcactgttgccaaactataccatggagggggagaggcccgaggaaggagtggctgggggtctgaaccgcaaccagggcctgaacaggctgatgctggctgtgcgcgacatgatggccaacttccacctcaacgacctggaggcgccgcacgaggacgacgctgagggggagggggagtgggactgagcgtccgcagaggtgaccgaaaagccgtatgatgatgttcccgatttctctgttggtcggagtcggccagttgcctgaagtagggaagctgagtgtgtcgctccctggtccactgtttctcctataaatgtaaatgggtcacgctc

SEQ ID NO: 192157 - DNA, 860 bp, Homo sapiens
  Payload ID: 17966
  Gene Name: transcription factor 25 (basic helix-loop-helix)
  ENST ID: ENST00000564652
  CDS Start-End: 25-255
cagacgtcgtggtcgttcggtcctatgtcgcgccgggccctccggaggctgaggggggaacagcgcggccaggagcccctcgggcccggcgccttgcatttcgatctccgtgatgacgatgacgcggaagaagaagggcccaagcgggagcttggtgtccggcgtcccgggggcgcagggaaggagggcgtccgagtcaacaaccgcttcgagctggaaaaatggacattttcctctccccctaaaaaaagataaaactccttcctggttattaactgaaatgctgatcgagctttatcctaaagaagatcagtcgtggacaagaaccttgtgaaatgttccccatttgagaccctaaaactaatgaaaatcacagcttttggataaacattgacgatcttgaggatgaccctgtggtgaacggggagaggtctggctgtgcgctcacagacgctgtggcaccagggaacaaaggaaggggtcagcgtggaaacacagagagcaagacggatggagatgacaccgagacagtgccctcagagcagtctcatgcaagtggcaaactccggaagaagaaaaaaaaacagaaaaacaagaaaagcagcacgggagaagcatcggaaaacggactagaagatatcgatcgcatcctagagaggattgaggacagcactgggttgaaccgtcccggcccagctcccctgagctccaggaagcacgttctctacgtggagcacagacacttgaatccagacacagaactgaaaaggtattttggtgcccgggcaatcctgggggagcaaaggccacggcagagacaacgtgtgtaccccaagtgcacatggctgaccacccctaaa

SEQ ID NO: 192158 - DNA, 627 bp, Homo sapiens
  Payload ID: 17966
  Gene Name: transcription factor 25 (basic helix-loop-helix)
  ENST ID: ENST00000562193
  CDS Start-End: 1-627
agcgaggctgcccgcgcacggcgctggagtactgcaagctcatcctgagtctcgagccggatgaggaccccctctgcatgctgctgctcatcgaccacctggccttgcgggcccggaactacgagtacctgatccgcctcttccaggagtgggaggctcatcggaacctgtcccagctccctaattttgccttctctgttccactggcgtatttcctgctgagccagcagacagacctccctgagtgtgagcagagctctgccaggcagaaggcctctctcctgatacagcaggcgctcaccatgttccctggagtcctcctgcccctgctcgagtcttgcagtgtgcggcccgacgccagcgtttccagtcaccgcttctttggacccaatgctgaaataaggctcacggcacatacctgtgtgccccagccccacgccctcaggccagcagcccaggggcctcctttcactccaggccacagggcactccctggaccccccgtctgcccatccatggggctctgccagcctcgaggcaggctgtggtctgaagaggggttctgctcagagcccttgctctcccccagccagccccctgccctgagccagctggtgaacctgtacc

SEQ ID NO: 192159 - DNA, 477 bp, Homo sapiens
  Payload ID: 17966
  Gene Name: transcription factor 25 (basic helix-loop-helix)
  ENST ID: ENST00000565404
  CDS Start-End: 1-440
agaggtctggctgtgcgctcacagacgctgtggcaccagggaacaaaggaaggggtcagcgtggaaacacagagagcaagacggatggagatgacaccgagacagtgccctcagagcagtctcatgcaagtggcaaactccggaagaagaaaaaaaaacagaaaaacaagaaaagcagcacgggagaagcatcggaaaacggactagaagatatcgatcgcatcctagagaggattgaggacagcactgggttgaaccgtcccggcccagctcccctgagctccaggaagcacgttctctacgtggagcacaggtgtggcccccgcccttctctgcggctgcccttctctgcggctgcccttctctgcggctgcccttctctgcggctgcccttctctgtggctgccacagagacttcgtgggaggaaaaggttctctaaaaaaggaaaaataaaatgtactgtctttatttaaaaa

SEQ ID NO: 192160 - DNA, 763 bp, Homo sapiens
  Payload ID: 17966
  Gene Name: transcription factor 25 (basic helix-loop-helix)
  ENST ID: ENST00000561958
  CDS Start-End: 63-763
cgacagccgagttttctgcgcttccttctccctctctccagacgtcgtggtcgttcggtcctatgtcgcgccgggccctccggaggctgaggggggaacagcgcggccaggagcccctcgggcccggcgccttgcatttcgatctccgtgatgacgatgacgcggaagaagaagggcccaagcgggagcttggtgtccggcgtcccgggggcgcagggaaggagggcgtccgagtcaacaaccgcttcgagctgataaacattgacgatcttgaggatgaccctgtggtgaacggggagaggtctggctgtgcgctcacagacgctgtggcaccagggaacaaaggaaggggtcagcgtggaaacacagagagcaagacggatggagatgacaccgagacagtgccctcagagcagtctcatgcaagtggcaaactccggaagaagaaaaaaaaacagaaaaacaagaaaagcagcacgggagaagcatcggaaaacggactagaagatatcgatcgcatcctagagaggattgaggacagcactgggttgaaccgtcccggcccagctcccctgagctccaggaagcacgttctctacgtggagcacagacacttgaatccagacacagaactgaaaaggccacggcagagacaacgtgtgtaccccaagtgcacatggctgaccacccctaaaagcacctggccccgctacagcaaaccaggtctgtccatgcggctgctggaatcaaaaaaaggcctctc

SEQ ID NO: 192161 - DNA, 857 bp, Homo sapiens
  Payload ID: 17966
  Gene Name: transcription factor 25 (basic helix-loop-helix)
  ENST ID: ENST00000568409
  CDS Start-End: 1-857
cagacacttgaatccagacacagaactgaaaaggtattttggtgcccgggcaatcctgggggagcaaaggccacggcagagacaacgtgtgtaccccaagtgcacatggctgaccacccctaaaagcacctggccccgctacagcaaaccaggtctgtccatgcggctgctggaatcaaaaaaaggcctctccttctttgcgtttgagcacagtgaggagtaccagcaggctcagcacaagttcctggtggccgtggagtctatggagccgaacaacatcgtgctcagcgatgcctgccgctttcaagaggatcaggagatggctcgagacctcgtagagagagcgctgtacagcatggaatgtgcgttccaccccctgttcagtctcaccagtggggcctgccggctggattaccgcagacccgagaacaggagcttctacctggccctctacaagcagatgagcttcctggagaagcgaggctgcccgcgcacggcgctggagtactgcaagctcatcctgagtctcgagccggatgaggaccccctctgcatgctgctgctcatcgaccacctggccttgcgggcccggaactacgagtacctgatccgcctcttccaggagtgggaggctcatcggaacctgtcccagctccctaattttgccttctctgttccactggcgtatttcctgctgagccagcagacagacctccctgagtgtgagcagagctctgccaggcagaaggcctctctcctgatacagcaggcgctcaccatgttccctggagtcctcctgcccctgctcgagtcttgcagtgtgcggcccgacgccagcgtttccagtcaccgcttct

SEQ ID NO: 192162 - DNA, 797 bp, Homo sapiens
  Payload ID: 17966
  Gene Name: transcription factor 25 (basic helix-loop-helix)
  ENST ID: ENST00000568412
  CDS Start-End: 1-797
atgtcgcgccgggccctccggaggctgaggggggaacagcgcggccaggagcccctcgggcccggcgccttgcatttcgatctccgtgatgacgatgacgcggaagaagaagggcccaagcgggagcttggtgtccggcgtcccgggggcgcagggaaggagggcgtccgagtcaacaaccgcttcgagctgataaacattgacgatcttgaggatgaccctgtggtgaacggggagaggtctggctgtgcgctcacagacgctgtggcaccagggaacaaaggaaggggtcagcgtggaaacacagagagcaagacggatggagatgacaccgagacagtgccctcagagcagtctcatgcaagtggcaaactccggaagaagaaaaaaaaacagaaaaacaagaaaagcagcacgggagaagcatcggaaaacggactagaagatatcgatcgcatcctagagaggattgaggacagcactgggttgaaccgtcccggcccagctcccctgagctccaggaagcacgttctctacgtggagcacagacacttgaatccagacacagaactgaaaagtgaggagtaccagcaggctcagcacaagttcctggtggccgtggagtctatggagccgaacaacatcgtgctcagcgatgcctgccgctttcaagaggatcaggagatggctcgagacctcgtagagagagcgctgtacagcatggaatgtgcgttccaccccctgttcagtctcaccagtggggcctgccggctggattaccgcagacccgagaacag

SEQ ID NO: 192163 - DNA, 2047 bp, Homo sapiens
  Payload ID: 17966
  Gene Name: transcription factor 25 (basic helix-loop-helix)
  ENST ID: ENST00000614813
  CDS Start-End: 28-678
ctccagacgtcgtggtcgttcggtcctatgtcgcgccgggccctccggaggctgaggggggaacagcgcggccaggagcccctcgggcccggcgccttgcatttcgatctccgtgatgacgatgacgcggaagaagaagggcccaagcgggagcttggtgtccggcgtcccgggggcgcagggaaggagggcgtccgagtcaacaaccgcttcgagctgataaacattgacgatcttgaggatgaccctgtggtgaacggggagaggtctggctgtgcgctcacagacgctgtggcaccagggaacaaaggaaggggtcagcgtggaaacacagagagcaagacggatggagatgacaccgagacagtgccctcagagcagtctcatgcaagtggcaaactccggaagaagaaaaaaaaacagaaaaacaagaaaagcagcacgggagaagcatcggaaaacggactagaagatatcgatcgcatcctagagaggattgaggacagcactgggttgaaccgtcccggcccagctcccctgagctccaggaagcacgttctctacgtggagcacagacacttgaatccagacacagaactgaaaaggtattttggtgcccgggcaatcctgggggagcaaagagacagggtcttgctgggttgtccagtctggttttgaactcgtggcctcaagtgatcctcccatctcagtctcccaaatagctgggactaccggcacatgccaccgctaatttattttattttattttttatagaaacaaggtcttactttgttgcccagggtgatgtcaaactcctggcttcaagcgattctcctccctctacctcctaaagtgctaggattacaggcatgagccaccacgcccagccagacacatcctgttttattggaccatggagagtattgctggtctataacatgccctgggtttgcacgtctgagttcttttttttttttttcgagacagaattttgctcttgttgcccaggctggagtgcaatggctcaatcttggctcaccacaacctccgcctcccgggttcaagtgattctcctgcctcagcctcctgagtagctgggattacaggcatgtgccaccatgtccagctaattttgtgtttttagtagagatggggtttctccatgttggtcaggctcgtctcgaactcccaacctcaggtgatccacccgcctcagcctcccgaagtgctgggattacaggtgtgagccaccgtgcctggtctgcacgtctgagttctaagcattgttttctttttttgaaatggagtctcgctctgtcacctaggctctggagctcagtggtgcgatctcagctcactgcaacctccgcctcctgggttcaaacgattctcctgcctcagcttcccaagtagctgggattacaggcgagtgccaccatgctcggcaaatttttgtatttttggtagagacggggtttcaccatgttggccaggctggtctcgatctcctgacctcaagtgatccgccagtctcggcctcccaaagtgctgggattacagccctgagccactgcgcccggcctcccaaagtgctgggattacaggcgtgagccaccacacccagcctaagtgttgtttctgcaccatggtatacccaggtcatttcctcaccccaatggtagcatgtgtccagatgttggctacagtccccggtgtctgcaggcatttctgtgaaactgcccaagaatgagtatatatcctgcatgctgccagtgccttcagtagagttacgtggctcacactgagtgtctgcccaggtccttcaccttcttactcgtagtcgacggtagtggtttggaaacctgccgtcgtgtgtgggcagaagtgttggggttttgattgtgggtagatcaaggatgttttcatatgctgttgttcacgccttccctggatttctaacaggttttgctttatattttactttacatttttggtgttgatgggtttcttcgggaatattaattaaaaatagactttaaaatgtca

SEQ ID NO: 192164 - DNA, 4451 bp, Homo sapiens
  Payload ID: 17967
  Gene Name: transcription factor 3
  Uniprot ID: P15923
  ENST ID: ENST00000262965
  CDS Start-End: 70-2034
acgcgccgcgtgcccggccgcgcccagcagggtttccaggcctgaggtgcccgccctggccccaggagaatgaaccagccgcagaggatggcgcctgtgggcacagacaaggagctcagtgacctcctggacttcagcatgatgttcccgctgcctgtcaccaacgggaagggccggcccgcctccctggccggggcgcagttcggaggttcaggtcttgaggaccggcccagctcaggctcctggggcagcggcgaccagagcagctcctcctttgaccccagccggaccttcagcgagggcacccacttcactgagtcgcacagcagcctctcttcatccacattcctgggaccgggactcggaggcaagagcggtgagcggggcgcctatgcctccttcgggagagacgcaggcgtgggcggcctgactcaggctggcttcctgtcaggcgagctggccctcaacagccccgggcccctgtccccttcgggcatgaaggggacctcccagtactacccctcctactccggcagctcccggcggagagcggcagacggcagcctagacacgcagcccaagaaggtccggaaggtcccgccgggtcttccatcctcggtgtacccacccagctcaggtgaggactacggcagggatgccaccgcctacccgtccgccaagacccccagcagcacctatcccgcccccttctacgtggcagatggcagcctgcacccctcagccgagctctggagtcccccgggccaggcgggcttcgggcccatgctgggtgggggctcatccccgctgcccctcccgcccggtagcggcccggtgggcagcagtggaagcagcagcacgtttggtggcctgcaccagcacgagcgtatgggctaccagctgcatggagcagaggtgaacggtgggctcccatctgcatcctccttctcctcagcccccggagccacgtacggcggcgtctccagccacacgccgcctgtcagcggggccgacagcctcctgggctcccgagggaccacagctggcagctccggggatgccctcggcaaagcactggcctcgatctactccccggatcactcaagcaataacttctcgtccagcccttctacccccgtgggctccccccagggcctggcaggaacgtcacagtggcctcgagcaggagcccccggtgccttatcgcccagctacgacgggggtctccacggcctgcagagtaagatagaagaccacctggacgaggccatccacgtgctccgcagccacgccgtgggcacagccggcgacatgcacacgctgctgcctggccacggggcgctggcctcaggtttcaccggccccatgtcactgggcgggcggcacgcaggcctggttggaggcagccaccccgaggacggcctcgcaggcagcaccagcctcatgcacaaccacgcggccctccccagccagccaggcaccctccctgacctgtctcggcctcccgactcctacagtgggctagggcgagcaggtgccacggcggccgccagcgagatcaagcgggaggagaaggaggacgaggagaacacgtcagcggctgaccactcggaggaggagaagaaggagctgaaggccccccgggcccggaccagcccagacgaggacgaggacgaccttctccccccagagcagaaggccgagcgggagaaggagcgccgggtggccaataacgcccgggagcggctgcgggtccgtgacatcaacgaggcctttaaggagctggggcgcatgtgccaactgcacctcaacagcgagaagccccagaccaaactgctcatcctgcaccaggctgtctcggtcatcctgaacttggagcagcaagtgcgagagcggaacctgaatcccaaagcagcctgtttgaaacggcgagaagaggaaaaggtgtcaggtgtggttggagacccccagatggtgctttcagctccccacccaggcctgagcgaagcccacaaccccgccgggcacatgtgaaaggtatgcctccgtgggacgagccacccgctttcagccctgtgctctggccccagaacggccactcgagaccccgggcttcatccacatccacacctcacacacctgttgtcagcatcgagccaacaccaacctgacaaggttcggagtgatgggggcggccaaggtgacactgggtccaggagctccctggggccctggcctaccactcactggcctcgctccccctgtccccgaatctcagccaccgtgtcactctgtgacctgtcccatggatcctgaaactgcatcttggccctgttgcctgggctgacaggagcattttttttttttccagtaaacaaaacctgaaagcaagcaacaaaacatacactttgtcagagaagaaaaaaatgccttaactataaaaagcggagaaatggaaacatatcactcaagggggatgctgtggaaacctggcttattcttctaaagccaccagcaaattgtgcctaagcgaaatattttttttaaggaaaataaaaacattagttacaagattttttttttcttaatgtagatgaaaattagcaaggatgctgcctttggtctctggtttttttaagctttttttgcatatgttttgtaagcaacaaatttttttgtataaaagtcccgtgtctctcgctatttctgctgctgttcctagactgagcattgcatttcttgatcaaccagatgattaaacgttgtattaaaaagaccccgtgtaaacctgagcccccccgtccccccccccccccggaagccactgcacacagacagaacggggacaggcggcgggtcttttgtttttttgatgttgggggttctcttggttttgtcatgtggaaagtgatgcgtgggcgttccctgatgaaggcaccttggggcttccctgccgcatcctctcccctcaggaaggggactgacctgggcttgggggaagggacgtcagcaaggtggctctgaccctcccaggtgactctgccaagcagctgtggcccccagggctaccctacacaacgccctccccaggcccccctaagctgctctcccttggaacctgcacagctctctgaaatggggcattttgttgggaccagtgacccctggcatggggaccacaccctggagcccggtgctggggacctcctggacaccctgtccttcactcctttgccccagggacccaggctcatgctctgaactctggctgagaggatgctgctcaggagccagcacaggacaccccccaccccaccccaccatgtccccattacaccagagggccatcgtgacgtagacaggatgccaggggcctggccagcctcccccaatgctggggagcatccctgggcctggggccacacctgctgccctccctctgtgtggtccaagggcaagagtggctggagccgggggactgtgctggtctgagccccacgaaggccttgggctgtgcgtccgaccctgctgcagaaccagcagggtgtcccctcgggcccatctgtgtcccatgtcccagcacccaggcctctctccaggtctccttttctggtcttttgccatgagggtaaccagctcttcccagctggctggggactgtcttgggtttaaaactgcaagtctcctaccctgggatcccatccagttccacacgaactagggcagtggtcactgtggcacccaggtgtgggcctggctagctgggggccttcatgtgcccttcatgcccctccctgcattgaggccttgtggacccctgggctggctgtgttcatccccgctgcaggtcgggcgtctccccccgtgccactcctgagactcccaccgttacccccaggagatcctggactgcctgactcccctccccagactggcttgggagcctgggccccatggtagatgcaagggaaacctcaaggccagctcaatgcctggtatctgcccccagtccaggccaggcggaggggaggggctgtccggctgcctctcccttctcggtggcttcccctacgccctgggagtttgatctcttaagggaacttgcctctccctcttgttttgctcctggccctgcccctaggtctgggtgggcagtggccccatagcctctggaactgtgcgttctgcatagaattcaaacgagattcacccagcgcgaggaggaagaaacagcagttcctgggaaccacaattatggggggtggggggtgtgatctgagtgcctcaagatggttttcaaaaaaatttttttaaagaaaataattgtatacgtgtcaacacagctggctggatgattgggactttaaaacgaccctctttcaggtggattcagagacctgtcctgtatataacagcactgtagcaataaacgtgacattttataacgatgc

SEQ ID NO: 192165 - DNA, 4289 bp, Homo sapiens
  Payload ID: 17967
  Gene Name: transcription factor 3
  ENST ID: ENST00000344749
  CDS Start-End: 70-1872
acgcgccgcgtgcccggccgcgcccagcagggtttccaggcctgaggtgcccgccctggccccaggagaatgaaccagccgcagaggatggcgcctgtgggcacagacaaggagctcagtgacctcctggacttcagcatgatgttcccgctgcctgtcaccaacgggaagggccggcccgcctccctggccggggcgcagttcggaggttcaggcaagagcggtgagcggggcgcctatgcctccttcgggagagacgcaggcgtgggcggcctgactcaggctggcttcctgtcaggcgagctggccctcaacagccccgggcccctgtccccttcgggcatgaaggggacctcccagtactacccctcctactccggcagctcccggcggagagcggcagacggcagcctagacacgcagcccaagaaggtccggaaggtcccgccgggtcttccatcctcggtgtacccacccagctcaggtgaggactacggcagggatgccaccgcctacccgtccgccaagacccccagcagcacctatcccgcccccttctacgtggcagatggcagcctgcacccctcagccgagctctggagtcccccgggccaggcgggcttcgggcccatgctgggtgggggctcatccccgctgcccctcccgcccggtagcggcccggtgggcagcagtggaagcagcagcacgtttggtggcctgcaccagcacgagcgtatgggctaccagctgcatggagcagaggtgaacggtgggctcccatctgcatcctccttctcctcagcccccggagccacgtacggcggcgtctccagccacacgccgcctgtcagcggggccgacagcctcctgggctcccgagggaccacagctggcagctccggggatgccctcggcaaagcactggcctcgatctactccccggatcactcaagcaataacttctcgtccagcccttctacccccgtgggctccccccagggcctggcaggaacgtcacagtggcctcgagcaggagcccccggtgccttatcgcccagctacgacgggggtctccacggcctgcagagtaagatagaagaccacctggacgaggccatccacgtgctccgcagccacgccgtgggcacagccggcgacatgcacacgctgctgcctggccacggggcgctggcctcaggtttcaccggccccatgtcactgggcgggcggcacgcaggcctggttggaggcagccaccccgaggacggcctcgcaggcagcaccagcctcatgcacaaccacgcggccctccccagccagccaggcaccctccctgacctgtctcggcctcccgactcctacagtgggctagggcgagcaggtgccacggcggccgccagcgagatcaagcgggaggagaaggaggacgaggagaacacgtcagcggctgaccactcggaggaggagaagaaggagctgaaggccccccgggcccggaccagcagtacggacgaggtgctgtccctggaggagaaagacctgagggaccgggagaggcgcatggccaataacgcgcgggagcgggtgcgcgtgcgggatattaacgaggccttccgggagctggggcgcatgtgccagatgcacctcaagtcggacaaagcgcagaccaagctgctcatcctgcagcaggccgtgcaggtcatcctggggctggagcagcaggtgcgagagcggaacctgaatcccaaagcagcctgtttgaaacggcgagaagaggaaaaggtgtcaggtgtggttggagacccccagatggtgctttcagctccccacccaggcctgagcgaagcccacaaccccgccgggcacatgtgaaaggtatgcctccgtgggacgagccacccgctttcagccctgtgctctggccccagaacggccactcgagaccccgggcttcatccacatccacacctcacacacctgttgtcagcatcgagccaacaccaacctgacaaggttcggagtgatgggggcggccaaggtgacactgggtccaggagctccctggggccctggcctaccactcactggcctcgctccccctgtccccgaatctcagccaccgtgtcactctgtgacctgtcccatggatcctgaaactgcatcttggccctgttgcctgggctgacaggagcattttttttttttccagtaaacaaaacctgaaagcaagcaacaaaacatacactttgtcagagaagaaaaaaatgccttaactataaaaagcggagaaatggaaacatatcactcaagggggatgctgtggaaacctggcttattcttctaaagccaccagcaaattgtgcctaagcgaaatattttttttaaggaaaataaaaacattagttacaagattttttttttcttaatgtagatgaaaattagcaaggatgctgcctttggtctctggtttttttaagctttttttgcatatgttttgtaagcaacaaatttttttgtataaaagtcccgtgtctctcgctatttctgctgctgttcctagactgagcattgcatttcttgatcaaccagatgattaaacgttgtattaaaaagaccccgtgtaaacctgagcccccccgtccccccccccccccggaagccactgcacacagacagaacggggacaggcggcgggtcttttgtttttttgatgttgggggttctcttggttttgtcatgtggaaagtgatgcgtgggcgttccctgatgaaggcaccttggggcttccctgccgcatcctctcccctcaggaaggggactgacctgggcttgggggaagggacgtcagcaaggtggctctgaccctcccaggtgactctgccaagcagctgtggcccccagggctaccctacacaacgccctccccaggcccccctaagctgctctcccttggaacctgcacagctctctgaaatggggcattttgttgggaccagtgacccctggcatggggaccacaccctggagcccggtgctggggacctcctggacaccctgtccttcactcctttgccccagggacccaggctcatgctctgaactctggctgagaggatgctgctcaggagccagcacaggacaccccccaccccaccccaccatgtccccattacaccagagggccatcgtgacgtagacaggatgccaggggcctggccagcctcccccaatgctggggagcatccctgggcctggggccacacctgctgccctccctctgtgtggtccaagggcaagagtggctggagccgggggactgtgctggtctgagccccacgaaggccttgggctgtgcgtccgaccctgctgcagaaccagcagggtgtcccctcgggcccatctgtgtcccatgtcccagcacccaggcctctctccaggtctccttttctggtcttttgccatgagggtaaccagctcttcccagctggctggggactgtcttgggtttaaaactgcaagtctcctaccctgggatcccatccagttccacacgaactagggcagtggtcactgtggcacccaggtgtgggcctggctagctgggggccttcatgtgcccttcatgcccctccctgcattgaggccttgtggacccctgggctggctgtgttcatccccgctgcaggtcgggcgtctccccccgtgccactcctgagactcccaccgttacccccaggagatcctggactgcctgactcccctccccagactggcttgggagcctgggccccatggtagatgcaagggaaacctcaaggccagctcaatgcctggtatctgcccccagtccaggccaggcggaggggaggggctgtccggctgcctctcccttctcggtggcttcccctacgccctgggagtttgatctcttaagggaacttgcctctccctcttgttttgctcctggccctgcccctaggtctgggtgggcagtggccccatagcctctggaactgtgcgttctgcatagaattcaaacgagattcacccagcgcgaggaggaagaaacagcagttcctgggaaccacaattatggggggtggggggtgtgatctgagtgcctcaagatggttttcaaaaaaatttttttaaagaaaataattgtatacgtgtcaacacagctggctggatgattgggactttaaaacgaccctctttcaggtggattcagagacctgtcctgtatataacagcactgtagcaataaacgtgacattttataacgatgc

SEQ ID NO: 192166 - DNA, 2779 bp, Homo sapiens
  Payload ID: 17967
  Gene Name: transcription factor 3
  Uniprot ID: P15923
  ENST ID: ENST00000395423
  CDS Start-End: 345-2321
cccgccgcaggaagatgaggcagcggcggcggctgcgggcgtagcgggccggagccgacgcggcggcgggcaccgcgggcaccgcgcacgccgctgccccaggggcgccccggccggccgcgcgcacgggccccgcgggacgggccacgcgggggtgggaggggcccgggccacgcgcgccgccgccgccgcccacgcgcgaccctcgggggcccggccgcgacgcacctttgtccgggggggggcccccccgcttcatgccgccgcccccccccacgcgccgcgtgcccggccgcgcccagcagggtttccaggcctgaggtgcccgccctggccccaggagaatgaaccagccgcagaggatggcgcctgtgggcacagacaaggagctcagtgacctcctggacttcagcatgatgttcccgctgcctgtcaccaacgggaagggccggcccgcctccctggccggggcgcagttcggaggttcaggcaagagcggtgagcggggcgcctatgcctccttcgggagagacgcaggcgtgggcggcctgactcaggctggcttcctgtcaggcgagctggccctcaacagccccgggcccctgtccccttcgggcatgaaggggacctcccagtactacccctcctactccggcagctcccggcggagagcggcagacggcagcctagacacgcagcccaagaaggtccggaaggtcccgccgggtcttccatcctcggtgtacccacccagctcaggtgaggactacggcagggatgccaccgcctacccgtccgccaagacccccagcagcacctatcccgcccccttctacgtggcagatggcagcctgcacccctcagccgagctctggagtcccccgggccaggcgggcttcgggcccatgctgggtgggggctcatccccgctgcccctcccgcccggtagcggcccggtgggcagcagtggaagcagcagcacgtttggtggcctgcaccagcacgagcgtatgggctaccagctgcatggagcagaggtgaacggtgggctcccatctgcatcctccttctcctcagcccccggagccacgtacggcggcgtctccagccacacgccgcctgtcagcggggccgacagcctcctgggctcccgagggaccacagctggcagctccggggatgccctcggcaaagcactggcctcgatctactccccggatcactcaagcaataacttctcgtccagcccttctacccccgtgggctccccccagggcctggcaggaacgtcacagtggcctcgagcaggagcccccggtgccttatcgcccagctacgacgggggtctccacggcctgcagagtaagatagaagaccacctggacgaggccatccacgtgctccgcagccacgccgtgggcacagccggcgacatgcacacgctgctgcctggccacggggcgctggcctcaggtttcaccggccccatgtcactgggcgggcggcacgcaggcctggttggaggcagccaccccgaggacggcctcgcaggcagcaccagcctcatgcacaaccacgcggccctccccagccagccaggcaccctccctgacctgtctcggcctcccgactcctacagtgggctagggcgagcaggtgccacggcggccgccagcgagatcaagcgggaggagaaggaggacgaggagaacacgtcagcggctgaccactcggaggaggagaagaaggagctgaaggccccccgggcccggaccaggtgccaacccacccctcggcactccccaccctcaccccatcaggacgcacatgtgcacaggccacacgcacaccgcacccacactgggaggccgtcggcgggccccacgctcttcccccaacctcactgtctccctctggccccctcccggcgccctccccatagcccagacgaggacgaggacgaccttctccccccagagcagaaggccgagcgggagaaggagcgccgggtggccaataacgcccgggagcggctgcgggtccgtgacatcaacgaggcctttaaggagctggggcgcatgtgccaactgcacctcaacagcgagaagccccagaccaaactgctcatcctgcaccaggctgtctcggtcatcctgaacttggagcagcaagtgcgagagcggaacctgaatcccaaagcagcctgtttgaaacggcgagaagaggaaaaggtgtcaggtgtggttggagacccccagatggtgctttcagctccccacccaggcctgagcgaagcccacaaccccgccgggcacatgtgaaaggtatgcctccgtgggacgagccacccgctttcagccctgtgctctggccccagaacggccactcgagaccccgggcttcatccacatccacacctcacacacctgttgtcagcatcgagccaacaccaacctgacaaggttcggagtgatgggggcggccaaggtgacactgggtccaggagctccctggggccctggcctaccactcactggcctcgctccccctgtccccgaatctcagccaccgtgtcactctgtgacctgtcccatggatcctgaaactgcatcttggccctgttgcctgggctgacaggagcattttttttttttccagtaaacaaaacctgaaagcaagcaacaaaacatacactttgtcagagaagaaaaaaatgccttaactataaaaagcggagaaatggaaacatatcactcaagggggatgctgtggaaacctg

SEQ ID NO: 192167 - DNA, 3585 bp, Homo sapiens
  Payload ID: 17967
  Gene Name: transcription factor 3
  ENST ID: ENST00000453954
  CDS Start-End: 335-2374
gatgaggcagcggcggcggctgcgggcgtagcgggccggagccgacgcggcggcgggcaccgcgggcaccgcgcacgccgctgccccaggggcgccccggccggccgcgcgcacgggccccgcgggacgggccacgcgggggtgggaggggcccgggccacgcgcgccgccgccgccgcccacgcgcgaccctcgggggcccggccgcgacgcacctttgtccgggggggggcccccccgcttcatgccgccgcccccccccacgcgccgcgtgcccggccgcgcccagcagcagggtttccaggcctgaggtgcccgccctggccccaggagaatgaaccagccgcagaggatggcgcctgtgggcacagacaaggagctcagtgacctcctggacttcagcatgatgttcccgctgcctgtcaccaacgggaagggccggcccgcctccctggccggggcgcagttcggaggttcaggtcttgaggaccggcccagctcaggctcctggggcagcggcgaccagagcagctcctcctttgaccccagccggaccttcagcgagggcacccacttcactgagtcgcacagcagcctctcttcatccacattcctgggaccgggactcggaggtgagtgcctggcctggtgcggtccctctgctgtgcacagatgtgcagacgtgggccttggcatggtcagtgcacgcacagcgccaggcaagagcggtgagcggggcgcctatgcctccttcgggagagacgcaggcgtgggcggcctgactcaggctggcttcctgtcaggcgagctggccctcaacagccccgggcccctgtccccttcgggcatgaaggggacctcccagtactacccctcctactccggcagctcccggcggagagcggcagacggcagcctagacacgcagcccaagaaggtccggaaggtcccgccgggtcttccatcctcggtgtacccacccagctcaggtgaggactacggcagggatgccaccgcctacccgtccgccaagacccccagcagcacctatcccgcccccttctacgtggcagatggcagcctgcacccctcagccgagctctggagtcccccgggccaggcgggcttcgggcccatgctgggtgggggctcatccccgctgcccctcccgcccggtagcggcccggtgggcagcagtggaagcagcagcacgtttggtggcctgcaccagcacgagcgtatgggctaccagctgcatggagcagaggtgaacggtgggctcccatctgcatcctccttctcctcagcccccggagccacgtacggcggcgtctccagccacacgccgcctgtcagcggggccgacagcctcctgggctcccgagggaccacagctggcagctccggggatgccctcggcaaagcactggcctcgatctactccccggatcactcaagcaataacttctcgtccagcccttctacccccgtgggctccccccagggcctggcaggaacgtcacagtggcctcgagcaggagcccccggtgccttatcgcccagctacgacgggggtctccacggcctgcagagtaagatagaagaccacctggacgaggccatccacgtgctccgcagccacgccgtgggcacagccggcgacatgcacacgctgctgcctggccacggggcgctggcctcaggtttcaccggccccatgtcactgggcgggcggcacgcaggcctggttggaggcagccaccccgaggacggcctcgcaggcagcaccagcctcatgcacaaccacgcggccctccccagccagccaggcaccctccctgacctgtctcggcctcccgactcctacagtgggctagggcgagcaggtgccacggcggccgccagcgagatcaagcgggaggagaaggaggacgaggagaacacgtcagcggctgaccactcggaggaggagaagaaggagctgaaggccccccgggcccggaccagtacggacgaggtgctgtccctggaggagaaagacctgagggaccgggagaggcgcatggccaataacgcgcgggagcgggtgcgcgtgcgggatattaacgaggccttccgggagctggggcgcatgtgccagatgcacctcaagtcggacaaagcgcagaccaagctgctcatcctgcagcaggccgtgcaggtcatcctggggctggagcagcaggtgcgagagcggaacctgaatcccaaagcagcctgtttgaaacggcgagaagaggaaaaggtgtcaggtgtggttggagacccccagatggtgctttcagctccccacccaggcctgagcgaagcccacaaccccgccgggcacatgtgaaagggacccaggctcatgctctgaactctggctgagaggatgctgctcaggagccagcacaggacaccccccaccccaccccaccatgtccccattacaccagagggccatcgtgacgtagacaggatgccaggggcctggccagcctcccccaatgctggggagcatccctgggcctggggccacacctgctgccctccctctgtgtggtccaagggcaagagtggctggagccgggggactgtgctggtctgagccccacgaaggccttgggctgtgcgtccgaccctgctgcagaaccagcagggtgtcccctcgggcccatctgtgtcccatgtcccagcacccaggcctctctccaggtctccttttctggtcttttgccatgagggtaaccagctcttcccagctggctggggactgtcttgggtttaaaactgcaagtctcctaccctgggatcccatccagttccacacgaactagggcagtggtcactgtggcacccaggtgtgggcctggctagctgggggccttcatgtgcccttcatgcccctccctgcattgaggccttgtggacccctgggctggctgtgttcatccccgctgcaggtcgggcgtctccccccgtgccactcctgagactcccaccgttacccccaggagatcctggactgcctgactcccctccccagactggcttgggagcctgggccccatggtagatgcaagggaaacctcaaggccagctcaatgcctggtatctgcccccagtccaggccaggcggaggggaggggctgtccggctgcctctcccttctcggtggcttcccctacgccctgggagtttgatctcttaagggaacttgcctctccctcttgttttgctcctggccctgcccctaggtctgggtgggcagtggccccatagcctctggaactgtgcgttctgcatagaattcaaacgagattcacccagcgcgaggaggaagaaacagcagttcctgggaaccacaattatggggggtggggggtgtgatctgagtgcctcaagatggttttcaaaaaaatttttttaaagaaaataattgtatacgtgtcaacacagctggctggatgattgggactttaaaacgaccctctttcaggtggattcagagacctgtcctgtatataacagcactgtagcaataaacgtgacattttataacga

SEQ ID NO: 192168 - DNA, 996 bp, Homo sapiens
  Payload ID: 17967
  Gene Name: transcription factor 3
  ENST ID: ENST00000592395
  CDS Start-End: 1-156
gcggccgccagcgagatcaagcgggaggagaaggaggacgaggagaacacgtcagcggctgaccactcggaggaggagaagaaggagctgaaggccccccgggcccggaccagagcagaaggccgagcgggagaaggagcgccgggtggccaataacgcccgggagcggctgcgggtccgtgacatcaacgaggcctttaaggagctggggcgcatgtgccaactgcacctcaacagcgagaagccccagaccaaactgctcatcctgcaccaggctgtctcggtcatcctgaacttggagcagcaagtgcgagcagtacggacgaggtgctgtccctggaggagaaagacctgagggaccgggagaggcgcatggccaataacgcgcgggagcgggtgcgcgtgcgggatattaacgaggccttccgggagctggggcgcatgtgccagatgcacctcaagtcggacaaagcgcagaccaagctgctcatcctgcagcaggccgtgcaggtcatcctggggctggagcagcaggtgcgagagcggaacctgaatcccaaagcagcctgtttgaaacggcgagaagaggaaaaggtgtcaggtgtggttggagacccccagatggtgctttcagctccccacccaggcctgagcgaagcccacaaccccgccgggcacatgtgaaaggtctgggtgggcagtggccccatagcctctggaactgtgcgttctgcatagaattcaaacgagattcacccagcgcgaggaggaagaaacagcagttcctgggaaccacaattatggggggtggggggtgtgatctgagtgcctcaagatggttttcaaaaaaatttttttaaagaaaataattgtatacgtgtcaacacagctggctggatgattgggactttaaaacgaccctctttcaggtggattcagagacctgtcctgtatataacagcactgtagcaataaacgtgacattttataacgatg

SEQ ID NO: 192169 - DNA, 1170 bp, Homo sapiens
  Payload ID: 17967
  Gene Name: transcription factor 3
  ENST ID: ENST00000585855
  CDS Start-End: 1-249
accctccctgacctgtctcggcctcccgactcctacagtgggctagggcgagcaggtgccacggcggccgccagcgagatcaagcgggaggagaaggaggacgaggagaacacgtcagcggctgaccactcggaggaggagaagaaggagctgaaggccccccgggcccggaccagacgaggacgaggacgaccttctccccccagagcagaaggccgagcgggagaaggagcgccgggtggccaataacgcccgggagcggctgcgggtccgtgacatcaacgaggcctttaaggagctggggcgcatgtgccaactgcacctcaacagcgagaagccccagaccaaactgctcatcctgcaccaggctgtctcggtcatcctgaacttggagcagcaagtgcgagcagtacggacgaggtgctgtccctggaggagaaagacctgagggaccgggagaggcgcatggccaataacgcgcgggagcgggtgcgcgtgcgggatattaacgaggccttccgggagctggggcgcatgtgccagatgcacctcaagtcggacaaagcgcagaccaagctgctcatcctgcagcaggccgtgcaggtcatcctggggctggagcagcaggtgcgagagcggaacctgaatcccaaagcagcctgtttgaaacggcgagaagaggaaaaggtgtcaggtgtggttggagacccccagatggtgctttcagctccccacccaggcctgagcgaagcccacaaccccgccgggcacatgtgaaaggtatgcctccgtgggacgagccacccgctttcagccctgtgctctggccccagaacggccactcgagaccccgggcttcatccacatccacacctcacacacctgttgtcagcatcgagccaacaccaacctgacaaggttcggagtgatgggggcggccaaggtgacactgggtccaggagctccctggggccctggcctaccactcactggcctcgctccccctgtccccgaatctcagccaccgtgtcactctgtgacctgtcccatggatcctgaaactgcatcttggccctgttgcctgggctgacaggagcattttttttttttccagtaaacaaaacctgaaagcaagcaacaaaacatacactttgtcagagaagaaaaaaa

SEQ ID NO: 192170 - DNA, 1222 bp, Homo sapiens
  Payload ID: 17967
  Gene Name: transcription factor 3
  ENST ID: ENST00000585731
  CDS Start-End: 1-480
gcggccgccagcgagatcaagcgggaggagaaggaggacgaggagaacacgtcagcggctgaccactcggaggaggagaagaaggagctgaaggccccccgggcccggaccagtacggacgaggtgctgtccctggaggagaaagacctgagggaccgggagaggcgcatggccaataacgcgcgggagcgggtgcgcgtgcgggatattaacgaggccttccgggagctggggcgcatgtgccagatgcacctcaagtcggacaaagcgcagaccaagctgctcatcctgcagcaggccgtgcaggtcatcctggggctggagcagcaggtgcgagagcggaacctgaatcccaaagcagcctgtttgaaacggcgagaagaggaaaaggtgtcaggtgtggttggagacccccagatggtgctttcagctccccacccaggcctgagcgaagcccacaaccccgccgggcacatgtgaaaggtatgcctccgtgggacgagccacccgctttcagccctgtgctctggccccagaacggccactcgagaccccgggcttcatccacatccacacctcacacacctgttgtcagcatcgagccaacaccaacctgacaaggttcggagtgatgggggcggccaaggtgacactgggtccaggagctccctggggccctggcctaccactcactggcctcgctccccctgtccccgaatctcagccaccgtgtcactctgtgacctgtcccatggatcctgaaactgcatcttggccctgttgcctgggctgacaggagcattttttttttttccagtaaacaaaacctgaaagcaagcaacaaaacatacactttgtcagagaagaaaaaaatgccttaactataaaaagcggagaaatggaaacatatcactcaagggggatgctgtggaaacctggcttattcttctaaagccaccagcaaattgtgcctaagcgaaatattttttttaaggaaaataaaaacattagttacaagattttttttttcttaatgtagatgaaaattagcaaggatgctgcctttggtctctggtttttttaagctttttttgcatatgttttgtaagcaacaaatttttttgtataaaagtcccgtgtctctcgctatttctgctgctgttcctagactgagcattgcatttcttgatcaaccagatgattaaacgttgtattaaaaaga

SEQ ID NO: 192171 - DNA, 1751 bp, Homo sapiens
  Payload ID: 17967
  Gene Name: transcription factor 3
  ENST ID: ENST00000592628
  CDS Start-End: 1-540
tctcggcctcccgactcctacagtgggctagggcgagcaggtgccacggcggccgccagcgagatcaagcgggaggagaaggaggacgaggagaacacgtcagcggctgaccactcggaggaggagaagaaggagctgaaggccccccgggcccggaccagcccagacgaggacgaggacgaccttctccccccagagcagaaggccgagcgggagaaggagcgccgggtggccaataacgcccgggagcggctgcgggtccgtgacatcaacgaggcctttaaggagctggggcgcatgtgccaactgcacctcaacagcgagaagccccagaccaaactgctcatcctgcaccaggctgtctcggtcatcctgaacttggagcagcaagtgcgagagcggaacctgaatcccaaagcagcctgtttgaaacggcgagaagaggaaaaggtgtcaggtgtggttggagacccccagatggtgctttcagctccccacccaggcctgagcgaagcccacaaccccgccgggcacatgtgaaagggacccaggctcatgctctgaactctggctgagaggatgctgctcaggagccagcacaggacaccccccaccccaccccaccatgtccccattacaccagagggccatcgtgacgtagacaggatgccaggggcctggccagcctcccccaatgctggggagcatccctgggcctggggccacacctgctgccctccctctgtgtggtccaagggcaagagtggctggagccgggggactgtgctggtctgagccccacgaaggccttgggctgtgcgtccgaccctgctgcagaaccagcagggtgtcccctcgggcccatctgtgtcccatgtcccagcacccaggcctctctccaggtctccttttctggtcttttgccatgagggtaaccagctcttcccagctggctggggactgtcttgggtttaaaactgcaagtctcctaccctgggatcccatccagttccacacgaactagggcagtggtcactgtggcacccaggtgtgggcctggctagctgggggccttcatgtgcccttcatgcccctccctgcattgaggccttgtggacccctgggctggctgtgttcatccccgctgcaggtcgggcgtctccccccgtgccactcctgagactcccaccgttacccccaggagatcctggactgcctgactcccctccccagactggcttgggagcctgggccccatggtagatgcaagggaaacctcaaggccagctcaatgcctggtatctgcccccagtccaggccaggcggaggggaggggctgtccggctgcctctcccttctcggtggcttcccctacgccctgggagtttgatctcttaagggaacttgcctctccctcttgttttgctcctggccctgcccctaggtctgggtgggcagtggccccatagcctctggaactgtgcgttctgcatagaattcaaacgagattcacccagcgcgaggaggaagaaacagcagttcctgggaaccacaattatggggggtggggggtgtgatctgagtgcctcaagatggttttcaaaaaaatttttttaaagaaaataattgtatacgtgtcaacacagctggctggatgattgggactttaaaacgaccctctttcaggtggattcagagacctgtcctgtatataacagcactgtagcaataaacgtgacattttataacga

SEQ ID NO: 192172 - DNA, 986 bp, Homo sapiens
  Payload ID: 17967
  Gene Name: transcription factor 3
  ENST ID: ENST00000587235
  CDS Start-End: 346-986
tcccgccgcaggaagatgaggcagcggcggcggctgcgggcgtagcgggccggagccgacgcggcggcgggcaccgcgggcaccgcgcacgccgctgccccaggggcgccccggccggccgcgcgcacgggccccgcgggacgggccacgcgggggtgggaggggcccgggccacgcgcgccgccgccgccgcccacgcgcgaccctcgggggcccggccgcgacgcacctttgtccgggggggggcccccccgcttcatgccgccgcccccccccacgcgccgcgtgcccggccgcgcccagcagggtttccaggcctgaggtgcccgccctggccccaggagaatgaaccagccgcagaggatggcgcctgtgggcacagacaaggagctcagtgacctcctggacttcagcatgatgttcccgctgcctgtcaccaacgggaagggccggcccgcctccctggccggggcgcagttcggaggttcaggtcttgaggaccggcccagctcaggctcctggggcagcggcgaccagagcagctcctcctttgaccccagccggaccttcagcgagggcacccacttcactgagtcgcacagcagcctctcttcatccacattcctgggaccgggactcggaggcaagagcggtgagcggggcgcctatgcctccttcgggagagacgcaggcgtgggcggcctgactcaggctggcttcctgtcaggcgagctggccctcaacagccccgggcccctgtccccttcgggcatgaaggggacctcccagtactacccctcctactccggcagctcccggcggagagcggcagacggcagcctagacacgcagcccaagaaggtccggaaggtcccgccgggtcttccatcctcggtgtacccacccagctcaggtgaggactacggcagggatgccaccgcctacccgtccgccaagacccccagcagcacctatcccgccccctt

SEQ ID NO: 192173 - DNA, 1313 bp, Homo sapiens
  Payload ID: 17967
  Gene Name: transcription factor 3
  ENST ID: ENST00000590684
  CDS Start-End: 1-662
ccatgtcactgggcgggcggcacgcaggcctggttggaggcagccaccccgaggacggcctcgcaggcagcaccagcctcatgcacaaccacgcggccctccccagccagccaggcaccctccctgacctgtctcggcctcccgactcctacagtgggctagggcgagcaggtgccacggcggccgccagcgagatcaagcgggaggagaaggaggacgaggagaacacgtcagcggctgaccactcggaggaggagaagaaggagctgaaggccccccgggcccggaccagcagtacggacgaggtgctgtccctggaggagaaagacctgagggaccgggagaggcgcatggccaataacgcgcgggagcgggtgcgcgtgcgggatattaacgaggccttccgggagctggggcgcatgtgccagatgcacctcaagtcggacaaagcgcagaccaagctgctcatcctgcagcaggccgtgcaggtcatcctggggctggagcagcaggtgcgagagcggaacctgaatcccaaagcagcctgtttgaaacggcgagaagaggaaaaggtgtcaggtgtggttggagacccccagatggtgctttcagctccccacccaggcctgagcgaagcccacaaccccgccgggcacatgtgaaaggtatgcctccgtgggacgagccacccgctttcagccctgtgctctggccccagaacggccactcgagaccccgggcttcatccacatccacacctcacacacctgttgtcagcatcgagccaacaccaacctgacaaggttcggagtgatgggggcggccaaggtgacactgggtccaggagctccctggggccctggcctaccactcactggcctcgctccccctgtccccgaatctcagccaccgtgtcactctgtgacctgtcccatggatcctgaaactgcatcttggccctgttgcctgggctgacaggagcattttttttttttccagtaaacaaaacctgaaagcaagcaacaaaacatacactttgtcagagaagaaaaaaatgccttaactataaaaagcggagaaatggaaacatatcactcaagggggatgctgtggaaacctggcttattcttctaaagccaccagcaaattgtgcctaagcgaaatattttttttaaggaaaataaaaacattagttacaagattttttttttcttaatgtagatgaaaattagcaaggatgctgcctttggtctctggtttttttaagctttttttgcatatgttttgtaagcaacaaatttttttgtataaaa

SEQ ID NO: 192174 - DNA, 1149 bp, Homo sapiens
  Payload ID: 17967
  Gene Name: transcription factor 3
  ENST ID: ENST00000590436
  CDS Start-End: 1-944
gaacgtcacagtggcctcgagcaggagcccccggtgccttatcgcccagctacgacgggggtctccacggcctgcagagtaagatagaagaccacctggacgaggccatccacgtgctccgcagccacgccgtgggcacagccggcgacatgcacacgctgctgcctggccacggggcgctggcctcaggtttcaccggccccatgtcactgggcgggcggcacgcaggcctggtgagcgctgggcgagggtggagctgggcagtgggcggggacccggctccccctgatgcacccgtctccccacgcctgcaggttggaggcagccaccccgaggacggcctcgcaggcagcaccagcctcatgcacaaccacgcggccctccccagccagccaggcaccctccctgacctgtctcggcctcccgactcctacagtgggctagggcgagcaggtgccacggcggccgccagcgagatcaagcgggaggagaaggaggacgaggagaacacgtcagcggctgaccactcggaggaggagaagaaggagctgaaggccccccgggcccggaccagcagtacggacgaggtgctgtccctggaggagaaagacctgagggaccgggagaggcgcatggccaataacgcgcgggagcgggtgcgcgtgcgggatattaacgaggccttccgggagctggggcgcatgtgccagatgcacctcaagtcggacaaagcgcagaccaagctgctcatcctgcagcaggccgtgcaggtcatcctggggctggagcagcaggtgcgagagcggaacctgaatcccaaagcagcctgtttgaaacggcgagaagaggaaaaggtgtcaggtgtggttggagacccccagatggtgctttcagctccccacccaggcctgagcgaagcccacaaccccgccgggcacatgtgaaagtaaacaaaacctgaaagcaagcaacaaaacatacactttgtcagagaagaaaaaaatgccttaactataaaaagcggagaaatggaaacatatcactcaagggggatgctgtggaaacctggcttattcttctaaagccaccagcaaattgtgcctaagcgaaatattttttttaaggaaaataaaaacattagttacaaga

SEQ ID NO: 192175 - DNA, 631 bp, Homo sapiens
  Payload ID: 17967
  Gene Name: transcription factor 3
  ENST ID: ENST00000586318
  CDS Start-End: 347-631
acaaagaggggatttctctgcttctgaagttgggtctccctcgacctcggaggctcctccccacccccagcctcggaggtgtctcccgggctgcccccgtccccacctggggacccctggggaaagtcgagactggaggggcctggagtgcatttctttggaatggaaatttttctctgtacctttttctgggggtggaatgggtcttggcaggtggatcccccatcccccatcttagaatggagccccctgggaccacgcgggagcaccctggtcttgagacgctctccccgctcatggagggcagggtttccaggcctgaggtgcccgccctggccccaggagaatgaaccagccgcagaggatggcgcctgtgggcacagacaaggagctcagtgacctcctggacttcagcatgatgttcccgctgcctgtcaccaacgggaagggccggcccgcctccctggccggggcgcagttcggaggttcaggtcttgaggaccggcccagctcaggctcctggggcagcggcgaccagagcagctcctcctttgaccccagccggaccttcagcgagggcacccacttcactgagtcgcacagcagcctctcttcatccacattcctggga

SEQ ID NO: 192176 - DNA, 288 bp, Homo sapiens
  Payload ID: 17967
  Gene Name: transcription factor 3
  ENST ID: ENST00000586410
  CDS Start-End: 1-288
atctactccccggatcactcaagcaataacttctcgtccagcccttctacccccgtgggctccccccagggcctggcaggaacgtcacagtggcctcgagcaggagcccccggtgccttatcgcccagctacgacgggggtctccacggcctggttggaggcagccaccccgaggacggcctcgcaggcagcaccagcctcatgcacaaccacgcggccctccccagccagccaggcaccctccctgacctgtctcggcctcccgactcctacagtgggctagggcga

SEQ ID NO: 192177 - DNA, 629 bp, Homo sapiens
  Payload ID: 17967
  Gene Name: transcription factor 3
  ENST ID: ENST00000587425
  CDS Start-End: 1-498
gccacggcggccgccagcgagatcaagcgggaggagaaggaggacgaggagaacacgtcagcggctgaccactcggaggaggagaagaaggagctgaaggccccccgggcccggaccagcccagacgaggacgaggacgaccttctccccccagagcagaaggccgagcgggagaaggagcgccgggtggccaataacgcccgggagcggctgcgggtccgtgacatcaacgaggcctttaaggagctggggcgcatgtgccaactgcacctcaacagcgagaagccccagaccaaactgctcatcctgcaccaggctgtctcggtcatcctgaacttggagcagcaagtgcgagagcggaacctgaatcccaaagcagcctgtttgaaacggcgagaagaggaaaaggtgtcaggtgtggttggagacccccagatggtgctttcagctccccacccaggcctgagcgaagcccacaaccccgccgggcacatgtgaaaggtctgggtgggcagtggccccatagcctctggaactgtgcgttctgcatagaattcaaacgagattcacccagcgcgaggaggaagaaacagcagttcctgggaaccacaattatggggggtgggggg

SEQ ID NO: 192178 - DNA, 409 bp, Homo sapiens
  Payload ID: 17967
  Gene Name: transcription factor 3
  ENST ID: ENST00000586164
  CDS Start-End: 1-156
gcggccgccagcgagatcaagcgggaggagaaggaggacgaggagaacacgtcagcggctgaccactcggaggaggagaagaaggagctgaaggccccccgggcccggaccagagcagaaggccgagcgggagaaggagcgccgggtggccaataacgcccgggagcggctgcgggtccgtgacatcaacgaggcctttaaggagctggggcgcatgtgccaactgcacctcaacagcgagaagccccagaccaaactgctcatcctgcaccaggctgtctcggtcatcctgaacttggagcagcaagtgcgagagcggaacctgaatcccaaagcagcctgtttgaaacggcgagaagaggaaaaggtgtcaggtgtggttggagacccccagatggtgctttcagct

SEQ ID NO: 192179 - DNA, 2694 bp, Homo sapiens
  Payload ID: 17967
  Gene Name: transcription factor 3
  ENST ID: ENST00000593064
  CDS Start-End: 1-614
gcctcgcaggcagcaccagcctcatgcacaaccacgcggccctccccagccagccaggcaccctccctgacctgtctcggcctcccgactcctacagtgggctagggcgagcaggtgccacggcggccgccagcgagatcaagcgggaggagaaggaggacgaggagaacacgtcagcggctgaccactcggaggaggagaagaaggagctgaaggccccccgggcccggaccagcccagacgaggacgaggacgaccttctccccccagagcagaaggccgagcgggagaaggagcgccgggtggccaataacgcccgggagcggctgcgggtccgtgacatcaacgaggcctttaaggagctggggcgcatgtgccaactgcacctcaacagcgagaagccccagaccaaactgctcatcctgcaccaggctgtctcggtcatcctgaacttggagcagcaagtgcgagagcggaacctgaatcccaaagcagcctgtttgaaacggcgagaagaggaaaaggtgtcaggtgtggttggagacccccagatggtgctttcagctccccacccaggcctgagcgaagcccacaaccccgccgggcacatgtgaaagtaaacaaaacctgaaagcaagcaacaaaacatacactttgtcagagaagaaaaaaatgccttaactataaaaagcggagaaatggaaacatatcactcaagggggatgctgtggaaacctggcttattcttctaaagccaccagcaaattgtgcctaagcgaaatattttttttaaggaaaataaaaacattagttacaagattttttttttcttaatgtagatgaaaattagcaaggatgctgcctttggtctctggtttttttaagctttttttgcatatgttttgtaagcaacaaatttttttgtataaaagtcccgtgtctctcgctatttctgctgctgttcctagactgagcattgcatttcttgatcaaccagatgattaaacgttgtattaaaaagaccccgtgtaaacctgagcccccccgtccccccccccccccggaagccactgcacacagacagaacggggacaggcggcgggtcttttgtttttttgatgttgggggttctcttggttttgtcatgtggaaagtgatgcgtgggcgttccctgatgaaggcaccttggggcttccctgccgcatcctctcccctcaggaaggggactgacctgggcttgggggaagggacgtcagcaaggtggctctgaccctcccaggtgactctgccaagcagctgtggcccccagggctaccctacacaacgccctccccaggcccccctaagctgctctcccttggaacctgcacagctctctgaaatggggcattttgttgggaccagtgacccctggcatggggaccacaccctggagcccggtgctggggacctcctggacaccctgtccttcactcctttgccccagggacccaggctcatgctctgaactctggctgagaggatgctgctcaggagccagcacaggacaccccccaccccaccccaccatgtccccattacaccagagggccatcgtgacgtagacaggatgccaggggcctggccagcctcccccaatgctggggagcatccctgggcctggggccacacctgctgccctccctctgtgtggtccaagggcaagagtggctggagccgggggactgtgctggtctgagccccacgaaggccttgggctgtgcgtccgaccctgctgcagaaccagcagggtgtcccctcgggcccatctgtgtcccatgtcccagcacccaggcctctctccaggtctccttttctggtcttttgccatgagggtaaccagctcttcccagctggctggggactgtcttgggtttaaaactgcaagtctcctaccctgggatcccatccagttccacacgaactagggcagtggtcactgtggcacccaggtgtgggcctggctagctgggggccttcatgtgcccttcatgcccctccctgcattgaggccttgtggacccctgggctggctgtgttcatccccgctgcaggtcgggcgtctccccccgtgccactcctgagactcccaccgttacccccaggagatcctggactgcctgactcccctccccagactggcttgggagcctgggccccatggtagatgcaagggaaacctcaaggccagctcaatgcctggtatctgcccccagtccaggccaggcggaggggaggggctgtccggctgcctctcccttctcggtggcttcccctacgccctgggagtttgatctcttaagggaacttgcctctccctcttgttttgctcctggccctgcccctaggtctgggtgggcagtggccccatagcctctggaactgtgcgttctgcatagaattcaaacgagattcacccagcgcgaggaggaagaaacagcagttcctgggaaccacaattatggggggtggggggtgtgatctgagtgcctcaagatggttttcaaaaaaatttttttaaagaaaataattgtatacgtgtcaacacagctggctggatgattgggactttaaaacgaccctctttcaggtggattcagagacctgtcctgtatataacagcactgtagcaataaacgtgacattttataacga

SEQ ID NO: 192180 - DNA, 2658 bp, Homo sapiens
  Payload ID: 17967
  Gene Name: transcription factor 3
  Uniprot ID: P15923
  ENST ID: ENST00000588136
  CDS Start-End: 498-2453
ggggaatcaccaaatttccctcggggcggggtaggatcgggctgttcctccctttcccgggggtagggggcctcagaggaagcccggggttggttggaaatgagagagttggagaaaggagaggttctggctgccctgcgtgcagtttaaacttggcaacttgatgccctggtgttccctgggggagttagggagtttatatttgcacaccctccccccatttttcagactccctgtggtctctggggaggactctgcagggacctagactctggaattccagcttccctgcgcctgctcccagggctccccgtgcccccagggctctgctggaactcagaccccagggcggttgagggttttttaggtggcttttagcactctgtgctttgaccactcacaactcttctcccctccctgtttctccctgtccatctgtccccacatccaccaagcagggtttccaggcctgaggtgcccgccctggccccaggagaatgaaccagccgcagaggatggcgcctgtgggcacagacaaggagctcagtgacctcctggacttcagcatgatgttcccgctgcctgtcaccaacgggaagggccggcccgcctccctggccggggcgcagttcggaggttcaggtcttgaggaccggcccagctcaggctcctggggcagcggcgaccagagcagctcctcctttgaccccagccggaccttcagcgagggcacccacttcactgagtcgcacagcagcctctcttcatccacattcctgggaccgggactcggaggcaagagcggtgagcggggcgcctatgcctccttcgggagagacgcaggcgtgggcggcctgactcaggctggcttcctgtcaggcgagctggccctcaacagccccgggcccctgtccccttcgggcatgaaggggacctcccagtactacccctcctactccggcagctcccggcggagagcggcagacggcagcctagacacgcagcccaagaaggtccggaaggtcccgccgggtcttccatcctcggtgtacccacccagctcaggtgaggactacggcagggatgccaccgcctacccgtccgccaagacccccagcagcacctatcccgcccccttctacgtggcagatggcagcctgcacccctcagccgagctctggagtcccccgggccaggcgggcttcgggcccatgctgggtgggggctcatccccgctgcccctcccgcccggtagcggcccggtgggcagcagtggaagcagcagcacgtttggtggcctgcaccagcacgagcgtatgggctaccagctgcatggagcagaggtgaacggtgggctcccatctgcatcctccttctcctcagcccccggagccacgtacggcggcgtctccagccacacgccgcctgtcagcggggccgacagcctcctgggctcccgagggaccacagctggcagctccggggatgccctcggcaaagcactggcctcgatctactccccggatcactcaagcaataacttctcgtccagcccttctacccccgtgggctccccccagggcctggcaggaacgtcacagtggcctcgagcaggagcccccggtgccttatcgcccagctacgacgggggtctccacggcctgcagagtaagatagaagaccacctggacgaggccatccacgtgctccgcagccacgccgtgggcacagccggcgacatgcacacgctgctgcctggccacggggcgctggcctcaggtttcaccggccccatgtcactgggcgggcggcacgcaggcctggttggaggcagccaccccgaggacggcctcgcaggcagcaccagcctcatgcacaaccacgcggccctccccagccagccaggcaccctccctgacctgtctcggcctcccgactcctacagtgggctagggcgagcaggtgccacggcggccgccagcgagatcaagcgggaggagaaggaggacgaggagaacacgtcagcggctgaccactcggaggaggagaagaaggagctgaaggccccccgggcccggaccagcagtacggacgaggtgctgtccctggaggagaaagacctgagggaccgggagaggcgcatggccaataacgcgcgggagcgggtgcgcgtgcgggatattaacgaggccttccgggagctggggcgcatgtgccagatgcacctcaagtcggacaaagcgcagaccaagctgctcatcctgcagcaggccgtgcaggtcatcctggggctggagcagcaggtgcgagagcggaacctgaatcccaaagcagcctgtttgaaacggcgagaagaggaaaaggtgtcaggtgtggttggagacccccagatggtgctttcagctccccacccaggcctgagcgaagcccacaaccccgccgggcacatgtgaaagtaaacaaaacctgaaagcaagcaacaaaacatacactttgtcagagaagaaaaaaatgccttaactataaaaagcggagaaatggaaacatatcactcaagggggatgctgtggaaacctggcttattcttctaaagccaccagcaaattgtgcctaagcgaaatattttttttaaggaaaataaaaacattagttacaaga

SEQ ID NO: 192181 - DNA, 4409 bp, Homo sapiens
  Payload ID: 17967
  Gene Name: transcription factor 3
  Uniprot ID: P15923
  ENST ID: ENST00000611869
  CDS Start-End: 31-1995
gcctgaggtgcccgccctggccccaggagaatgaaccagccgcagaggatggcgcctgtgggcacagacaaggagctcagtgacctcctggacttcagcatgatgttcccgctgcctgtcaccaacgggaagggccggcccgcctccctggccggggcgcagttcggaggttcaggtcttgaggaccggcccagctcaggctcctggggcagcggcgaccagagcagctcctcctttgaccccagccggaccttcagcgagggcacccacttcactgagtcgcacagcagcctctcttcatccacattcctgggaccgggactcggaggcaagagcggtgagcggggcgcctatgcctccttcgggagagacgcaggcgtgggcggcctgactcaggctggcttcctgtcaggcgagctggccctcaacagccccgggcccctgtccccttcgggcatgaaggggacctcccagtactacccctcctactccggcagctcccggcggagagcggcagacggcagcctagacacgcagcccaagaaggtccggaaggtcccgccgggtcttccatcctcggtgtacccacccagctcaggtgaggactacggcagggatgccaccgcctacccgtccgccaagacccccagcagcacctatcccgcccccttctacgtggcagatggcagcctgcacccctcagccgagctctggagtcccccgggccaggcgggcttcgggcccatgctgggtgggggctcatccccgctgcccctcccgcccggtagcggcccggtgggcagcagtggaagcagcagcacgtttggtggcctgcaccagcacgagcgtatgggctaccagctgcatggagcagaggtgaacggtgggctcccatctgcatcctccttctcctcagcccccggagccacgtacggcggcgtctccagccacacgccgcctgtcagcggggccgacagcctcctgggctcccgagggaccacagctggcagctccggggatgccctcggcaaagcactggcctcgatctactccccggatcactcaagcaataacttctcgtccagcccttctacccccgtgggctccccccagggcctggcaggaacgtcacagtggcctcgagcaggagcccccggtgccttatcgcccagctacgacgggggtctccacggcctgcagagtaagatagaagaccacctggacgaggccatccacgtgctccgcagccacgccgtgggcacagccggcgacatgcacacgctgctgcctggccacggggcgctggcctcaggtttcaccggccccatgtcactgggcgggcggcacgcaggcctggttggaggcagccaccccgaggacggcctcgcaggcagcaccagcctcatgcacaaccacgcggccctccccagccagccaggcaccctccctgacctgtctcggcctcccgactcctacagtgggctagggcgagcaggtgccacggcggccgccagcgagatcaagcgggaggagaaggaggacgaggagaacacgtcagcggctgaccactcggaggaggagaagaaggagctgaaggccccccgggcccggaccagcccagacgaggacgaggacgaccttctccccccagagcagaaggccgagcgggagaaggagcgccgggtggccaataacgcccgggagcggctgcgggtccgtgacatcaacgaggcctttaaggagctggggcgcatgtgccaactgcacctcaacagcgagaagccccagaccaaactgctcatcctgcaccaggctgtctcggtcatcctgaacttggagcagcaagtgcgagagcggaacctgaatcccaaagcagcctgtttgaaacggcgagaagaggaaaaggtgtcaggtgtggttggagacccccagatggtgctttcagctccccacccaggcctgagcgaagcccacaaccccgccgggcacatgtgaaaggtatgcctccgtgggacgagccacccgctttcagccctgtgctctggccccagaacggccactcgagaccccgggcttcatccacatccacacctcacacacctgttgtcagcatcgagccaacaccaacctgacaaggttcggagtgatgggggcggccaaggtgacactgggtccaggagctccctggggccctggcctaccactcactggcctcgctccccctgtccccgaatctcagccaccgtgtcactctgtgacctgtcccatggatcctgaaactgcatcttggccctgttgcctgggctgacaggagcattttttttttttccagtaaacaaaacctgaaagcaagcaacaaaacatacactttgtcagagaagaaaaaaatgccttaactataaaaagcggagaaatggaaacatatcactcaagggggatgctgtggaaacctggcttattcttctaaagccaccagcaaattgtgcctaagcgaaatattttttttaaggaaaataaaaacattagttacaagattttttttttcttaatgtagatgaaaattagcaaggatgctgcctttggtctctggtttttttaagctttttttgcatatgttttgtaagcaacaaatttttttgtataaaagtcccgtgtctctcgctatttctgctgctgttcctagactgagcattgcatttcttgatcaaccagatgattaaacgttgtattaaaaagaccccgtgtaaacctgagcccccccgtccccccccccccccggaagccactgcacacagacagaacggggacaggcggcgggtcttttgtttttttgatgttgggggttctcttggttttgtcatgtggaaagtgatgcgtgggcgttccctgatgaaggcaccttggggcttccctgccgcatcctctcccctcaggaaggggactgacctgggcttgggggaagggacgtcagcaaggtggctctgaccctcccaggtgactctgccaagcagctgtggcccccagggctaccctacacaacgccctccccaggcccccctaagctgctctcccttggaacctgcacagctctctgaaatggggcattttgttgggaccagtgacccctggcatggggaccacaccctggagcccggtgctggggacctcctggacaccctgtccttcactcctttgccccagggacccaggctcatgctctgaactctggctgagaggatgctgctcaggagccagcacaggacaccccccaccccaccccaccatgtccccattacaccagagggccatcgtgacgtagacaggatgccaggggcctggccagcctcccccaatgctggggagcatccctgggcctggggccacacctgctgccctccctctgtgtggtccaagggcaagagtggctggagccgggggactgtgctggtctgagccccacgaaggccttgggctgtgcgtccgaccctgctgcagaaccagcagggtgtcccctcgggcccatctgtgtcccatgtcccagcacccaggcctctctccaggtctccttttctggtcttttgccatgagggtaaccagctcttcccagctggctggggactgtcttgggtttaaaactgcaagtctcctaccctgggatcccatccagttccacacgaactagggcagtggtcactgtggcacccaggtgtgggcctggctagctgggggccttcatgtgcccttcatgcccctccctgcattgaggccttgtggacccctgggctggctgtgttcatccccgctgcaggtcgggcgtctccccccgtgccactcctgagactcccaccgttacccccaggagatcctggactgcctgactcccctccccagactggcttgggagcctgggccccatggtagatgcaagggaaacctcaaggccagctcaatgcctggtatctgcccccagtccaggccaggcggaggggaggggctgtccggctgcctctcccttctcggtggcttcccctacgccctgggagtttgatctcttaagggaacttgcctctccctcttgttttgctcctggccctgcccctaggtctgggtgggcagtggccccatagcctctggaactgtgcgttctgcatagaattcaaacgagattcacccagcgcgaggaggaagaaacagcagttcctgggaaccacaattatggggggtggggggtgtgatctgagtgcctcaagatggttttcaaaaaaatttttttaaagaaaataattgtatacgtgtcaacacagctggctggatgattgggactttaaaacgaccctctttcaggtggattcagagacctgtcctgtatataacagcactgtagcaataaacgtgacattttataacga

SEQ ID NO: 192182 - DNA, 3482 bp, Homo sapiens
  Payload ID: 17968
  Gene Name: transcription factor 4
  Uniprot ID: P15884
  ENST ID: ENST00000354452
  CDS Start-End: 216-2231
agagttggtgttaagagtcagggatcttggctgtgtgtctgcggatctgtagtggcggcggcggcggcggcggcggggaggcagcaggcgcgggagcgggcgcaggagcaggcggcggcggtggcggcggcggttagacatgaacgccgcctcggcgccggcggtgcacggagagccccttctcgcgcgcgggcggtttgtgtgattttgctaaaatgcatcaccaacagcgaatggctgccttagggacggacaaagagctgagtgatttactggatttcagtgcgatgttttcacctcctgtgagcagtgggaaaaatggaccaacttctttggcaagtggacattttactggctcaaatgtagaagacagaagtagctcagggtcctgggggaatggaggacatccaagcccgtccaggaactatggagatgggactccctatgaccacatgaccagcagggaccttgggtcacatgacaatctctctccaccttttgtcaattccagaatacaaagtaaaacagaaaggggctcatactcatcttatgggagagaatcaaacttacagggttgccaccagcagagtctccttggaggtgacatggatatgggcaacccaggaaccctttcgcccaccaaacctggttcccagtactatcagtattctagcaataatccccgaaggaggcctcttcacagtagtgccatggaggtacagacaaagaaagttcgaaaagttcctccaggtttgccatcttcagtctatgctccatcagcaagcactgccgactacaatagggactcgccaggctatccttcctccaaaccagcaaccagcactttccctagctccttcttcatgcaagatggccatcacagcagtgacccttggagctcctccagtgggatgaatcagcctggctatgcaggaatgttgggcaactcttctcatattccacagtccagcagctactgtagcctgcatccacatgaacgtttgagctatccatcacactcctcagcagacatcaattccagtcttcctccgatgtccactttccatcgtagtggtacaaaccattacagcacctcttcctgtacgcctcctgccaacgggacagacagtataatggcaaatagaggaagcggggcagccggcagctcccagactggagatgctctggggaaagcacttgcttcgatctattctccagatcacactaacaacagcttttcatcaaacccttcaactcctgttggctctcctccatctctctcagcaggcacagctgtttggtctagaaatggaggacaggcctcatcgtctcctaattatgaaggacccttacactctttgcaaagccgaattgaagatcgtttagaaagactggatgatgctattcatgttctccggaaccatgcagtgggcccatccacagctatgcctggtggtcatggggacatgcatggaatcattggaccttctcataatggagccatgggtggtctgggctcagggtatggaaccggccttctttcagccaacagacattcactcatggtggggacccatcgtgaagatggcgtggccctgagaggcagccattctcttctgccaaaccaggttccggttccacagcttcctgtccagtctgcgacttcccctgacctgaacccaccccaggacccttacagaggcatgccaccaggactacaggggcagagtgtctcctctggcagctctgagatcaaatccgatgacgagggtgatgagaacctgcaagacacgaaatcttcggaggacaagaaattagatgacgacaagaaggatatcaaatcaattactaggtcaagatctagcaataatgacgatgaggacctgacaccagagcagaaggcagagcgtgagaaggagcggaggatggccaacaatgcccgagagcgtctgcgggtccgtgacatcaacgaggctttcaaagagctcggccgcatggtgcagctccacctcaagagtgacaagccccagaccaagctcctgatcctccaccaggcggtggccgtcatcctcagtctggagcagcaagtccgagaaaggaatctgaatccgaaagctgcgtgtctgaaaagaagggaggaagagaaggtgtcctcagagcctccccctctctccttggccggcccacaccctggaatgggagacgcatcgaatcacatgggacagatgtaaaagggtccaagttgccacattgcttcattaaaacaagagaccacttccttaacagctgtattatcttaaacccacataaacacttctccttaacccccatttttgtaatataagacaagtctgagtagttatgaatcgcagacgcaagaggtttcagcattcccaattatcaaaaaacagaaaaacaaaaaaaagaaagaaaaaagtgcaacttgagggacgactttctttaacatatcattcagaatgtgcaaagcagtatgtacaggctgagacacagcccagagactgaacggcaatctttccacactgtggaacaatgcatttgtgcctaaacttcttttggaaaaaaaaaatataattaatttgtaagtctgaaaaaaaaatatttaatttaaaaaaaattgtaaacttgcaataatgaaaaagtgtacttctgaagaaaactacatgaacgtttttgttggtattcaagtcagctagtgtttataattactggatattgaattaggggaagctcggctgccctagtaacaaaaccagcaaacgtcctgatgacaacgaagtgatgacattagccattccttagggtaggaggaacagatggatcttatagacctatgacaaatatatatataaatatatatataaatatatattaaaaatttagtgactatggtaagcttttgttcatttgtttcagacttttttctcctgtaaaaaaatagtactgattaacttttttaaaagaaagattttactgtaaatatggatttttttttttttggtcttatttctgtccctttccctggtttgttatcgtaacctgtagtgccaactctgcttccagaggggtagtgcaggatgaaatgctgaccctgatgttgcttctcattcataaataagtagaaagttgtttctccagtcttttgggaacacaggacttaaaagtcacatcatgtgtagatattacaagcagcattaccaagacatggcaaaaagagtttgtctgaattgtaatgttgcgtttgtgaacctattctgggattttcagaggtacaaggttagaatgctacaatgttaccactgtgccttccaatgtttatatcatcggaaacataacataatcaaagtggctgtgatttaacaaaatgattaaagtgttacctacctgtgtagccgaagtagtgtgcagtgaggcgtttctgaatacatggtcagatttttggaaaaaaacaaaaacaaaaaaaa

SEQ ID NO: 192183 - DNA, 8317 bp, Homo sapiens
  Payload ID: 17968
  Gene Name: transcription factor 4
  Uniprot ID: P15884
  ENST ID: ENST00000356073
  CDS Start-End: 613-2616
gtgtgtggatgtgtgagtgagagggaacgagagtaagagaaagaaagaagtgaggggatgtaaactcgaataaatttcaaagtgcctccgagggatgcaacgggcaaaaactgaactgttcaggcttcagattgtaactgacgatctgaggaaaaatgaggtgctcgatgaattttcgtttgtattttttggcgaggcgggggaggtgttgagattttttttttttcccctcggggtgggtgcgagggggatgcatcctagcctgcccgacccggagcaagtcgcgtctccccgccggagcccccccacccatttctttgctgaacttgcaattccgtgcgcctcggcgtgtttccccctccccccttccctccgtcccctcccctccccggagaagagagttggtgttaagagtcagggatcttggctgtgtgtctgcggatctgtagtggcggcggcggcggcggcggcggggaggcagcaggcgcgggagcgggcgcaggagcaggcggcggcggtggcggcggcggttagacatgaacgccgcctcggcgccggcggtgcacggagagccccttctcgcgcgcgggcggtttgtgtgattttgctaaaatgcatcaccaacagcgaatggctgccttagggacggacaaagagctgagtgatttactggatttcagtgcgatgttttcacctcctgtgagcagtgggaaaaatggaccaacttctttggcaagtggacattttactggctcaaatgtagaagacagaagtagctcagggtcctgggggaatggaggacatccaagcccgtccaggaactatggagatgggactccctatgaccacatgaccagcagggaccttgggtcacatgacaatctctctccaccttttgtcaattccagaatacaaagtaaaacagaaaggggctcatactcatcttatgggagagaatcaaacttacagggttgccaccagcagagtctccttggaggtgacatggatatgggcaacccaggaaccctttcgcccaccaaacctggttcccagtactatcagtattctagcaataatccccgaaggaggcctcttcacagtagtgccatggaggtacagacaaagaaagttcgaaaagttcctccaggtttgccatcttcagtctatgctccatcagcaagcactgccgactacaatagggactcgccaggctatccttcctccaaaccagcaaccagcactttccctagctccttcttcatgcaagatggccatcacagcagtgacccttggagctcctccagtgggatgaatcagcctggctatgcaggaatgttgggcaactcttctcatattccacagtccagcagctactgtagcctgcatccacatgaacgtttgagctatccatcacactcctcagcagacatcaattccagtcttcctccgatgtccactttccatcgtagtggtacaaaccattacagcacctcttcctgtacgcctcctgccaacgggacagacagtataatggcaaatagaggaagcggggcagccggcagctcccagactggagatgctctggggaaagcacttgcttcgatctattctccagatcacactaacaacagcttttcatcaaacccttcaactcctgttggctctcctccatctctctcagcaggcacagctgtttggtctagaaatggaggacaggcctcatcgtctcctaattatgaaggacccttacactctttgcaaagccgaattgaagatcgtttagaaagactggatgatgctattcatgttctccggaaccatgcagtgggcccatccacagctatgcctggtggtcatggggacatgcatggaatcattggaccttctcataatggagccatgggtggtctgggctcagggtatggaaccggccttctttcagccaacagacattcactcatggtggggacccatcgtgaagatggcgtggccctgagaggcagccattctcttctgccaaaccaggttccggttccacagcttcctgtccagtctgcgacttcccctgacctgaacccaccccaggacccttacagaggcatgccaccaggactacaggggcagagtgtctcctctggcagctctgagatcaaatccgatgacgagggtgatgagaacctgcaagacacgaaatcttcggaggacaagaaattagatgacgacaagaaggatatcaaatcaattactagcaataatgacgatgaggacctgacaccagagcagaaggcagagcgtgagaaggagcggaggatggccaacaatgcccgagagcgtctgcgggtccgtgacatcaacgaggctttcaaagagctcggccgcatggtgcagctccacctcaagagtgacaagccccagaccaagctcctgatcctccaccaggcggtggccgtcatcctcagtctggagcagcaagtccgagaaaggaatctgaatccgaaagctgcgtgtctgaaaagaagggaggaagagaaggtgtcctcagagcctccccctctctccttggccggcccacaccctggaatgggagacgcatcgaatcacatgggacagatgtaaaagggtccaagttgccacattgcttcattaaaacaagagaccacttccttaacagctgtattatcttaaacccacataaacacttctccttaacccccatttttgtaatataagacaagtctgagtagttatgaatcgcagacgcaagaggtttcagcattcccaattatcaaaaaacagaaaaacaaaaaaaagaaagaaaaaagtgcaacttgagggacgactttctttaacatatcattcagaatgtgcaaagcagtatgtacaggctgagacacagcccagagactgaacggcaatctttccacactgtggaacaatgcatttgtgcctaaacttcttttggaaaaaaaaaatataattaatttgtaagtctgaaaaaaaaatatttaatttaaaaaaaattgtaaacttgcaataatgaaaaagtgtacttctgaagaaaactacatgaacgtttttgttggtattcaagtcagctagtgtttataattactggatattgaattaggggaagctcggctgccctagtaacaaaaccagcaaacgtcctgatgacaacgaagtgatgacattagccattccttagggtaggaggaacagatggatcttatagacctatgacaaatatatatataaatatatatataaatatatattaaaaatttagtgactatggtaagcttttgttcatttgtttcagacttttttctcctgtaaaaaaatagtactgattaacttttttaaaagaaagattttactgtaaatatggatttttttttttttggtcttatttctgtccctttccctggtttgttatcgtaacctgtagtgccaactctgcttccagaggggtagtgcaggatgaaatgctgaccctgatgttgcttctcattcataaataagtagaaagttgtttctccagtcttttgggaacacaggacttaaaagtcacatcatgtgtagatattacaagcagcattaccaagacatggcaaaaagagtttgtctgaattgtaatgttgcgtttgtgaacctattctgggattttcagaggtacaaggttagaatgctacaatgttaccactgtgccttccaatgtttatatcatcggaaacataacataatcaaagtggctgtgatttaacaaaatgattaaagtgttacctacctgtgtagccgaagtagtgtgcagtgaggcgtttctgaatacatggtcagatttttggaaaaaaacaaaaacaaaaaaaacaagtaaagttcaaaaaccgtcaaatgagaaaattgcaagtagtgtgacagagctgattgattttgttgctttcttgattttttttttcaaaatgggtttactaaaatgtagatgacttaactgcctcctccttcgtctgaaaaatgccaatattcaatcatcatgcagcattataacaagccttataagtcctaaagcattaagttgcacttttttgaggaggggtagtgcagtatttctctggccagtatgaatgaagtttatacttaccatatttgatagaaacatagatcaagctatggcacagcgactcatcagatagctagctttgacgtctgggcacaattgaaccaacttccatcgtgaatctttataatgattgactttggtgtatagtgcagtaaacaaatagtgctcctagttaagtatttgtcagcatccttttgtctctaacttgtttctatttttacagccacacaattcttggcatgtattaagaaaaaaaaaaatccctgttcaagtagtttttccacctatcagcactgagtaaatgccataaatccattgaaatggtctaaatgttccatctgttctcctgttttgccagttatatagtaatgaaatacatttgtaaattttatgcaacaaatggcaaacgtatcattattttgaaattgtgtatgtaaaagttatatttttacatgtagactcttgttattatgtgttttaatacattgtatcagtttttgtttttttttaaaaactgtggtttaaaaagaagtctcatttaaatgaaatagctacaagaatcagaattttatgttcatttctgaaaatgtaagaacaaataagatagttaccacgtggtcatcttttacaaacccataaacattttgattagctgtgtgtgtgttgaaaaactgtaaatatgttcagtagcgataaaactaaaataactttgatttgttgataagttcctaaaatgtggaggtggattaaaaccttaggagaatagcagaaatcaaacttcatgaaaagttattttggggctttcctgtgaaatgtatgaacaaagaggctcagagaaggacatggaagacaataatgtatactctctcctcctccctgaataatgaaaaccatgtgtatttgttccctccgtatgttaaagatttccttttagtggtacattctgcactcattttgtatagtctaccaaggcgggtatccctaggaacaatattatataggaagcaggtatactctgatcacattcaggataagtgtacagaagaaaatacggtgtttactctttagggaactggaaacactccctgcattgatgtacattttaagaatggcacttttgatacatgttatcataaaggtgcttaatagagctgaattaaagtttttcaaatctgtaaacaaagcaaaaaagtaaattgtagtcatttgattattttttaaattggtgctttatattttgttctcactcagagtaaaagctgcaatttattgttcaccagctttgatgtattcattactcagtaatgcaatacctctattgttgaattccctttggaaataagtgaaaattctaacggccactgaaagctgctcgctaggttttgcttggtggagaaacataatctgcacctatccatattaattgggttgtatccccattaaaaaagaaaaaaagggaatgtggcctttttagtgtgttttttattgttgttgttttgtaattatcaaacccaggtaagatattggtatcctgcactggattttcaaatgaagttcagcagaagacagttaagattaaagtactatacaaaaatttcaaaagggtccatactacgctatctgtatgacgacacttaggctggggatctctttcagaaactcggactttaaaagcaacttggagcagttgatccacctccacattcaagtaatttatgaatatgcagaatagggatctgttcatctagaaatttttaccatttgtcttctgtgtagctgcaaggaacactaatgtttatacaactgtcagtccacccagtggtgcaactggttctgattcagtcttccgattcctttttatttttcactttttcctatttctgaatttttttttttatttgtgatcttgattttgatgaggggttggggagtggggagggagtcgaaccaagacttggagttaagaggattttcatcttttgcatccaacaggcagaatatgatctgtgtccaaaagtgaacttgagtcaggaatgaatcaatttcagcataaacaagcacaaaaatttagtctgctggctgactggaagcaaaaaagtcaagatggaatatgatgaattccaacacaatggggcaccaaggcctttaggcctctctttttattttgctttggttttgtttgtttttctttagagacatgctctttctcatgggacttgaagtggactcatctttgtgcagtgctggttttgccatactcatttcaagtattatagacatatgtaatggtgaaaatatatgaactgtggcctttttcattcttgttacttgtgatgcaattaagtgaagataagaaaaaaaaaaaaaaagcagagatttaccatgtatcagtgcctggctttttgttataaagctttgtttgtctagtgctcttttgctataaaatagactgtagtacaccctagtaggaaaaaaaaaaaactaaatttaaaaataaaaaatatatttggcttatttttcgcaggagcaatccttttataccatgaatattacaaaaaaattgtcagattctgaatatttcttctttgtagatttttggaatcattatgagtaaaagtttgttactttattttactatttaaaagatgttattttaccatgtgttaccaagatgaaactgtatgggtagcttttttgtttgttttttgttttgtttttgtttttgtttttgtttttagttgtaggtcgcagcggggaaattttttgcgactgtacacatagctgcagcattaaaaacttaaaaaaattgttaaaaaaaaaaaaagggaaaacatttcaaaaaaaaaaaaaaagataaacagttacaccttgttttcaatgtgtggctgagtgcctcgattttttcatgtttttggtgtatttctgatttgtagaagtgtccaaacaggttgtgtgctggagttccttcaagacaaaaacaaacccagcttggtcaaggccattacctgtttcccatctgtagttattcgatgaagtcatgtacatgaccgttctgtagcaataaatgtgccatttttataaactgtttctgacacttgtttcatttcattttgcattgtccatatagctatgattctcttctgtaagtaaaacgcatctatatttcattttccaagtgttggaggtattgacagcttaacaaacaaaacatacaaaaaaaatcacaaaaacaaattgaaaagcaaagcacatgattgatcaaggaagagatgcccttaatgaaaatggaacgggatgcatgcaaaacaaaaagaaaactgtctagaggattaactaattgaaggaatataattaatgtgtgtgtaacactgaagctatgcatttgaagagctctgaactgcaccagtgttttcggttgtgctgcaggttgctaagtcaagtcagccttaaccttttgcaccagttggtcggctgtttggcagaacattctcagatcttttcagtcaaaaatctaagatgatttattttgtatcactttgttaaaagctgaatattgttaactacagttaatattaacactgtatttatactttctcaaactacatccgccccaccacttctggttgcctctgttgactattaatccagatgtaaacaaccagatgtttttttctaacttgtacaaactgacgtgtgtcaactatcatggaaggaaaaaaatgtacagattaaaattattcagtgttatgtactgtaagttaatatttttgtagaatggacatcaatctactttgcaaaatttggaggctatttcaacattgcactgtagaaatgtaaagtaatgtatgcaatgtaaaggaaagcccgcggtagctgagcgcttcataacagaatgttctaatcaagtacgtggtatttggggatgtctccaatattgctcttgtattctttctaattgggtttagtgactagttgaaggaaaatgttataacgccatttggttcacatgtgaagtgccctccatagccaaatgttgggatttttttttttttcgtttttggttggactgtttgcagatatttaaattttatgaaatttccaaagattttggttgataacccccttttaccttctaaatgatttgagatgttcttatgttcttactgtgtgttttaaatatatataaaagagccacaagca

SEQ ID NO: 192184 - DNA, 2551 bp, Homo sapiens
  Payload ID: 17968
  Gene Name: transcription factor 4
  ENST ID: ENST00000398339
  CDS Start-End: 131-2452
agtagactcttccagctttgccatggtaacacttgtgcagcattccttttcgaacagtgcccattctcttgatgtctacagtatcacctttcttgtagattggcacttatgcggccaaaggaacaacaccatgttttctaaaaggctggagaaaataccacaggtgcctctcctctttcccttcatcttcatcattttgacaaattactcaaagatggagggtgcagttgaaagccagccatcattttttaaaacttctcaggacattgtaacatgcacttgggttgagaactgctactcgagcttctccaggaggcccttggagcaaatgttttgtaaacaccaatctaagaacattatctcttggacgggcatggtggctcacacctgtaatcccagcactttgggaggccaaggtttgtgtgattttgctaaaatgcatcaccaacagcgaatggctgccttagggacggacaaagagctgagtgatttactggatttcagtgcgatgttttcacctcctgtgagcagtgggaaaaatggaccaacttctttggcaagtggacattttactggctcaaatgtagaagacagaagtagctcagggtcctgggggaatggaggacatccaagcccgtccaggaactatggagatgggactccctatgaccacatgaccagcagggaccttgggtcacatgacaatctctctccaccttttgtcaattccagaatacaaagtaaaacagaaaggggctcatactcatcttatgggagagaatcaaacttacagggttgccaccagcagagtctccttggaggtgacatggatatgggcaacccaggaaccctttcgcccaccaaacctggttcccagtactatcagtattctagcaataatccccgaaggaggcctcttcacagtagtgccatggaggtacagacaaagaaagttcgaaaagttcctccaggtttgccatcttcagtctatgctccatcagcaagcactgccgactacaatagggactcgccaggctatccttcctccaaaccagcaaccagcactttccctagctccttcttcatgcaagatggccatcacagcagtgacccttggagctcctccagtgggatgaatcagcctggctatgcaggaatgttgggcaactcttctcatattccacagtccagcagctactgtagcctgcatccacatgaacgtttgagctatccatcacactcctcagcagacatcaattccagtcttcctccgatgtccactttccatcgtagtggtacaaaccattacagcacctcttcctgtacgcctcctgccaacgggacagacagtataatggcaaatagaggaagcggggcagccggcagctcccagactggagatgctctggggaaagcacttgcttcgatctattctccagatcacactaacaacagcttttcatcaaacccttcaactcctgttggctctcctccatctctctcagcaggcacagctgtttggtctagaaatggaggacaggcctcatcgtctcctaattatgaaggacccttacactctttgcaaagccgaattgaagatcgtttagaaagactggatgatgctattcatgttctccggaaccatgcagtgggcccatccacagctatgcctggtggtcatggggacatgcatggaatcattggaccttctcataatggagccatgggtggtctgggctcagggtatggaaccggccttctttcagccaacagacattcactcatggtggggacccatcgtgaagatggcgtggccctgagaggcagccattctcttctgccaaaccaggttccggttccacagcttcctgtccagtctgcgacttcccctgacctgaacccaccccaggacccttacagaggcatgccaccaggactacaggggcagagtgtctcctctggcagctctgagatcaaatccgatgacgagggtgatgagaacctgcaagacacgaaatcttcggaggacaagaaattagatgacgacaagaaggatatcaaatcaattactaggtcaagatctagcaataatgacgatgaggacctgacaccagagcagaaggcagagcgtgagaaggagcggaggatggccaacaatgcccgagagcgtctgcgggtccgtgacatcaacgaggctttcaaagagctcggccgcatggtgcagctccacctcaagagtgacaagccccagaccaagctcctgatcctccaccaggcggtggccgtcatcctcagtctggagcagcaagtccgagaaaggaatctgaatccgaaagctgcgtgtctgaaaagaagggaggaagagaaggtgtcctcagagcctccccctctctccttggccggcccacaccctggaatgggagacgcatcgaatcacatgggacagatgtaaaagggtccaagttgccacattgcttcattaaaacaagagaccacttccttaacagctgtattatcttaaacccacataaacacttctccttaaccccca

SEQ ID NO: 192185 - DNA, 2372 bp, Homo sapiens
  Payload ID: 17968
  Gene Name: transcription factor 4
  Uniprot ID: P15884
  ENST ID: ENST00000457482
  CDS Start-End: 485-2020
atttgtattctgctcaataatggaccctgttccacttttaccctaaggcagttgagtggaaattttagagaagaaaagggtgcctagaacaaaacaaaacaaaaaaaaaaaaaaaaaggaaaaaaaaaaagaaaagaaaaagaaaaaagtgaagactgcagaaatttgtaagaatcggcattattcgaggaactaataaaaacccctcggaaaagttgaatcgatctcgcgtatgcattaggatttcgagctccatcagggccgggctgccttccagctccgctgcgcaaagttgagcgtctgacagcagcgccgcggcctcccccgcccgccaggaatggtctcttcctgctttgcatattcaccacgcttggcccggccatatgggaaaatgcaactgaaggaattgttgtgaaaaaagggacagcgagtttgaaataaaagttgttagagtggtactgaggagaaaaaagaatccgagaccatgtactgcgcatacacaatcccgggcatgggcggcaactctttgatgtactactataatgggaaagcggtctatgctccatcagcaagcactgccgactacaatagggactcgccaggctatccttcctccaaaccagcaaccagcactttccctagctccttcttcatgcaagatggccatcacagcagtgacccttggagctcctccagtgggatgaatcagcctggctatgcaggaatgttgggcaactcttctcatattccacagtccagcagctactgtagcctgcatccacatgaacgtttgagctatccatcacactcctcagcagacatcaattccagtcttcctccgatgtccactttccatcgtagtggtacaaaccattacagcacctcttcctgtacgcctcctgccaacgggacagacagtataatggcaaatagaggaagcggggcagccggcagctcccagactggagatgctctggggaaagcacttgcttcgatctattctccagatcacactaacaacagcttttcatcaaacccttcaactcctgttggctctcctccatctctctcagcaggcacagctgtttggtctagaaatggaggacaggcctcatcgtctcctaattatgaaggacccttacactctttgcaaagccgaattgaagatcgtttagaaagactggatgatgctattcatgttctccggaaccatgcagtgggcccatccacagctatgcctggtggtcatggggacatgcatggaatcattggaccttctcataatggagccatgggtggtctgggctcagggtatggaaccggccttctttcagccaacagacattcactcatggtggggacccatcgtgaagatggcgtggccctgagaggcagccattctcttctgccaaaccaggttccggttccacagcttcctgtccagtctgcgacttcccctgacctgaacccaccccaggacccttacagaggcatgccaccaggactacaggggcagagtgtctcctctggcagctctgagatcaaatccgatgacgagggtgatgagaacctgcaagacacgaaatcttcggaggacaagaaattagatgacgacaagaaggatatcaaatcaattactaggtcaagatctagcaataatgacgatgaggacctgacaccagagcagaaggcagagcgtgagaaggagcggaggatggccaacaatgcccgagagcgtctgcgggtccgtgacatcaacgaggctttcaaagagctcggccgcatggtgcagctccacctcaagagtgacaagccccagaccaagctcctgatcctccaccaggcggtggccgtcatcctcagtctggagcagcaagtccgagaaaggaatctgaatccgaaagctgcgtgtctgaaaagaagggaggaagagaaggtgtcctcagagcctccccctctctccttggccggcccacaccctggaatgggagacgcatcgaatcacatgggacagatgtaaaagggtccaagttgccacattgcttcattaaaacaagagaccacttccttaacagctgtattatcttaaacccacataaacacttctccttaacccccatttttgtaatataagacaagtctgagtagttatgaatcgcagacgcaagaggtttcagcattcccaattatcaaaaaacagaaaaacaaaaaaaagaaagaaaaaagtgcaacttgagggacgactttctttaacatatcattcagaatgtgcaaagcagtatgtacaggctgagacacagcccagagactgaacggcaatctttccacactgtggaacaatgcatttgtgcctaaacttcttttggaaaaaa

SEQ ID NO: 192186 - DNA, 2399 bp, Homo sapiens
  Payload ID: 17968
  Gene Name: transcription factor 4
  Uniprot ID: P15884
  ENST ID: ENST00000543082
  CDS Start-End: 176-2053
atcattaactcatgttctgtttccatggagcacaggagagtaacaaggaaggccccttaaaagaaaggccttttaaagtggaggtctcagttcacaaactttaaaagtttacgaagtagtattttagaattttaatcaccagatatattgggggaatttattacttcctattcatatggaagaggacagcagagatgtagaagacagaagtagctcagggtcctgggggaatggaggacatccaagcccgtccaggaactatggagatgggactccctatgaccacatgaccagcagggaccttgggtcacatgacaatctctctccaccttttgtcaattccagaatacaaagtaaaacagaaaggggctcatactcatcttatgggagagaatcaaacttacagggttgccaccagcagagtctccttggaggtgacatggatatgggcaacccaggaaccctttcgcccaccaaacctggttcccagtactatcagtattctagcaataatccccgaaggaggcctcttcacagtagtgccatggaggtacagacaaagaaagttcgaaaagttcctccaggtttgccatcttcagtctatgctccatcagcaagcactgccgactacaatagggactcgccaggctatccttcctccaaaccagcaaccagcactttccctagctccttcttcatgcaagatggccatcacagcagtgacccttggagctcctccagtgggatgaatcagcctggctatgcaggaatgttgggcaactcttctcatattccacagtccagcagctactgtagcctgcatccacatgaacgtttgagctatccatcacactcctcagcagacatcaattccagtcttcctccgatgtccactttccatcgtagtggtacaaaccattacagcacctcttcctgtacgcctcctgccaacgggacagacagtataatggcaaatagaggaagcggggcagccggcagctcccagactggagatgctctggggaaagcacttgcttcgatctattctccagatcacactaacaacagcttttcatcaaacccttcaactcctgttggctctcctccatctctctcagcaggcacagctgtttggtctagaaatggaggacaggcctcatcgtctcctaattatgaaggacccttacactctttgcaaagccgaattgaagatcgtttagaaagactggatgatgctattcatgttctccggaaccatgcagtgggcccatccacagctatgcctggtggtcatggggacatgcatggaatcattggaccttctcataatggagccatgggtggtctgggctcagggtatggaaccggccttctttcagccaacagacattcactcatggtggggacccatcgtgaagatggcgtggccctgagaggcagccattctcttctgccaaaccaggttccggttccacagcttcctgtccagtctgcgacttcccctgacctgaacccaccccaggacccttacagaggcatgccaccaggactacaggggcagagtgtctcctctggcagctctgagatcaaatccgatgacgagggtgatgagaacctgcaagacacgaaatcttcggaggacaagaaattagatgacgacaagaaggatatcaaatcaattactagcaataatgacgatgaggacctgacaccagagcagaaggcagagcgtgagaaggagcggaggatggccaacaatgcccgagagcgtctgcgggtccgtgacatcaacgaggctttcaaagagctcggccgcatggtgcagctccacctcaagagtgacaagccccagaccaagctcctgatcctccaccaggcggtggccgtcatcctcagtctggagcagcaagtccgagaaaggaatctgaatccgaaagctgcgtgtctgaaaagaagggaggaagagaaggtgtcctcagagcctccccctctctccttggccggcccacaccctggaatgggagacgcatcgaatcacatgggacagatgtaaaagggtccaagttgccacattgcttcattaaaacaagagaccacttccttaacagctgtattatcttaaacccacataaacacttctccttaacccccatttttgtaatataagacaagtctgagtagttatgaatcgcagacgcaagaggtttcagcattcccaattatcaaaaaacagaaaaacaaaaaaaagaaagaaaaaagtgcaacttgagggacgactttctttaacatatcattcagaatgtgcaaagcagtatgtacaggctgagacacagcccagagactgaacggcaatctttccacactgtggaacaatgcatttgtgcctaaacttcttttgg

SEQ ID NO: 192187 - DNA, 1996 bp, Homo sapiens
  Payload ID: 17968
  Gene Name: transcription factor 4
  Uniprot ID: P15884
  ENST ID: ENST00000537856
  CDS Start-End: 197-1810
agacacaaagatttcctctgctgagtaagcgtgaggccccttaacttgtgaaagcatcatccagaccgtgtgagtctgtctgtgtatgtgcagaacacagaccctcctttctccgtttgtggggaatacttccctcgggtgaaactgaagttaatttttttttttttccaaacacaagagtctccttggaggtgacatggatatgggcaacccaggaaccctttcgcccaccaaacctggttcccagtactatcagtattctagcaataatccccgaaggaggcctcttcacagtagtgccatggaggtacagacaaagaaagttcgaaaagttcctccaggtttgccatcttcagtctatgctccatcagcaagcactgccgactacaatagggactcgccaggctatccttcctccaaaccagcaaccagcactttccctagctccttcttcatgcaagatggccatcacagcagtgacccttggagctcctccagtgggatgaatcagcctggctatgcaggaatgttgggcaactcttctcatattccacagtccagcagctactgtagcctgcatccacatgaacgtttgagctatccatcacactcctcagcagacatcaattccagtcttcctccgatgtccactttccatcgtagtggtacaaaccattacagcacctcttcctgtacgcctcctgccaacgggacagacagtataatggcaaatagaggaagcggggcagccggcagctcccagactggagatgctctggggaaagcacttgcttcgatctattctccagatcacactaacaacagcttttcatcaaacccttcaactcctgttggctctcctccatctctctcagcaggcacagctgtttggtctagaaatggaggacaggcctcatcgtctcctaattatgaaggacccttacactctttgcaaagccgaattgaagatcgtttagaaagactggatgatgctattcatgttctccggaaccatgcagtgggcccatccacagctatgcctggtggtcatggggacatgcatggaatcattggaccttctcataatggagccatgggtggtctgggctcagggtatggaaccggccttctttcagccaacagacattcactcatggtggggacccatcgtgaagatggcgtggccctgagaggcagccattctcttctgccaaaccaggttccggttccacagcttcctgtccagtctgcgacttcccctgacctgaacccaccccaggacccttacagaggcatgccaccaggactacaggggcagagtgtctcctctggcagctctgagatcaaatccgatgacgagggtgatgagaacctgcaagacacgaaatcttcggaggacaagaaattagatgacgacaagaaggatatcaaatcaattactagcaataatgacgatgaggacctgacaccagagcagaaggcagagcgtgagaaggagcggaggatggccaacaatgcccgagagcgtctgcgggtccgtgacatcaacgaggctttcaaagagctcggccgcatggtgcagctccacctcaagagtgacaagccccagaccaagctcctgatcctccaccaggcggtggccgtcatcctcagtctggagcagcaagtccgagaaaggaatctgaatccgaaagctgcgtgtctgaaaagaagggaggaagagaaggtgtcctcagagcctccccctctctccttggccggcccacaccctggaatgggagacgcatcgaatcacatgggacagatgtaaaagggtccaagttgccacattgcttcattaaaacaagagaccacttccttaacagctgtattatcttaaacccacataaacacttctccttaacccccatttttgtaatataagacaagtctgagtagttatgaatcgcagacgcaagaggtttcagcattcccaattatcaaaaaacagaaaaac

SEQ ID NO: 192188 - DNA, 2767 bp, Homo sapiens
  Payload ID: 17968
  Gene Name: transcription factor 4
  Uniprot ID: P15884
  ENST ID: ENST00000537578
  CDS Start-End: 541-2484
ggagcagccgcggccgcagctccttctctttataagcccgcagttcccggatgtgaatggattacaatgtatctttcagggaaacctattattatcaatgtgactccacgggggagtccatggtgatgatgatgaggaggaggatgatgatgatgagacacctctaaacttggaacaagtttaagactttatgagagaagaaaaaaaatcaccaacaagaattgtttgaggaaaaattataactatcctgtgttcatttttttttttataaacaataagaaaaagttgttggatttttttttaatgatttcttttttgggggagggaattttgttgcagttttatggtggaaaatgcaaaaaccagagccaggtgcataatcttgtaatctgtggatatccctggagcaggactgagtaccagttaaaatactttttggggatacacatgtgagatactaagtacttgcagaagatttttgtctctctttttaaagtctctttccttggaatattgtgagaatatttgtggccatttaagatgttttcacctcctgtgagcagtgggaaaaatggaccaacttctttggcaagtggacattttactggctcaaatgtagaagacagaagtagctcagggtcctgggggaatggaggacatccaagcccgtccaggaactatggagatgggactccctatgaccacatgaccagcagggaccttgggtcacatgacaatctctctccaccttttgtcaattccagaatacaaagtaaaacagaaaggggctcatactcatcttatgggagagaatcaaacttacagggttgccaccagcagagtctccttggaggtgacatggatatgggcaacccaggaaccctttcgcccaccaaacctggttcccagtactatcagtattctagcaataatccccgaaggaggcctcttcacagtagtgccatggaggtacagacaaagaaagttcgaaaagttcctccaggtttgccatcttcagtctatgctccatcagcaagcactgccgactacaatagggactcgccaggctatccttcctccaaaccagcaaccagcactttccctagctccttcttcatgcaagatggccatcacagcagtgacccttggagctcctccagtgggatgaatcagcctggctatgcaggaatgttgggcaactcttctcatattccacagtccagcagctactgtagcctgcatccacatgaacgtttgagctatccatcacactcctcagcagacatcaattccagtcttcctccgatgtccactttccatcgtagtggtacaaaccattacagcacctcttcctgtacgcctcctgccaacgggacagacagtataatggcaaatagaggaagcggggcagccggcagctcccagactggagatgctctggggaaagcacttgcttcgatctattctccagatcacactaacaacagcttttcatcaaacccttcaactcctgttggctctcctccatctctctcagcaggcacagctgtttggtctagaaatggaggacaggcctcatcgtctcctaattatgaaggacccttacactctttgcaaagccgaattgaagatcgtttagaaagactggatgatgctattcatgttctccggaaccatgcagtgggcccatccacagctatgcctggtggtcatggggacatgcatggaatcattggaccttctcataatggagccatgggtggtctgggctcagggtatggaaccggccttctttcagccaacagacattcactcatggtggggacccatcgtgaagatggcgtggccctgagaggcagccattctcttctgccaaaccaggttccggttccacagcttcctgtccagtctgcgacttcccctgacctgaacccaccccaggacccttacagaggcatgccaccaggactacaggggcagagtgtctcctctggcagctctgagatcaaatccgatgacgagggtgatgagaacctgcaagacacgaaatcttcggaggacaagaaattagatgacgacaagaaggatatcaaatcaattactaggtcaagatctagcaataatgacgatgaggacctgacaccagagcagaaggcagagcgtgagaaggagcggaggatggccaacaatgcccgagagcgtctgcgggtccgtgacatcaacgaggctttcaaagagctcggccgcatggtgcagctccacctcaagagtgacaagccccagaccaagctcctgatcctccaccaggcggtggccgtcatcctcagtctggagcagcaagtccgagaaaggaatctgaatccgaaagctgcgtgtctgaaaagaagggaggaagagaaggtgtcctcagagcctccccctctctccttggccggcccacaccctggaatgggagacgcatcgaatcacatgggacagatgtaaaagggtccaagttgccacattgcttcattaaaacaagagaccacttccttaacagctgtattatcttaaacccacataaacacttctccttaacccccatttttgtaatataagacaagtctgagtagttatgaatcgcagacgcaagaggtttcagcattcccaattatcaaaaaacagaaaaacaaaaaaaagaaagaaaaaagtgcaacttgagggacgactttctttaacatatcattcagaatgtgcaaagcagtatgtacaggctgagacacagccc

SEQ ID NO: 192189 - DNA, 2264 bp, Homo sapiens
  Payload ID: 17968
  Gene Name: transcription factor 4
  Uniprot ID: P15884
  ENST ID: ENST00000544241
  CDS Start-End: 282-2084
gactcagaattttgaatagtttctttgctaaattcaccatctggagagcctgtgattgattagttttggcctcactattaagtgtcaatataatcaatgggaattactaggctagggtcattacatagataatttgcctgctgtgtaaataaaaatgaaattgtttaaattttgtgcaagagaaagtgaaaataaggagttacgatttgtttgttagagaaagtggaggccattggaatgacagtttttggaagtgtggagcagtttggctaagaataggaatgaaggatatttttttccagtttatcatagccagagtgaggaagtgttattccctctcttgcttgcatacattgccagtagtgcctactttacgtaaaacagaaaggggctcatactcatcttatgggagagaatcaaacttacagggttgccaccagagtctccttggaggtgacatggatatgggcaacccaggaaccctttcgcccaccaaacctggttcccagtactatcagtattctagcaataatccccgaaggaggcctcttcacagtagtgccatggaggtacagacaaagaaagttcgaaaagttcctccaggtttgccatcttcagtctatgctccatcagcaagcactgccgactacaatagggactcgccaggctatccttcctccaaaccagcaaccagcactttccctagctccttcttcatgcaagatggccatcacagcagtgacccttggagctcctccagtgggatgaatcagcctggctatgcaggaatgttgggcaactcttctcatattccacagtccagcagctactgtagcctgcatccacatgaacgtttgagctatccatcacactcctcagcagacatcaattccagtcttcctccgatgtccactttccatcgtagtggtacaaaccattacagcacctcttcctgtacgcctcctgccaacgggacagacagtataatggcaaatagaggaagcggggcagccggcagctcccagactggagatgctctggggaaagcacttgcttcgatctattctccagatcacactaacaacagcttttcatcaaacccttcaactcctgttggctctcctccatctctctcagcaggcacagctgtttggtctagaaatggaggacaggcctcatcgtctcctaattatgaaggacccttacactctttgcaaagccgaattgaagatcgtttagaaagactggatgatgctattcatgttctccggaaccatgcagtgggcccatccacagctatgcctggtggtcatggggacatgcatggaatcattggaccttctcataatggagccatgggtggtctgggctcagggtatggaaccggccttctttcagccaacagacattcactcatggtggggacccatcgtgaagatggcgtggccctgagaggcagccattctcttctgccaaaccaggttccggttccacagcttcctgtccagtctgcgacttcccctgacctgaacccaccccaggacccttacagaggcatgccaccaggactacaggggcagagtgtctcctctggcagctctgagatcaaatccgatgacgagggtgatgagaacctgcaagacacgaaatcttcggaggacaagaaattagatgacgacaagaaggatatcaaatcaattactaggtcaagatctagcaataatgacgatgaggacctgacaccagagcagaaggcagagcgtgagaaggagcggaggatggccaacaatgcccgagagcgtctgcgggtccgtgacatcaacgaggctttcaaagagctcggccgcatggtgcagctccacctcaagagtgacaagccccagaccaagctcctgatcctccaccaggcggtggccgtcatcctcagtctggagcagcaagtccgagaaaggaatctgaatccgaaagctgcgtgtctgaaaagaagggaggaagagaaggtgtcctcagagcctccccctctctccttggccggcccacaccctggaatgggagacgcatcgaatcacatgggacagatgtaaaagggtccaagttgccacattgcttcattaaaacaagagaccacttccttaacagctgtattatcttaaacccacataaacacttctccttaacccccatttttgtaatataagacaagtctgagtagttatgaatcgcagacgcaagaggtttcagcattcccaattatcaaaaaacag

SEQ ID NO: 192190 - DNA, 2572 bp, Homo sapiens
  Payload ID: 17968
  Gene Name: transcription factor 4
  Uniprot ID: P15884
  ENST ID: ENST00000540999
  CDS Start-End: 296-2227
cttttggagaaatggctttcggaagttttgccaggaaacgtagccctaggcaggcagctttgcagccccctttctgcttgttgcactttctccattcgttcctttgctttttgcaggctctgactcagggaaggtgtgcattatccactagatacgtcgaagaagagggaaaccaattagggtcgaaataaatgctggagagagagggagtgaaagagagagtgagagtgagagagagagagagtcttgcttcaaattgctctcctgttagagacgaaatgagaatttagtgcagatgttttcacctcctgtgagcagtgggaaaaatggaccaacttctttggcaagtggacattttactggctcaaatgtagaagacagaagtagctcagggtcctgggggaatggaggacatccaagcccgtccaggaactatggagatgggactccctatgaccacatgaccagcagggaccttgggtcacatgacaatctctctccaccttttgtcaattccagaatacaaagtaaaacagaaaggggctcatactcatcttatgggagagaatcaaacttacagggttgccaccagcagagtctccttggaggtgacatggatatgggcaacccaggaaccctttcgcccaccaaacctggttcccagtactatcagtattctagcaataatccccgaaggaggcctcttcacagtagtgccatggaggtacagacaaagaaagttcgaaaagttcctccaggtttgccatcttcagtctatgctccatcagcaagcactgccgactacaatagggactcgccaggctatccttcctccaaaccagcaaccagcactttccctagctccttcttcatgcaagatggccatcacagcagtgacccttggagctcctccagtgggatgaatcagcctggctatgcaggaatgttgggcaactcttctcatattccacagtccagcagctactgtagcctgcatccacatgaacgtttgagctatccatcacactcctcagcagacatcaattccagtcttcctccgatgtccactttccatcgtagtggtacaaaccattacagcacctcttcctgtacgcctcctgccaacgggacagacagtataatggcaaatagaggaagcggggcagccggcagctcccagactggagatgctctggggaaagcacttgcttcgatctattctccagatcacactaacaacagcttttcatcaaacccttcaactcctgttggctctcctccatctctctcagcaggcacagctgtttggtctagaaatggaggacaggcctcatcgtctcctaattatgaaggacccttacactctttgcaaagccgaattgaagatcgtttagaaagactggatgatgctattcatgttctccggaaccatgcagtgggcccatccacagctatgcctggtggtcatggggacatgcatggaatcattggaccttctcataatggagccatgggtggtctgggctcagggtatggaaccggccttctttcagccaacagacattcactcatggtggggacccatcgtgaagatggcgtggccctgagaggcagccattctcttctgccaaaccaggttccggttccacagcttcctgtccagtctgcgacttcccctgacctgaacccaccccaggacccttacagaggcatgccaccaggactacaggggcagagtgtctcctctggcagctctgagatcaaatccgatgacgagggtgatgagaacctgcaagacacgaaatcttcggaggacaagaaattagatgacgacaagaaggatatcaaatcaattactagcaataatgacgatgaggacctgacaccagagcagaaggcagagcgtgagaaggagcggaggatggccaacaatgcccgagagcgtctgcgggtccgtgacatcaacgaggctttcaaagagctcggccgcatggtgcagctccacctcaagagtgacaagccccagaccaagctcctgatcctccaccaggcggtggccgtcatcctcagtctggagcagcaagtccgagaaaggaatctgaatccgaaagctgcgtgtctgaaaagaagggaggaagagaaggtgtcctcagagcctccccctctctccttggccggcccacaccctggaatgggagacgcatcgaatcacatgggacagatgtaaaagggtccaagttgccacattgcttcattaaaacaagagaccacttccttaacagctgtattatcttaaacccacataaacacttctccttaacccccatttttgtaatataagacaagtctgagtagttatgaatcgcagacgcaagaggtttcagcattcccaattatcaaaaaacagaaaaacaaaaaaaagaaagaaaaaagtgcaacttgagggacgactttctttaacatatcattcagaatgtgcaaagcagtatgtacaggctgagacacagcccagagactgaacggcaatctttccacactgtggaacaatgcatttgtgcctaaacttcttttg

SEQ ID NO: 192191 - DNA, 568 bp, Homo sapiens
  Payload ID: 17968
  Gene Name: transcription factor 4
  ENST ID: ENST00000564343
  CDS Start-End: 164-568
gatgatgcttgtgataatgcagcaaaaagtaatgtctaaatgtaagatattattttgagatgagaacaccgaatggggatggaagacaggaatcttcaccatgtgtgaatgtacaggaaacaaccaataaatgccttaattcttgttctgtaaaaacttacatatgttttcacctcctgtgagcagtgggaaaaatggaccaacttctttggcaagtggacattttactggctcaaatgtagaagacagaagtagctcagggtcctgggggaatggaggacatccaagcccgtccaggaactatggagatgggactccctatgaccacatgaccagcagggaccttgggtcacatgacaatctctctccaccttttgtcaattccagaatacaaagtaaaacagaaaggggctcatactcatcttatgggagagaatcaaacttacagggttgccaccagcagagtctccttggaggtgacatggatatgggcaacccaggaaccctttcgcccaccaaacctggttcccagtactatcagtattctagcaataatccccgaaggagg

SEQ ID NO: 192192 - DNA, 585 bp, Homo sapiens
  Payload ID: 17968
  Gene Name: transcription factor 4
  ENST ID: ENST00000569357
  CDS Start-End: 1-373
ttctaaaaggctggagaaaataccacaggtgcctctcctctttcccttcatcttcatcattttgacaaattactcaaagatggagggtgcagttgaaagccagccatcattttttaaaacttctcaggacattgtaacatgcacttgggttgagaactgctactcgagcttctccaggaggcccttggagcaaatgttttgtaaacaccaatctaagaacattatctcttggacgggcatggtggctcacacctgtaatcccagcactttgggaggccaagatgttttcacctcctgtgagcagtgggaaaaatggaccaacttctttggcaagtggacattttactggctcaaatgtagaagacagaagtagctcagggtcctgggggaatggaggacatccaagcccgtccaggaactatggagatgggactccctatgaccacatgaccagcagggaccttgggtcacatgacaatctctctccaccttttgtcaattccagaatacaaagtaaaacagaaaggggctcatactcatcttatgggagagaatcaaacttacagggttgccaccagagtctcc

SEQ ID NO: 192193 - DNA, 1948 bp, Homo sapiens
  Payload ID: 17968
  Gene Name: transcription factor 4
  Uniprot ID: P15884
  ENST ID: ENST00000567880
  CDS Start-End: 1-1824
atgcatcaccaacagcgaatggctgccttagggacggacaaagagctgagtgatttactggatttcagtgcgatgttttcacctcctgtgagcagtgggaaaaatggaccaacttctttggcaagtggacattttactggctcaaatgtagaagacagaagtagctcagggtcctgggggaatggaggacatccaagcccgtccaggaactatggagatgggactccctatgaccacatgaccagcagggaccttgggtcacatgacaatctctctccaccttttgtcaattccagaatacaaagtaaaacagaaaggggctcatactcatcttatgggagagaatcaaacttacagggttgccaccaggtctatgctccatcagcaagcactgccgactacaatagggactcgccaggctatccttcctccaaaccagcaaccagcactttccctagctccttcttcatgcaagatggccatcacagcagtgacccttggagctcctccagtgggatgaatcagcctggctatgcaggaatgttgggcaactcttctcatattccacagtccagcagctactgtagcctgcatccacatgaacgtttgagctatccatcacactcctcagcagacatcaattccagtcttcctccgatgtccactttccatcgtagtggtacaaaccattacagcacctcttcctgtacgcctcctgccaacgggacagacagtataatggcaaatagaggaagcggggcagccggcagctcccagactggagatgctctggggaaagcacttgcttcgatctattctccagatcacactaacaacagcttttcatcaaacccttcaactcctgttggctctcctccatctctctcagcaggcacagctgtttggtctagaaatggaggacaggcctcatcgtctcctaattatgaaggacccttacactctttgcaaagccgaattgaagatcgtttagaaagactggatgatgctattcatgttctccggaaccatgcagtgggcccatccacagctatgcctggtggtcatggggacatgcatggaatcattggaccttctcataatggagccatgggtggtctgggctcagggtatggaaccggccttctttcagccaacagacattcactcatggtggggacccatcgtgaagatggcgtggccctgagaggcagccattctcttctgccaaaccaggttccggttccacagcttcctgtccagtctgcgacttcccctgacctgaacccaccccaggacccttacagaggcatgccaccaggactacaggggcagagtgtctcctctggcagctctgagatcaaatccgatgacgagggtgatgagaacctgcaagacacgaaatcttcggaggacaagaaattagatgacgacaagaaggatatcaaatcaattactagcaataatgacgatgaggacctgacaccagagcagaaggcagagcgtgagaaggagcggaggatggccaacaatgcccgagagcgtctgcgggtccgtgacatcaacgaggctttcaaagagctcggccgcatggtgcagctccacctcaagagtgacaagccccagaccaagctcctgatcctccaccaggcggtggccgtcatcctcagtctggagcagcaagtccgagaaaggaatctgaatccgaaagctgcgtgtctgaaaagaagggaggaagagaaggtgtcctcagagcctccccctctctccttggccggcccacaccctggaatgggagacgcatcgaatcacatgggacagatgtaaaagggtccaagttgccacattgcttcattaaaacaagagaccacttccttaacagctgtattatcttaaacccacataaacacttctccttaacccccatttttgtaatataagacaagtctga

SEQ ID NO: 192194 - DNA, 314 bp, Homo sapiens
  Payload ID: 17968
  Gene Name: transcription factor 4
  ENST ID: ENST00000565393
  CDS Start-End: 1-184
gaacattatctcttggacgggcatggtggctcacacctgtaatcccagcactttgggaggccaagatggagtctcattctgtcatccagaccggagtgcagtggcaccatctcagctcactgcaacctccacctcccaggttcaagctatcctcctgcctcagcctcctgagtacccgggataggcgtttgtgtgattttgctaaaatgcatcaccaacagcgaatggctgccttagggacggacaaagagctgagtgatttactggatttcagtgcgatgttttcacctcctgtgagcagtgggaaaaatgga

SEQ ID NO: 192195 - DNA, 805 bp, Homo sapiens
  Payload ID: 17968
  Gene Name: transcription factor 4
  ENST ID: ENST00000565908
  CDS Start-End: 177-805
agggatcttggctgtgtgtctgcggatctgtagtggcggcggcggcggcggcggcggggaggcagcaggcgcgggagcgggcgcaggagcaggcggcggcggtggcggcggcggttagacatgaacgccgcctcggcgccggcggtgcacggagagccccttctcgcgcgcgggcgatgttttcacctcctgtgagcagtgggaaaaatggaccaacttctttggcaagtggacattttactggctcaaatgtagaagacagaagtagctcagggtcctgggggaatggaggacatccaagcccgtccaggaactatggagatgggactccctatgaccacatgaccagcagggaccttgggtcacatgacaatctctctccaccttttgtcaattccagaatacaaagtaaaacagaaaggggctcatactcatcttatgggagagaatcaaacttacagggttgccaccagcagagtctccttggaggtgacatggatatgggcaacccaggaaccctttcgcccaccaaacctggttcccagtactatcagtattctagcaataatccccgaaggaggcctcttcacagtagtgccatggaggtacagacaaagaaagttcgaaaagttcctccaggtttgccatcttcagtctatgctccatcagcaagcactgccgactacaatagggactcgccaggctatccttcctccaaaccagcaaccagcactttccctagctccttcttcatgcaagatggccatcacagcagtgacccttggagctcctccagtgggatgaa

SEQ ID NO: 192196 - DNA, 1872 bp, Homo sapiens
  Payload ID: 17968
  Gene Name: transcription factor 4
  Uniprot ID: P15884
  ENST ID: ENST00000570177
  CDS Start-End: 208-1821
agtttactcccttggcccagccaccaattcagtcatattcggcatctgaaagatttgttgcattgaggtgaacagtgcttggttaagagctcctgccggagtgcagttcatggcagtttgtttggaaagaattctgcaggaaagaaatttacagccattccagcgcaacggaaacatctttggaatcagagtctccttggaggtgacatggatatgggcaacccaggaaccctttcgcccaccaaacctggttcccagtactatcagtattctagcaataatccccgaaggaggcctcttcacagtagtgccatggaggtacagacaaagaaagttcgaaaagttcctccaggtttgccatcttcagtctatgctccatcagcaagcactgccgactacaatagggactcgccaggctatccttcctccaaaccagcaaccagcactttccctagctccttcttcatgcaagatggccatcacagcagtgacccttggagctcctccagtgggatgaatcagcctggctatgcaggaatgttgggcaactcttctcatattccacagtccagcagctactgtagcctgcatccacatgaacgtttgagctatccatcacactcctcagcagacatcaattccagtcttcctccgatgtccactttccatcgtagtggtacaaaccattacagcacctcttcctgtacgcctcctgccaacgggacagacagtataatggcaaatagaggaagcggggcagccggcagctcccagactggagatgctctggggaaagcacttgcttcgatctattctccagatcacactaacaacagcttttcatcaaacccttcaactcctgttggctctcctccatctctctcagcaggcacagctgtttggtctagaaatggaggacaggcctcatcgtctcctaattatgaaggacccttacactctttgcaaagccgaattgaagatcgtttagaaagactggatgatgctattcatgttctccggaaccatgcagtgggcccatccacagctatgcctggtggtcatggggacatgcatggaatcattggaccttctcataatggagccatgggtggtctgggctcagggtatggaaccggccttctttcagccaacagacattcactcatggtggggacccatcgtgaagatggcgtggccctgagaggcagccattctcttctgccaaaccaggttccggttccacagcttcctgtccagtctgcgacttcccctgacctgaacccaccccaggacccttacagaggcatgccaccaggactacaggggcagagtgtctcctctggcagctctgagatcaaatccgatgacgagggtgatgagaacctgcaagacacgaaatcttcggaggacaagaaattagatgacgacaagaaggatatcaaatcaattactagcaataatgacgatgaggacctgacaccagagcagaaggcagagcgtgagaaggagcggaggatggccaacaatgcccgagagcgtctgcgggtccgtgacatcaacgaggctttcaaagagctcggccgcatggtgcagctccacctcaagagtgacaagccccagaccaagctcctgatcctccaccaggcggtggccgtcatcctcagtctggagcagcaagtccgagaaaggaatctgaatccgaaagctgcgtgtctgaaaagaagggaggaagagaaggtgtcctcagagcctccccctctctccttggccggcccacaccctggaatgggagacgcatcgaatcacatgggacagatgtaaaagggtccaagttgccacattgcttcattaaaacaagagaccacttcctta

SEQ ID NO: 192197 - DNA, 597 bp, Homo sapiens
  Payload ID: 17968
  Gene Name: transcription factor 4
  ENST ID: ENST00000562847
  CDS Start-End: 429-597
attatccactagatacgtcgaagaagagggaaaccaattagggtcgaaataaatgctggagagagagggagtgaaagagagagtgagagtgagagagagagagagtcttgcttcaaattgctctcctgttagagacgaaatgagaatttagtgcagatgttttcacctcctgtgagcagtgggaaaaatggaccaacttctttggcaagtggacattttactggctcaaactgaacttgctgccattgaaagtcaatgaggaagcaagtagatctggaatcctatgaccatgagagaagcctgctttagggtgaagttgacatggaagtgtcagagatgtagaagacagaagtagctcagggtcctgggggaatggaggacatccaagcccgtccaggaactatggagatgggactccctatgaccacatgaccagcagggaccttgggtcacatgacaatctctctccaccttttgtcaattccagaatacaaagtaaaacagaaaggggctcatactcatcttatgggagagaatcaaacttacagggttgccaccagcagagtctccttggaggtgacatggatatgggcaacc

SEQ ID NO: 192198 - DNA, 602 bp, Homo sapiens
  Payload ID: 17968
  Gene Name: transcription factor 4
  ENST ID: ENST00000562607
  CDS Start-End: 112-602
tgcaaaccaaagagaaaggcaaaatctcagtatcttgggcttcaagtctaaatagcagatcacagctgaaatgattccccactgtgtgacaagagtctccttggaggtgacatggatatgggcaacccaggaaccctttcgcccaccaaacctggttcccagtactatcagtattctagcaataatccccgaaggaggcctcttcacagtagtgccatggaggtacagacaaagaaagttcgaaaagttcctccaggtttgccatcttcagtctatgctccatcagcaagcactgccgactacaatagggactcgccaggctatccttcctccaaaccagcaaccagcactttccctagctccttcttcatgcaagatggccatcacagcagtgacccttggagctcctccagtgggatgaatcagcctggctatgcaggaatgttgggcaactcttctcatattccacagtccagcagctactgtagcctgcatccacatgaacgtttgagctatccatcacactcctcagcagacatcaattccagtcttcctccgatgtccactttccatcgtagtggtacaaaccattacagcacctc

SEQ ID NO: 192199 - DNA, 2398 bp, Homo sapiens
  Payload ID: 17968
  Gene Name: transcription factor 4
  Uniprot ID: P15884
  ENST ID: ENST00000568673
  CDS Start-End: 99-2042
gagagagagggagtgaaagagagagtgagagtgagagagagagagagtcttgcttcaaattgctctcctgttagagacgaaatgagaatttagtgcagatgttttcacctcctgtgagcagtgggaaaaatggaccaacttctttggcaagtggacattttactggctcaaatgtagaagacagaagtagctcagggtcctgggggaatggaggacatccaagcccgtccaggaactatggagatgggactccctatgaccacatgaccagcagggaccttgggtcacatgacaatctctctccaccttttgtcaattccagaatacaaagtaaaacagaaaggggctcatactcatcttatgggagagaatcaaacttacagggttgccaccagcagagtctccttggaggtgacatggatatgggcaacccaggaaccctttcgcccaccaaacctggttcccagtactatcagtattctagcaataatccccgaaggaggcctcttcacagtagtgccatggaggtacagacaaagaaagttcgaaaagttcctccaggtttgccatcttcagtctatgctccatcagcaagcactgccgactacaatagggactcgccaggctatccttcctccaaaccagcaaccagcactttccctagctccttcttcatgcaagatggccatcacagcagtgacccttggagctcctccagtgggatgaatcagcctggctatgcaggaatgttgggcaactcttctcatattccacagtccagcagctactgtagcctgcatccacatgaacgtttgagctatccatcacactcctcagcagacatcaattccagtcttcctccgatgtccactttccatcgtagtggtacaaaccattacagcacctcttcctgtacgcctcctgccaacgggacagacagtataatggcaaatagaggaagcggggcagccggcagctcccagactggagatgctctggggaaagcacttgcttcgatctattctccagatcacactaacaacagcttttcatcaaacccttcaactcctgttggctctcctccatctctctcagcaggcacagctgtttggtctagaaatggaggacaggcctcatcgtctcctaattatgaaggacccttacactctttgcaaagccgaattgaagatcgtttagaaagactggatgatgctattcatgttctccggaaccatgcagtgggcccatccacagctatgcctggtggtcatggggacatgcatggaatcattggaccttctcataatggagccatgggtggtctgggctcagggtatggaaccggccttctttcagccaacagacattcactcatggtggggacccatcgtgaagatggcgtggccctgagaggcagccattctcttctgccaaaccaggttccggttccacagcttcctgtccagtctgcgacttcccctgacctgaacccaccccaggacccttacagaggcatgccaccaggactacaggggcagagtgtctcctctggcagctctgagatcaaatccgatgacgagggtgatgagaacctgcaagacacgaaatcttcggaggacaagaaattagatgacgacaagaaggatatcaaatcaattactaggtcaagatctagcaataatgacgatgaggacctgacaccagagcagaaggcagagcgtgagaaggagcggaggatggccaacaatgcccgagagcgtctgcgggtccgtgacatcaacgaggctttcaaagagctcggccgcatggtgcagctccacctcaagagtgacaagccccagaccaagctcctgatcctccaccaggcggtggccgtcatcctcagtctggagcagcaagtccgagaaaggaatctgaatccgaaagctgcgtgtctgaaaagaagggaggaagagaaggtgtcctcagagcctccccctctctccttggccggcccacaccctggaatgggagacgcatcgaatcacatgggacagatgtaaaagggtccaagttgccacattgcttcattaaaacaagagaccacttccttaacagctgtattatcttaaacccacataaacacttctccttaacccccatttttgtaatataagacaagtctgagtagttatgaatcgcagacgcaagaggtttcagcattcccaattatcaaaaaacagaaaaacaaaaaaaagaaagaaaaaagtgcaacttgagggacgactttctttaacatatcattcagaatgtgcaaagcagtatgtacaggctgagacacagcccagagactgaacggcaatctttccacactgtggaacaatgcatttgtgcctaaacttcttttggaaaaaaaaaa

SEQ ID NO: 192200 - DNA, 550 bp, Homo sapiens
  Payload ID: 17968
  Gene Name: transcription factor 4
  ENST ID: ENST00000568147
  CDS Start-End: 55-550
gcattatccactagatacgtcgaagaagagggaaaccaattagggtcgaaataaatgctggagagagagggagtgaaagagagagtgagaatgttttcacctcctgtgagcagtgggaaaaatggaccaacttctttggcaagtggacattttactggctcaaatgtagaagacagaagtagctcagggtcctgggggaatggaggacatccaagcccgtccaggaactatggagatgggactccctatgaccacatgaccagcagggaccttgggtcacatgacaatctctctccaccttttgtcaattccagaatacaaagtaaaacagaaaggggctcatactcatcttatgggagagaatcaaacttacagggttgccaccagcagagtctccttggaggtgacatggatatgggcaacccaggaaccctttcgcccaccaaacctggttcccagtactatcagtattctagcaataatccccgaaggaggcctcttcacagtagtgccatggaggtacagacaaagaaagttcgaaaagttcctc

SEQ ID NO: 192201 - DNA, 2184 bp, Homo sapiens
  Payload ID: 17968
  Gene Name: transcription factor 4
  Uniprot ID: P15884
  ENST ID: ENST00000561992
  CDS Start-End: 400-2013
ataggaaagtacttttatttgtgacccaagtatgagaatttctggcaaactttttttttaatattaaaaaaaaccccccaaaccctccaccttttcccttctttccttttccctttcaagactatttaaatgtacatagtaaaacatgttaggacagccaagccccagcatgttgtgttctgtcctctggctggcagattcacgccacaacagtttattcatccacatgctttttggcgactcttcatcacgtatttgggcttagatcttctggtgcctccctcggcgtgctacccataaggtcgaaagaaaagtaaaacagaaaggggctcatactcatcttatgggagagaatcaaacttacagggttgccaccagcagagtctccttggaggtgacatggatatgggcaacccaggaaccctttcgcccaccaaacctggttcccagtactatcagtattctagcaataatccccgaaggaggcctcttcacagtagtgccatggaggtacagacaaagaaagttcgaaaagttcctccaggtttgccatcttcagtctatgctccatcagcaagcactgccgactacaatagggactcgccaggctatccttcctccaaaccagcaaccagcactttccctagctccttcttcatgcaagatggccatcacagcagtgacccttggagctcctccagtgggatgaatcagcctggctatgcaggaatgttgggcaactcttctcatattccacagtccagcagctactgtagcctgcatccacatgaacgtttgagctatccatcacactcctcagcagacatcaattccagtcttcctccgatgtccactttccatcgtagtggtacaaaccattacagcacctcttcctgtacgcctcctgccaacgggacagacagtataatggcaaatagaggaagcggggcagccggcagctcccagactggagatgctctggggaaagcacttgcttcgatctattctccagatcacactaacaacagcttttcatcaaacccttcaactcctgttggctctcctccatctctctcagcaggcacagctgtttggtctagaaatggaggacaggcctcatcgtctcctaattatgaaggacccttacactctttgcaaagccgaattgaagatcgtttagaaagactggatgatgctattcatgttctccggaaccatgcagtgggcccatccacagctatgcctggtggtcatggggacatgcatggaatcattggaccttctcataatggagccatgggtggtctgggctcagggtatggaaccggccttctttcagccaacagacattcactcatggtggggacccatcgtgaagatggcgtggccctgagaggcagccattctcttctgccaaaccaggttccggttccacagcttcctgtccagtctgcgacttcccctgacctgaacccaccccaggacccttacagaggcatgccaccaggactacaggggcagagtgtctcctctggcagctctgagatcaaatccgatgacgagggtgatgagaacctgcaagacacgaaatcttcggaggacaagaaattagatgacgacaagaaggatatcaaatcaattactagcaataatgacgatgaggacctgacaccagagcagaaggcagagcgtgagaaggagcggaggatggccaacaatgcccgagagcgtctgcgggtccgtgacatcaacgaggctttcaaagagctcggccgcatggtgcagctccacctcaagagtgacaagccccagaccaagctcctgatcctccaccaggcggtggccgtcatcctcagtctggagcagcaagtccgagaaaggaatctgaatccgaaagctgcgtgtctgaaaagaagggaggaagagaaggtgtcctcagagcctccccctctctccttggccggcccacaccctggaatgggagacgcatcgaatcacatgggacagatgtaaaagggtccaagttgccacattgcttcattaaaacaagagaccacttccttaacagctgtattatcttaaacccacataaacacttctccttaacccccatttttgtaatataagacaagtctgagtagttatgaatcgcagacgcaagaggtttcagcattcccaattatc

SEQ ID NO: 192202 - DNA, 1915 bp, Homo sapiens
  Payload ID: 17968
  Gene Name: transcription factor 4
  Uniprot ID: P15884
  ENST ID: ENST00000564228
  CDS Start-End: 1-1791
atgaaggatatttttttccagtttatcatagccagagtgaggaagtgttattccctctcttgcttgcatacattgccagtagtgcctactttacgtaaaacagaaaggggctcatactcatcttatgggagagaatcaaacttacagggttgccaccagagtctccttggaggtgacatggatatgggcaacccaggaaccctttcgcccaccaaacctggttcccagtactatcagtattctagcaataatccccgaaggaggcctcttcacagtagtgccatggaggtacagacaaagaaagttcgaaaagttcctccaggtttgccatcttcagtctatgctccatcagcaagcactgccgactacaatagggactcgccaggctatccttcctccaaaccagcaaccagcactttccctagctccttcttcatgcaagatggccatcacagcagtgacccttggagctcctccagtgggatgaatcagcctggctatgcaggaatgttgggcaactcttctcatattccacagtccagcagctactgtagcctgcatccacatgaacgtttgagctatccatcacactcctcagcagacatcaattccagtcttcctccgatgtccactttccatcgtagtggtacaaaccattacagcacctcttcctgtacgcctcctgccaacgggacagacagtataatggcaaatagaggaagcggggcagccggcagctcccagactggagatgctctggggaaagcacttgcttcgatctattctccagatcacactaacaacagcttttcatcaaacccttcaactcctgttggctctcctccatctctctcagcaggcacagctgtttggtctagaaatggaggacaggcctcatcgtctcctaattatgaaggacccttacactctttgcaaagccgaattgaagatcgtttagaaagactggatgatgctattcatgttctccggaaccatgcagtgggcccatccacagctatgcctggtggtcatggggacatgcatggaatcattggaccttctcataatggagccatgggtggtctgggctcagggtatggaaccggccttctttcagccaacagacattcactcatggtggggacccatcgtgaagatggcgtggccctgagaggcagccattctcttctgccaaaccaggttccggttccacagcttcctgtccagtctgcgacttcccctgacctgaacccaccccaggacccttacagaggcatgccaccaggactacaggggcagagtgtctcctctggcagctctgagatcaaatccgatgacgagggtgatgagaacctgcaagacacgaaatcttcggaggacaagaaattagatgacgacaagaaggatatcaaatcaattactagcaataatgacgatgaggacctgacaccagagcagaaggcagagcgtgagaaggagcggaggatggccaacaatgcccgagagcgtctgcgggtccgtgacatcaacgaggctttcaaagagctcggccgcatggtgcagctccacctcaagagtgacaagccccagaccaagctcctgatcctccaccaggcggtggccgtcatcctcagtctggagcagcaagtccgagaaaggaatctgaatccgaaagctgcgtgtctgaaaagaagggaggaagagaaggtgtcctcagagcctccccctctctccttggccggcccacaccctggaatgggagacgcatcgaatcacatgggacagatgtaaaagggtccaagttgccacattgcttcattaaaacaagagaccacttccttaacagctgtattatcttaaacccacataaacacttctccttaacccccatttttgtaatataagacaagtctga

SEQ ID NO: 192203 - DNA, 561 bp, Homo sapiens
  Payload ID: 17968
  Gene Name: transcription factor 4
  ENST ID: ENST00000569012
  CDS Start-End: 74-561
aagagaggtggatggattggcatgtgatggctgaatttctgggccttgggagcagagtctccttggaggtgacatggatatgggcaacccaggaaccctttcgcccaccaaacctggttcccagtactatcagtattctagcaataatccccgaaggaggcctcttcacagtagtgccatggaggtacagacaaagaaagttcgaaaagttcctccaggtttgccatcttcagtctatgctccatcagcaagcactgccgactacaatagggactcgccaggctatccttcctccaaaccagcaaccagcactttccctagctccttcttcatgcaagatggccatcacagcagtgacccttggagctcctccagtgggatgaatcagcctggctatgcaggaatgttgggcaactcttctcatattccacagtccagcagctactgtagcctgcatccacatgaacgtttgagctatccatcacactcctcagcagacatcaattccagtcttcctccgatgtccactttccatcgtagtggtacaaaccattacagcac

SEQ ID NO: 192204 - DNA, 2628 bp, Homo sapiens
  Payload ID: 17968
  Gene Name: transcription factor 4
  ENST ID: ENST00000568740
  CDS Start-End: 511-2439
tataagcccgcagttcccggatgtgaatggattacaatgtatctttcagggaaacctattattatcaatgtgactccacgggggagtccatggtgatgatgatgaggaggaggatgatgatgatgagacacctctaaacttggaacaagtttaagactttatgagagaagaaaaaaaatcaccaacaagaattgtttgaggaaaaattataactatcctgtgttcatttttttttttataaacaataagaaaaagttgttggatttttttttaatgatttcttttttgggggagggaattttgttgcagttttatggtggaaaatgcaaaaaccagagccaggtgcataatcttgtaatctgtggatatccctggagcaggactgagtaccagttaaaatactttttggggatacacatgtgagatactaagtacttgcagaagatttttgtctctctttttaaagtctctttccttggaatattgtgagaatatttgtggccatttaagatgttttcacctcctgtgagcagtgggaaaaatggaccaacttctttggcaagtggacattttactggctcaaatgtagaagacagaagtagctcagggtcctgggggaatggaggacatccaagcccgtccaggaactatggagatgggactccctatgaccacatgaccagcagggaccttgggtcacatgacaatctctctccaccttttgtcaattccagaatacaaagtaaaacagaaaggggctcatactcatcttatgggagagaatcaaacttacagggttgccaccagagtctccttggaggtgacatggatatgggcaacccaggaaccctttcgcccaccaaacctggttcccagtactatcagtattctagcaataatccccgaaggaggcctcttcacagtagtgccatggaggtacagacaaagaaagttcgaaaagttcctccaggtttgccatcttcagtctatgctccatcagcaagcactgccgactacaatagggactcgccaggctatccttcctccaaaccagcaaccagcactttccctagctccttcttcatgcaagatggccatcacagcagtgacccttggagctcctccagtgggatgaatcagcctggctatgcaggaatgttgggcaactcttctcatattccacagtccagcagctactgtagcctgcatccacatgaacgtttgagctatccatcacactcctcagcagacatcaattccagtcttcctccgatgtccactttccatcgtagtggtacaaaccattacagcacctcttcctgtacgcctcctgccaacgggacagacagtataatggcaaatagaggaagcggggcagccggcagctcccagactggagatgctctggggaaagcacttgcttcgatctattctccagatcacactaacaacagcttttcatcaaacccttcaactcctgttggctctcctccatctctctcagcaggcacagctgtttggtctagaaatggaggacaggcctcatcgtctcctaattatgaaggacccttacactctttgcaaagccgaattgaagatcgtttagaaagactggatgatgctattcatgttctccggaaccatgcagtgggcccatccacagctatgcctggtggtcatggggacatgcatggaatcattggaccttctcataatggagccatgggtggtctgggctcagggtatggaaccggccttctttcagccaacagacattcactcatggtggggacccatcgtgaagatggcgtggccctgagaggcagccattctcttctgccaaaccaggttccggttccacagcttcctgtccagtctgcgacttcccctgacctgaacccaccccaggacccttacagaggcatgccaccaggactacaggggcagagtgtctcctctggcagctctgagatcaaatccgatgacgagggtgatgagaacctgcaagacacgaaatcttcggaggacaagaaattagatgacgacaagaaggatatcaaatcaattactagcaataatgacgatgaggacctgacaccagagcagaaggcagagcgtgagaaggagcggaggatggccaacaatgcccgagagcgtctgcgggtccgtgacatcaacgaggctttcaaagagctcggccgcatggtgcagctccacctcaagagtgacaagccccagaccaagctcctgatcctccaccaggcggtggccgtcatcctcagtctggagcagcaagtccgagaaaggaatctgaatccgaaagctgcgtgtctgaaaagaagggaggaagagaaggtgtcctcagagcctccccctctctccttggccggcccacaccctggaatgggagacgcatcgaatcacatgggacagatgtaaaagggtccaagttgccacattgcttcattaaaacaagagaccacttccttaacagctgtattatcttaaacccacataaacacttctccttaacccccatttttgtaatataagacaagtctgagtagttatgaatcgcagacgcaagaggtttcagcattcccaattatcaaaaaacagaaaaacaaa

SEQ ID NO: 192205 - DNA, 2119 bp, Homo sapiens
  Payload ID: 17968
  Gene Name: transcription factor 4
  Uniprot ID: P15884
  ENST ID: ENST00000566286
  CDS Start-End: 1-1995
atgcaacgggcaaaaactgaactgttcaggcttcagattgtaactgacgatctgaggaaaaatgagatgttttcacctcctgtgagcagtgggaaaaatggaccaacttctttggcaagtggacattttactggctcaaatgtagaagacagaagtagctcagggtcctgggggaatggaggacatccaagcccgtccaggaactatggagatgggactccctatgaccacatgaccagcagggaccttgggtcacatgacaatctctctccaccttttgtcaattccagaatacaaagtaaaacagaaaggggctcatactcatcttatgggagagaatcaaacttacagggttgccaccagcagagtctccttggaggtgacatggatatgggcaacccaggaaccctttcgcccaccaaacctggttcccagtactatcagtattctagcaataatccccgaaggaggcctcttcacagtagtgccatggaggtacagacaaagaaagttcgaaaagttcctccaggtttgccatcttcagtctatgctccatcagcaagcactgccgactacaatagggactcgccaggctatccttcctccaaaccagcaaccagcactttccctagctccttcttcatgcaagatggccatcacagcagtgacccttggagctcctccagtgggatgaatcagcctggctatgcaggaatgttgggcaactcttctcatattccacagtccagcagctactgtagcctgcatccacatgaacgtttgagctatccatcacactcctcagcagacatcaattccagtcttcctccgatgtccactttccatcgtagtggtacaaaccattacagcacctcttcctgtacgcctcctgccaacgggacagacagtataatggcaaatagaggaagcggggcagccggcagctcccagactggagatgctctggggaaagcacttgcttcgatctattctccagatcacactaacaacagcttttcatcaaacccttcaactcctgttggctctcctccatctctctcaggcacagctgtttggtctagaaatggaggacaggcctcatcgtctcctaattatgaaggacccttacactctttgcaaagccgaattgaagatcgtttagaaagactggatgatgctattcatgttctccggaaccatgcagtgggcccatccacagctatgcctggtggtcatggggacatgcatggaatcattggaccttctcataatggagccatgggtggtctgggctcagggtatggaaccggccttctttcagccaacagacattcactcatggtggggacccatcgtgaagatggcgtggccctgagaggcagccattctcttctgccaaaccaggttccggttccacagcttcctgtccagtctgcgacttcccctgacctgaacccaccccaggacccttacagaggcatgccaccaggactacaggggcagagtgtctcctctggcagctctgagatcaaatccgatgacgagggtgatgagaacctgcaagacacgaaatcttcggaggacaagaaattagatgacgacaagaaggatatcaaatcaattactagcaataatgacgatgaggacctgacaccagagcagaaggcagagcgtgagaaggagcggaggatggccaacaatgcccgagagcgtctgcgggtccgtgacatcaacgaggctttcaaagagctcggccgcatggtgcagctccacctcaagagtgacaagccccagaccaagctcctgatcctccaccaggcggtggccgtcatcctcagtctggagcagcaagtccgagaaaggaatctgaatccgaaagctgcgtgtctgaaaagaagggaggaagagaaggtgtcctcagagcctccccctctctccttggccggcccacaccctggaatgggagacgcatcgaatcacatgggacagatgtaaaagggtccaagttgccacattgcttcattaaaacaagagaccacttccttaacagctgtattatcttaaacccacataaacacttctccttaacccccatttttgtaatataagacaagtctga

SEQ ID NO: 192206 - DNA, 598 bp, Homo sapiens
  Payload ID: 17968
  Gene Name: transcription factor 4
  ENST ID: ENST00000562543
  CDS Start-End: 181-598
gatgcttgtgataatgcagcaaaaagtaatgtctaaatgtaagatattattttgagatgagaacaccgaatggggatggaagacaggaatcttcaccatgtgtgaatgtacaggaaacaaccaataaatgccttaattcttgttctgtaaaaacttacatgtttgtgtgattttgctaaaatgcatcaccaacagcgaatggctgccttagggacggacaaagagctgagtgatttactggatttcagtgcgatgttttcacctcctgtgagcagtgggaaaaatggaccaacttctttggcaagtggacattttactggctcaaatgtagaagacagaagtagctcagggtcctgggggaatggaggacatccaagcccgtccaggaactatggagatgggactccctatgaccacatgaccagcagggaccttgggtcacatgacaatctctctccaccttttgtcaattccagaatacaaagtaaaacagaaaggggctcatactcatcttatgggagagaatcaaacttacagggttgccaccagcagagtctccttggaggtgacatggatatgggcaacccaggaacccttt

SEQ ID NO: 192207 - DNA, 3163 bp, Homo sapiens
  Payload ID: 17968
  Gene Name: transcription factor 4
  Uniprot ID: P15884
  ENST ID: ENST00000570287
  CDS Start-End: 249-1772
attaggatttcgagctccatcagggccgggctgccttccagctccgctgcgcaaagttgagcgtctgacagcagcgccgcggcctcccccgcccgccaggaatggtctcttcctgctttgcatattcaccacgcttggcccggccatatgggaaaatgcaactgaaggaattgttgtgaaaaaagggacagcgagtttgaaataaaagttgttagagtggtactgaggagaaaaaagaatccgagaccatgtactgcgcatacacaatcccgggcatgggcggcaactctttgatgtactactataatgggaaagcggtctatgctccatcagcaagcactgccgactacaatagggactcgccaggctatccttcctccaaaccagcaaccagcactttccctagctccttcttcatgcaagatggccatcacagcagtgacccttggagctcctccagtgggatgaatcagcctggctatgcaggaatgttgggcaactcttctcatattccacagtccagcagctactgtagcctgcatccacatgaacgtttgagctatccatcacactcctcagcagacatcaattccagtcttcctccgatgtccactttccatcgtagtggtacaaaccattacagcacctcttcctgtacgcctcctgccaacgggacagacagtataatggcaaatagaggaagcggggcagccggcagctcccagactggagatgctctggggaaagcacttgcttcgatctattctccagatcacactaacaacagcttttcatcaaacccttcaactcctgttggctctcctccatctctctcagcaggcacagctgtttggtctagaaatggaggacaggcctcatcgtctcctaattatgaaggacccttacactctttgcaaagccgaattgaagatcgtttagaaagactggatgatgctattcatgttctccggaaccatgcagtgggcccatccacagctatgcctggtggtcatggggacatgcatggaatcattggaccttctcataatggagccatgggtggtctgggctcagggtatggaaccggccttctttcagccaacagacattcactcatggtggggacccatcgtgaagatggcgtggccctgagaggcagccattctcttctgccaaaccaggttccggttccacagcttcctgtccagtctgcgacttcccctgacctgaacccaccccaggacccttacagaggcatgccaccaggactacaggggcagagtgtctcctctggcagctctgagatcaaatccgatgacgagggtgatgagaacctgcaagacacgaaatcttcggaggacaagaaattagatgacgacaagaaggatatcaaatcaattactagcaataatgacgatgaggacctgacaccagagcagaaggcagagcgtgagaaggagcggaggatggccaacaatgcccgagagcgtctgcgggtccgtgacatcaacgaggctttcaaagagctcggccgcatggtgcagctccacctcaagagtgacaagccccagaccaagctcctgatcctccaccaggcggtggccgtcatcctcagtctggagcagcaagtccgagaaaggaatctgaatccgaaagctgcgtgtctgaaaagaagggaggaagagaaggtgtcctcagagcctccccctctctccttggccggcccacaccctggaatgggagacgcatcgaatcacatgggacagatgtaaaagggtccaagttgccacattgcttcattaaaacaagagaccacttccttaacagctgtattatcttaaacccacataaacacttctccttaacccccatttttgtaatataagacaagtctgagtagttatgaatcgcagacgcaagaggtttcagcattcccaattatcaaaaaacagaaaaacaaaaaaaagaaagaaaaaagtgcaacttgagggacgactttctttaacatatcattcagaatgtgcaaagcagtatgtacaggctgagacacagcccagagactgaacggcaatctttccacactgtggaacaatgcatttgtgcctaaacttcttttggaaaaaaaaaatataattaatttgtaagtctgaaaaaaaaatatttaatttaaaaaaaattgtaaacttgcaataatgaaaaagtgtacttctgaagaaaactacatgaacgtttttgttggtattcaagtcagctagtgtttataattactggatattgaattaggggaagctcggctgccctagtaacaaaaccagcaaacgtcctgatgacaacgaagtgatgacattagccattccttagggtaggaggaacagatggatcttatagacctatgacaaatatatatataaatatatatataaatatatattaaaaatttagtgactatggtaagcttttgttcatttgtttcagacttttttctcctgtaaaaaaatagtactgattaacttttttaaaagaaagattttactgtaaatatggatttttttttttttggtcttatttctgtccctttccctggtttgttatcgtaacctgtagtgccaactctgcttccagaggggtagtgcaggatgaaatgctgaccctgatgttgcttctcattcataaataagtagaaagttgtttctccagtcttttgggaacacaggacttaaaagtcacatcatgtgtagatattacaagcagcattaccaagacatggcaaaaagagtttgtctgaattgtaatgttgcgtttgtgaacctattctgggattttcagaggtacaaggttagaatgctacaatgttaccactgtgccttccaatgtttatatcatcggaaacataacataatcaaagtggctgtgatttaacaaaatgattaaagtgttacctacctgtgtagccgaagtagtgtgcagtgaggcgtttctgaatacatggtcagatttttggaaaaaaacaaaaacaaaaaaaacaagtaaagttcaaaaaccgtcaaatgagaaaattgcaagtagtgtgacagagctgattgattttgttgctttcttgattttttttttcaaaatgggtttactaaaatgtagatgacttaactgcctcctccttcgtctg

SEQ ID NO: 192208 - DNA, 2357 bp, Homo sapiens
  Payload ID: 17968
  Gene Name: transcription factor 4
  Uniprot ID: P15884
  ENST ID: ENST00000565018
  CDS Start-End: 482-2233
gattacaatgtatctttcagggaaacctattattatcaatgtgactccacgggggagtccatggtgatgatgatgaggaggaggatgatgatgatgagacacctctaaacttggaacaagtttaagactttatgagagaagaaaaaaaatcaccaacaagaattgtttgaggaaaaattataactatcctgtgttcatttttttttttataaacaataagaaaaagttgttggatttttttttaatgatttcttttttgggggagggaattttgttgcagttttatggtggaaaatgcaaaaaccagagccaggtgcataatcttgtaatctgtggatatccctggagcaggactgagtaccagttaaaatactttttggggatacacatgtgagatactaagtacttgcagaagatttttgtctctctttttaaagtctctttccttggaatattgtgagaatatttgtggccatttaagatgttttcacctcctgtgagcagtgggaaaaatggaccaacttctttggcaagtggacattttactggctcaaatgtagaagacagaagtagctcagggtcctgggggaatggaggacatccaagcccgtccaggaactatggagatgggactccctatgaccacatgaccagcagggaccttgggtcacatgacaatctctctccaccttttgtcaattccagaatacaaagtaaaacagaaaggggctcatactcatcttatgggagagaatcaaacttacagggttgccaccaggtctatgctccatcagcaagcactgccgactacaatagggactcgccaggctatccttcctccaaaccagcaaccagcactttccctagctccttcttcatgcaagatggccatcacagcagtgacccttggagctcctccagtgggatgaatcagcctggctatgcaggaatgttgggcaactcttctcatattccacagtccagcagctactgtagcctgcatccacatgaacgtttgagctatccatcacactcctcagcagacatcaattccagtcttcctccgatgtccactttccatcgtagtggtacaaaccattacagcacctcttcctgtacgcctcctgccaacgggacagacagtataatggcaaatagaggaagcggggcagccggcagctcccagactggagatgctctggggaaagcacttgcttcgatctattctccagatcacactaacaacagcttttcatcaaacccttcaactcctgttggctctcctccatctctctcagcaggcacagctgtttggtctagaaatggaggacaggcctcatcgtctcctaattatgaaggacccttacactctttgcaaagccgaattgaagatcgtttagaaagactggatgatgctattcatgttctccggaaccatgcagtgggcccatccacagctatgcctggtggtcatggggacatgcatggaatcattggaccttctcataatggagccatgggtggtctgggctcagggtatggaaccggccttctttcagccaacagacattcactcatggtggggacccatcgtgaagatggcgtggccctgagaggcagccattctcttctgccaaaccaggttccggttccacagcttcctgtccagtctgcgacttcccctgacctgaacccaccccaggacccttacagaggcatgccaccaggactacaggggcagagtgtctcctctggcagctctgagatcaaatccgatgacgagggtgatgagaacctgcaagacacgaaatcttcggaggacaagaaattagatgacgacaagaaggatatcaaatcaattactagcaataatgacgatgaggacctgacaccagagcagaaggcagagcgtgagaaggagcggaggatggccaacaatgcccgagagcgtctgcgggtccgtgacatcaacgaggctttcaaagagctcggccgcatggtgcagctccacctcaagagtgacaagccccagaccaagctcctgatcctccaccaggcggtggccgtcatcctcagtctggagcagcaagtccgagaaaggaatctgaatccgaaagctgcgtgtctgaaaagaagggaggaagagaaggtgtcctcagagcctccccctctctccttggccggcccacaccctggaatgggagacgcatcgaatcacatgggacagatgtaaaagggtccaagttgccacattgcttcattaaaacaagagaccacttccttaacagctgtattatcttaaacccacataaacacttctccttaacccccatttttgtaatataagacaagtctga

SEQ ID NO: 192209 - DNA, 2128 bp, Homo sapiens
  Payload ID: 17968
  Gene Name: transcription factor 4
  Uniprot ID: P15884
  ENST ID: ENST00000566279
  CDS Start-End: 169-2004
gtgagtgagagggaacgagagtaagagaaagaaagaagtgaggggatgtaaactcgaataaatttcaaagtgcctccgagggatgcaacgggcaaaaactgaactgttcaggcttcagattgtaactgacgatctgaggaaaaatgaggtttgtgtgattttgctaaaatgcatcaccaacagcgaatggctgccttagggacggacaaagagctgagtgatttactggatttcagtgcgatgttttcacctcctgtgagcagtgggaaaaatggaccaacttctttggcaagtggacattttactggctcaaatgtagaagacagaagtagctcagggtcctgggggaatggaggacatccaagcccgtccaggaactatggagatgggactccctatgaccacatgaccagcagggaccttgggtcacatgacaatctctctccaccttttgtcaattccagaatacaaagtaaaacagaaaggggctcatactcatcttatgggagagaatcaaacttacagggttgccaccaggtctatgctccatcagcaagcactgccgactacaatagggactcgccaggctatccttcctccaaaccagcaaccagcactttccctagctccttcttcatgcaagatggccatcacagcagtgacccttggagctcctccagtgggatgaatcagcctggctatgcaggaatgttgggcaactcttctcatattccacagtccagcagctactgtagcctgcatccacatgaacgtttgagctatccatcacactcctcagcagacatcaattccagtcttcctccgatgtccactttccatcgtagtggtacaaaccattacagcacctcttcctgtacgcctcctgccaacgggacagacagtataatggcaaatagaggaagcggggcagccggcagctcccagactggagatgctctggggaaagcacttgcttcgatctattctccagatcacactaacaacagcttttcatcaaacccttcaactcctgttggctctcctccatctctctcagcaggcacagctgtttggtctagaaatggaggacaggcctcatcgtctcctaattatgaaggacccttacactctttgcaaagccgaattgaagatcgtttagaaagactggatgatgctattcatgttctccggaaccatgcagtgggcccatccacagctatgcctggtggtcatggggacatgcatggaatcattggaccttctcataatggagccatgggtggtctgggctcagggtatggaaccggccttctttcagccaacagacattcactcatggtggggacccatcgtgaagatggcgtggccctgagaggcagccattctcttctgccaaaccaggttccggttccacagcttcctgtccagtctgcgacttcccctgacctgaacccaccccaggacccttacagaggcatgccaccaggactacaggggcagagtgtctcctctggcagctctgagatcaaatccgatgacgagggtgatgagaacctgcaagacacgaaatcttcggaggacaagaaattagatgacgacaagaaggatatcaaatcaattactaggtcaagatctagcaataatgacgatgaggacctgacaccagagcagaaggcagagcgtgagaaggagcggaggatggccaacaatgcccgagagcgtctgcgggtccgtgacatcaacgaggctttcaaagagctcggccgcatggtgcagctccacctcaagagtgacaagccccagaccaagctcctgatcctccaccaggcggtggccgtcatcctcagtctggagcagcaagtccgagaaaggaatctgaatccgaaagctgcgtgtctgaaaagaagggaggaagagaaggtgtcctcagagcctccccctctctccttggccggcccacaccctggaatgggagacgcatcgaatcacatgggacagatgtaaaagggtccaagttgccacattgcttcattaaaacaagagaccacttccttaacagctgtattatcttaaacccacataaacacttctccttaacccccatttttgtaatataagacaagtctga

SEQ ID NO: 192210 - DNA, 1084 bp, Homo sapiens
  Payload ID: 17968
  Gene Name: transcription factor 4
  ENST ID: ENST00000562030
  CDS Start-End: 547-1084
atggctgaatttctgggccttgggaggttcgttttgaggcattaatgtccaggaaaattcttttgtatatagcactatgactgcatatgcttttcttaaaaagccttcgtaatgtagccgtggagtgtggagattccttcattcttaatttgtgcttcatggttgtgagtcttgcaagagtctactatctctgtgcttagcgtggtcgcagcaatctccataaacagtgtgattacttagggataaataaaagtgaaattttggaaatttgctgacagagggaaaatagggactgaagatgaaaaatgtacagagtatgaatttctgctttctgtgaaatttgagaatagaacagaccatagtgtgtcttccagtgaatcagtttctcttgtgccgtattgttatttgaatccctgtctacaacatcagctatgcaaaccaaagagaaaggcaaaatctcagtatcttgggcttcaagtctaaatagcagatcacagctgaaatgattccccactgtgtgacaagcagagtctccttggaggtgacatggatatgggcaacccaggaaccctttcgcccaccaaacctggttcccagtactatcagtattctagcaataatccccgaaggaggcctcttcacagtagtgccatggaggtacagacaaagaaagttcgaaaagttcctccaggtttgccatcttcagtctatgctccatcagcaagcactgccgactacaatagggactcgccaggctatccttcctccaaaccagcaaccagcactttccctagctccttcttcatgcaagatggccatcacagcagtgacccttggagctcctccagtgggatgaatcagcctggctatgcaggaatgttgggcaactcttctcatattccacagtccagcagctactgtagcctgcatccacatgaacgtttgagctatccatcacactcctcagcagacatcaattccagtcttcctccgatgtccactttccatcgtagtggtacaaaccattacagcacctcttcctgtacgcctcctgccaacgggacagacagtataatggcaaata

SEQ ID NO: 192211 - DNA, 401 bp, Homo sapiens
  Payload ID: 17968
  Gene Name: transcription factor 4
  ENST ID: ENST00000562638
  CDS Start-End: 46-401
ttgtgaaagcatcatccagaccgtcagagtctccttggaggtgacatggatatgggcaacccaggaaccctttcgcccaccaaacctggttcccagtactatcagtattctagcaataatccccgaaggaggcctcttcacagtagtgccatggaggtacagacaaagaaagttcgaaaagttcctccaggtttgccatcttcagtctatgctccatcagcaagcactgccgactacaatagggactcgccaggctatccttcctccaaaccagcaaccagcactttccctagctccttcttcatgcaagatggccatcacagcagtgacccttggagctcctccagtgggatgaatcagcctggctatgcaggaatgttgggcaactcttctcatattcc

SEQ ID NO: 192212 - DNA, 969 bp, Homo sapiens
  Payload ID: 17968
  Gene Name: transcription factor 4
  ENST ID: ENST00000566514
  CDS Start-End: 107-969
gtcttgcttcaaattgctctcctgttagagacgaaatgagaatttagtgcaggtggcacttttatttttatttgggttcacatatgacaggcaaatcctatacgagatggaaatggacattgccacgtttatggccaagatgttttcacctcctgtgagcagtgggaaaaatggaccaacttctttggcaagtggacattttactggctcaaatgtagaagacagaagtagctcagggtcctgggggaatggaggacatccaagcccgtccaggaactatggagatgggactccctatgaccacatgaccagcagggaccttgggtcacatgacaatctctctccaccttttgtcaattccagaatacaaagtaaaacagaaaggggctcatactcatcttatgggagagaatcaaacttacagggttgccaccagcagagtctccttggaggtgacatggatatgggcaacccaggaaccctttcgcccaccaaacctggttcccagtactatcagtattctagcaataatccccgaaggaggcctcttcacagtagtgccatggaggtacagacaaagaaagttcgaaaagttcctccaggtttgccatcttcagtctatgctccatcagcaagcactgccgactacaatagggactcgccaggctatccttcctccaaaccagcaaccagcactttccctagctccttcttcatgcaagatggccatcacagcagtgacccttggagctcctccagtgggatgaatcagcctggctatgcaggaatgttgggcaactcttctcatattccacagtccagcagctactgtagcctgcatccacatgaacgtttgagctatccatcacactcctcagcagacatcaattccagtcttcctccgatgtccactttccatcgtagtggtacaaaccattacagcacctcttcctgtacgcctcctgccaa

SEQ ID NO: 192213 - DNA, 555 bp, Homo sapiens
  Payload ID: 17968
  Gene Name: transcription factor 4
  ENST ID: ENST00000565124
  CDS Start-End: 52-555
agtatcacctttcttgtagattggcacttatgcggccaaaggaacaacaccatgttttctaaaaggctggagaaaataccacaggtgcctctcctctttcccttcatcttcatcattttgacaaattactcaaagatggagggtgcagttgaaagccagccatcattttttaaaacttctcaggacattgtaacatgcacttgggttgagaactgctactcgagcttctccaggaggcccttggagatggagtctcattctgtcatccagaccggagtgcagtggcaccatctcagctcactgcaacctccacctcccaggttcaagctatcctcctgcctcagcctcctgagtacccgggataggcgtttgtgtgattttgctaaaatgcatcaccaacagcgaatggctgccttagggacggacaaagagctgagtgatttactggatttcagtgcgatgttttcacctcctgtgagcagtgggaaaaatggaccaacttctttggcaagtggacattttactggctcaaatgtagaagacagaagtagctca

SEQ ID NO: 192214 - DNA, 897 bp, Homo sapiens
  Payload ID: 17968
  Gene Name: transcription factor 4
  ENST ID: ENST00000563824
  CDS Start-End: 422-897
ggcaaatcctatacgagatggaaatggacattgccacgtttatggccaaggttttcaatataaaacaaaacaacttttttcttctccttggtgaaactagtgtttttctagagaggctgctggcctccaacctgaatcttgataacattatggggactgtgtttgttccaaatgtagcagtagtactgcttggccatctaatgaacctgaggaaaaagaaagaacagagtgataatgggggctggggtgggatctgtaatgttgtttctcttttagttttaagttggatggtgatgtattttactaaataaacccttagcataaactctaagctgtttggtaacagtatgaaagatctttgaggagctctgaaggcacaagtgtcttcttttcaactgtaatatttctttgtttcttttagatgttttcacctcctgtgagcagtgggaaaaatggaccaacttctttggcaagtggacattttactggctcaaatgtagaagacagaagtagctcagggtcctgggggaatggaggacatccaagcccgtccaggaactatggagatgggactccctatgaccacatgaccagcagggaccttgggtcacatgacaatctctctccaccttttgtcaattccagaatacaaagtaaaacagaaaggggctcatactcatcttatgggagagaatcaaacttacagggttgccaccagcagagtctccttggaggtgacatggatatgggcaacccaggaaccctttcgcccaccaaacctggttcccagtactatcagtattctagcaataatccccgaaggaggcctcttcacagtagtgccatggaggtacagacaaagaaagttcgaaaagttcctccaggtttgccatcttc

SEQ ID NO: 192215 - DNA, 653 bp, Homo sapiens
  Payload ID: 17968
  Gene Name: transcription factor 4
  ENST ID: ENST00000566777
  CDS Start-End: 251-653
agtaaaacatgttaggacagccaagccccagcatgttgtgttctgtcctctggctggcagattcacgccacaacagtttattcatccacatgctttttggcgactcttcatcacgtatttgggcttagatcttctggtgcctccctcggcgtgctacccataaggtaaaacagaaaggggctcatactcatcttatgggagagaatcaaacttacagggttgccaccagcagagtctccttggaggtgacatggatatgggcaacccaggaaccctttcgcccaccaaacctggttcccagtactatcagtattctagcaataatccccgaaggaggcctcttcacagtagtgccatggaggtacagacaaagaaagttcgaaaagttcctccaggtttgccatcttcagtctatgctccatcagcaagcactgccgactacaatagggactcgccaggctatccttcctccaaaccagcaaccagcactttccctagctccttcttcatgcaagatggccatcacagcagtgacccttggagctcctccagtgggatgaatcagcctggctatgcaggaatgttgggcaactcttctcatattccacagtccagcagctactgtagcctgcatccacatgaacgtttgagct

SEQ ID NO: 192216 - DNA, 2696 bp, Homo sapiens
  Payload ID: 17968
  Gene Name: transcription factor 4
  ENST ID: ENST00000564403
  CDS Start-End: 564-2597
ggaggagcagccgcggccgcagctccttctctttataagcccgcagttcccggatgtgaatggattacaatgtatctttcagggaaacctattattatcaatgtgactccacgggggagtccatggtgatgatgatgaggaggaggatgatgatgatgagacacctctaaacttggaacaagtttaagactttatgagagaagaaaaaaaatcaccaacaagaattgtttgaggaaaaattataactatcctgtgttcatttttttttttataaacaataagaaaaagttgttggatttttttttaatgatttcttttttgggggagggaattttgttgcagttttatggtggaaaatgcaaaaaccagagccaggtgcataatcttgtaatctgtggatatccctggagcaggactgagtaccagttaaaatactttttggggatacacatgtgagatactaagtacttgcagaagatttttgtctctctttttaaagtctctttccttggaatattgtgagaatatttgtggccatttaaggtttgtgtgattttgctaaaatgcatcaccaacagcgaatggctgccttagggacggacaaagagctgagtgatttactggatttcagtgcgatgttttcacctcctgtgagcagtgggaaaaatggaccaacttctttggcaagtggacattttactggctcaaatgtagaagacagaagtagctcagggtcctgggggaatggaggacatccaagcccgtccaggaactatggagatgggactccctatgaccacatgaccagcagggaccttgggtcacatgacaatctctctccaccttttgtcaattccagaatacaaagtaaaacagaaaggggctcatactcatcttatgggagagaatcaaacttacagggttgccaccagcagagtctccttggaggtgacatggatatgggcaacccaggaaccctttcgcccaccaaacctggttcccagtactatcagtattctagcaataatccccgaaggaggcctcttcacagtagtgccatggaggtacagacaaagaaagttcgaaaagttcctccaggtttgccatcttcattggttctttctcctcaggtctatgctccatcagcaagcactgccgactacaatagggactcgccaggctatccttcctccaaaccagcaaccagcactttccctagctccttcttcatgcaagatggccatcacagcagtgacccttggagctcctccagtgggatgaatcagcctggctatgcaggaatgttgggcaactcttctcatattccacagtccagcagctactgtagcctgcatccacatgaacgtttgagctatccatcacactcctcagcagacatcaattccagtcttcctccgatgtccactttccatcgtagtggtacaaaccattacagcacctcttcctgtacgcctcctgccaacgggacagacagtataatggcaaatagaggaagcggggcagccggcagctcccagactggagatgctctggggaaagcacttgcttcgatctattctccagatcacactaacaacagcttttcatcaaacccttcaactcctgttggctctcctccatctctctcagcaggcacagctgtttggtctagaaatggaggacaggcctcatcgtctcctaattatgaaggacccttacactctttgcaaagccgaattgaagatcgtttagaaagactggatgatgctattcatgttctccggaaccatgcagtgggcccatccacagctatgcctggtggtcatggggacatgcatggaatcattggaccttctcataatggagccatgggtggtctgggctcagggtatggaaccggccttctttcagccaacagacattcactcatggtggggacccatcgtgaagatggcgtggccctgagaggcagccattctcttctgccaaaccaggttccggttccacagcttcctgtccagtctgcgacttcccctgacctgaacccaccccaggacccttacagaggcatgccaccaggactacaggggcagagtgtctcctctggcagctctgagatcaaatccgatgacgagggtgatgagaacctgcaagacacgaaatcttcggaggacaagaaattagatgacgacaagaaggatatcaaatcaattactaggtcaagatctagcaataatgacgatgaggacctgacaccagagcagaaggcagagcgtgagaaggagcggaggatggccaacaatgcccgagagcgtctgcgggtccgtgacatcaacgaggctttcaaagagctcggccgcatggtgcagctccacctcaagagtgacaagccccagaccaagctcctgatcctccaccaggcggtggccgtcatcctcagtctggagcagcaagtccgagaaaggaatctgaatccgaaagctgcgtgtctgaaaagaagggaggaagagaaggtgtcctcagagcctccccctctctccttggccggcccacaccctggaatgggagacgcatcgaatcacatgggacagatgtaaaagggtccaagttgccacattgcttcattaaaacaagagaccacttccttaacagctgtattatcttaaacccacataaacacttctccttaaccccca

SEQ ID NO: 192217 - DNA, 870 bp, Homo sapiens
  Payload ID: 17968
  Gene Name: transcription factor 4
  ENST ID: ENST00000568169
  CDS Start-End: 30-870
gccagaattggcacggacgccgaggaggcatgagagcgagcaagggctctgagggctgccagcatgctgtcacctctcaattggttacaggagcaggaggggaccaaacagagatgttttcacctcctgtgagcagtgggaaaaatggaccaacttctttggcaagtggacattttactggctcaaatgtagaagacagaagtagctcagggtcctgggggaatggaggacatccaagcccgtccaggaactatggagatgggactccctatgaccacatgaccagcagggaccttgggtcacatgacaatctctctccaccttttgtcaattccagaatacaaagtaaaacagaaaggggctcatactcatcttatgggagagaatcaaacttacagggttgccaccagcagagtctccttggaggtgacatggatatgggcaacccaggaaccctttcgcccaccaaacctggttcccagtactatcagtattctagcaataatccccgaaggaggcctcttcacagtagtgccatggaggtacagacaaagaaagttcgaaaagttcctccaggtttgccatcttcagtctatgctccatcagcaagcactgccgactacaatagggactcgccaggctatccttcctccaaaccagcaaccagcactttccctagctccttcttcatgcaagatggccatcacagcagtgacccttggagctcctccagtgggatgaatcagcctggctatgcaggaatgttgggcaactcttctcatattccacagtccagcagctactgtagcctgcatccacatgaacgtttgagctatccatcacactcctcagcagacatcaattccagtc

SEQ ID NO: 192218 - DNA, 3590 bp, Homo sapiens
  Payload ID: 17968
  Gene Name: transcription factor 4
  Uniprot ID: P15884
  ENST ID: ENST00000564999
  CDS Start-End: 198-2201
gtggatgtgtgagtgagagggaacgagagtaagagaaagaaagaagtgaggggatgtaaactcgaataaatttcaaagtgcctccgagggatgcaacgggcaaaaactgaactgttcaggcttcagattgtaactgacgatctgaggaaaaatgaggtgctcgatgaattttcgtttgtttgtgtgattttgctaaaatgcatcaccaacagcgaatggctgccttagggacggacaaagagctgagtgatttactggatttcagtgcgatgttttcacctcctgtgagcagtgggaaaaatggaccaacttctttggcaagtggacattttactggctcaaatgtagaagacagaagtagctcagggtcctgggggaatggaggacatccaagcccgtccaggaactatggagatgggactccctatgaccacatgaccagcagggaccttgggtcacatgacaatctctctccaccttttgtcaattccagaatacaaagtaaaacagaaaggggctcatactcatcttatgggagagaatcaaacttacagggttgccaccagcagagtctccttggaggtgacatggatatgggcaacccaggaaccctttcgcccaccaaacctggttcccagtactatcagtattctagcaataatccccgaaggaggcctcttcacagtagtgccatggaggtacagacaaagaaagttcgaaaagttcctccaggtttgccatcttcagtctatgctccatcagcaagcactgccgactacaatagggactcgccaggctatccttcctccaaaccagcaaccagcactttccctagctccttcttcatgcaagatggccatcacagcagtgacccttggagctcctccagtgggatgaatcagcctggctatgcaggaatgttgggcaactcttctcatattccacagtccagcagctactgtagcctgcatccacatgaacgtttgagctatccatcacactcctcagcagacatcaattccagtcttcctccgatgtccactttccatcgtagtggtacaaaccattacagcacctcttcctgtacgcctcctgccaacgggacagacagtataatggcaaatagaggaagcggggcagccggcagctcccagactggagatgctctggggaaagcacttgcttcgatctattctccagatcacactaacaacagcttttcatcaaacccttcaactcctgttggctctcctccatctctctcagcaggcacagctgtttggtctagaaatggaggacaggcctcatcgtctcctaattatgaaggacccttacactctttgcaaagccgaattgaagatcgtttagaaagactggatgatgctattcatgttctccggaaccatgcagtgggcccatccacagctatgcctggtggtcatggggacatgcatggaatcattggaccttctcataatggagccatgggtggtctgggctcagggtatggaaccggccttctttcagccaacagacattcactcatggtggggacccatcgtgaagatggcgtggccctgagaggcagccattctcttctgccaaaccaggttccggttccacagcttcctgtccagtctgcgacttcccctgacctgaacccaccccaggacccttacagaggcatgccaccaggactacaggggcagagtgtctcctctggcagctctgagatcaaatccgatgacgagggtgatgagaacctgcaagacacgaaatcttcggaggacaagaaattagatgacgacaagaaggatatcaaatcaattactagcaataatgacgatgaggacctgacaccagagcagaaggcagagcgtgagaaggagcggaggatggccaacaatgcccgagagcgtctgcgggtccgtgacatcaacgaggctttcaaagagctcggccgcatggtgcagctccacctcaagagtgacaagccccagaccaagctcctgatcctccaccaggcggtggccgtcatcctcagtctggagcagcaagtccgagaaaggaatctgaatccgaaagctgcgtgtctgaaaagaagggaggaagagaaggtgtcctcagagcctccccctctctccttggccggcccacaccctggaatgggagacgcatcgaatcacatgggacagatgtaaaagggtccaagttgccacattgcttcattaaaacaagagaccacttccttaacagctgtattatcttaaacccacataaacacttctccttaacccccatttttgtaatataagacaagtctgagtagttatgaatcgcagacgcaagaggtttcagcattcccaattatcaaaaaacagaaaaacaaaaaaaagaaagaaaaaagtgcaacttgagggacgactttctttaacatatcattcagaatgtgcaaagcagtatgtacaggctgagacacagcccagagactgaacggcaatctttccacactgtggaacaatgcatttgtgcctaaacttcttttggaaaaaaaaaatataattaatttgtaagtctgaaaaaaaaatatttaatttaaaaaaaattgtaaacttgcaataatgaaaaagtgtacttctgaagaaaactacatgaacgtttttgttggtattcaagtcagctagtgtttataattactggatattgaattaggggaagctcggctgccctagtaacaaaaccagcaaacgtcctgatgacaacgaagtgatgacattagccattccttagggtaggaggaacagatggatcttatagacctatgacaaatatatatataaatatatatataaatatatattaaaaatttagtgactatggtaagcttttgttcatttgtttcagacttttttctcctgtaaaaaaatagtactgattaacttttttaaaagaaagattttactgtaaatatggatttttttttttttggtcttatttctgtccctttccctggtttgttatcgtaacctgtagtgccaactctgcttccagaggggtagtgcaggatgaaatgctgaccctgatgttgcttctcattcataaataagtagaaagttgtttctccagtcttttgggaacacaggacttaaaagtcacatcatgtgtagatattacaagcagcattaccaagacatggcaaaaagagtttgtctgaattgtaatgttgcgtttgtgaacctattctgggattttcagaggtacaaggttagaatgctacaatgttaccactgtgccttccaatgtttatatcatcggaaacataacataatcaaagtggctgtgatttaacaaaatgattaaagtgttacctacctgtgtagccgaagtagtgtgcagtgaggcgtttctgaatacatggtcagatttttggaaaaaaacaaaaacaaaaaaaacaagtaaagttcaaaaaccgtcaaatgagaaaattgcaagtagtgtgacagagctgattgattttgttgctttcttgattttttttttcaaaatgggtttactaaaatgtagatgacttaactgcctcctccttcgtc

SEQ ID NO: 192219 - DNA, 570 bp, Homo sapiens
  Payload ID: 17968
  Gene Name: transcription factor 4
  ENST ID: ENST00000563888
  CDS Start-End: 133-570
ttttggagaaatggctttcggaagttttgccaggaaacgtagccctaggcaggcagctttgcagccccctttctgcttgttgcactttctccattcgttcctttgctttttgcaggctctgactcagggaagatgttttcacctcctgtgagcagtgggaaaaatggaccaacttctttggcaagtggacattttactggctcaaatgtagaagacagaagtagctcagggtcctgggggaatggaggacatccaagcccgtccaggaactatggagatgggactccctatgaccacatgaccagcagggaccttgggtcacatgacaatctctctccaccttttgtcaattccagaatacaaagtaaaacagaaaggggctcatactcatcttatgggagagaatcaaacttacagggttgccaccagagtctccttggaggtgacatggatatgggcaacccaggaaccctttcgcccaccaaacctggttcccagtactatcagtattctagcaataatccccgaaggaggcctcttcacagtagtgccatggaggtacagacaaag

SEQ ID NO: 192220 - DNA, 1823 bp, Homo sapiens
  Payload ID: 17968
  Gene Name: transcription factor 4
  Uniprot ID: P15884
  ENST ID: ENST00000561831
  CDS Start-End: 143-1666
gagtttcatatatccagcatgaagttccctctctccctcccattatgaattctgggctgtggtcctgcttgctccttgtgtgtcagattgaagttctgatgctgtcagccatgtctgaccaatcagcaaacaacaccacaggatgaaatttaaacaatgcagatgctcagatacagggctatgttgcctggaccacgaagggaaagcagaggtctatgctccatcagcaagcactgccgactacaatagggactcgccaggctatccttcctccaaaccagcaaccagcactttccctagctccttcttcatgcaagatggccatcacagcagtgacccttggagctcctccagtgggatgaatcagcctggctatgcaggaatgttgggcaactcttctcatattccacagtccagcagctactgtagcctgcatccacatgaacgtttgagctatccatcacactcctcagcagacatcaattccagtcttcctccgatgtccactttccatcgtagtggtacaaaccattacagcacctcttcctgtacgcctcctgccaacgggacagacagtataatggcaaatagaggaagcggggcagccggcagctcccagactggagatgctctggggaaagcacttgcttcgatctattctccagatcacactaacaacagcttttcatcaaacccttcaactcctgttggctctcctccatctctctcagcaggcacagctgtttggtctagaaatggaggacaggcctcatcgtctcctaattatgaaggacccttacactctttgcaaagccgaattgaagatcgtttagaaagactggatgatgctattcatgttctccggaaccatgcagtgggcccatccacagctatgcctggtggtcatggggacatgcatggaatcattggaccttctcataatggagccatgggtggtctgggctcagggtatggaaccggccttctttcagccaacagacattcactcatggtggggacccatcgtgaagatggcgtggccctgagaggcagccattctcttctgccaaaccaggttccggttccacagcttcctgtccagtctgcgacttcccctgacctgaacccaccccaggacccttacagaggcatgccaccaggactacaggggcagagtgtctcctctggcagctctgagatcaaatccgatgacgagggtgatgagaacctgcaagacacgaaatcttcggaggacaagaaattagatgacgacaagaaggatatcaaatcaattactagcaataatgacgatgaggacctgacaccagagcagaaggcagagcgtgagaaggagcggaggatggccaacaatgcccgagagcgtctgcgggtccgtgacatcaacgaggctttcaaagagctcggccgcatggtgcagctccacctcaagagtgacaagccccagaccaagctcctgatcctccaccaggcggtggccgtcatcctcagtctggagcagcaagtccgagaaaggaatctgaatccgaaagctgcgtgtctgaaaagaagggaggaagagaaggtgtcctcagagcctccccctctctccttggccggcccacaccctggaatgggagacgcatcgaatcacatgggacagatgtaaaagggtccaagttgccacattgcttcattaaaacaagagaccacttccttaacagctgtattatcttaaacccacataaacacttctccttaacccccatttttgtaatataagacaagtctgagtagttatgaatcgcagacgcaagaggtttcag

SEQ ID NO: 192221 - DNA, 583 bp, Homo sapiens
  Payload ID: 17968
  Gene Name: transcription factor 4
  ENST ID: ENST00000568186
  CDS Start-End: 226-583
ctctcttgcttgcatacattgccagtagtgcctactttacgtatgtaaacatcggggaagagcagtagatgtctgttacctggaggagatttttttttaaggaaaaacacaatttacacttttttgtcgtttctcttggcaggtaaaacagaaaggggctcatactcatcttatgggagagaatcaaacttacagggttgccaccagagtctccttggaggtgacatggatatgggcaacccaggaaccctttcgcccaccaaacctggttcccagtactatcagtattctagcaataatccccgaaggaggcctcttcacagtagtgccatggaggtacagacaaagaaagttcgaaaagttcctccaggtttgccatcttcagtctatgctccatcagcaagcactgccgactacaatagggactcgccaggctatccttcctccaaaccagcaaccagcactttccctagctccttcttcatgcaagatggccatcacagcagtgacccttggagctcctccagtgggatgaatcagcctggctatgcaggaatgttgggcaactcttctcatattccac

SEQ ID NO: 192222 - DNA, 362 bp, Homo sapiens
  Payload ID: 17968
  Gene Name: transcription factor 4
  ENST ID: ENST00000590810
  CDS Start-End: 168-362
cgggctagatagcctgggcgacaagcctctgagtgctgtgtctctggtgtaaagctctcagttcctgcagaagaccgtgttcctgtgggtctggtttctgagggtcaaggcggaggtcattagagttttggggagaagaaagttgacaacatccttcctttctgcagatggtcatggcagagcagagtctccttggaggtgacatggatatgggcaacccaggaaccctttcgcccaccaaacctggttcccagtactatcagtattctagcaataatccccgaaggaggcctcttcacagtagtgccatggaggtacagacaaagaaagttcgaaaagttcctccaggtttgccatcttca

SEQ ID NO: 192223 - DNA, 661 bp, Homo sapiens
  Payload ID: 17968
  Gene Name: transcription factor 4
  ENST ID: ENST00000570146
  CDS Start-End: 1-500
ctcatattccacagtccagcagctactgtagcctgcatccacatgaacgtttgagctatccatcacactcctcagcagacatcaattccagtcttcctccgatgtccactttccatcgtagtggtacaaaccattacagcacctcttcctgtacgcctcctgccaacgggacagacagtataatggcaaatagaggaagcggggcagccggcagctcccagactggagatgctctggggaaagcacttgcttcgatctattctccagatcacactaacaacagcttttcatcaaacccttcaactcctgttggctctcctccatctctctcaggtagtgtatttcaaatcccatttcatcatataacagtttataagaatgattccccccttgtacttcctgattttgtaggtggaaactcacttccccccaaatcccaaagctttaacattcctataacagacaaatacaaagggtgggagagacaaattaccagataacagtatagtcgtttacatccaaaccttttcttaaaaattagattatctttttaaaatatacaggcatatggaaaatgtatttcttacacttttcttagctctgcagaagacacccaacggcagaataatgtattccaataaaacgtctcagatgaaaaaaa

SEQ ID NO: 192224 - DNA, 8140 bp, Homo sapiens
  Payload ID: 17968
  Gene Name: transcription factor 4
  Uniprot ID: P15884
  ENST ID: ENST00000616053
  CDS Start-End: 685-2436
gtgtgtggatgtgtgagtgagagggaacgagagtaagagaaagaaagaagtgaggggatgtaaactcgaataaatttcaaagtgcctccgagggatgcaacgggcaaaaactgaactgttcaggcttcagattgtaactgacgatctgaggaaaaatgaggtgctcgatgaattttcgtttgtattttttggcgaggcgggggaggtgttgagattttttttttttcccctcggggtgggtgcgagggggatgcatcctagcctgcccgacccggagcaagtcgcgtctccccgccggagcccccccacccatttctttgctgaacttgcaattccgtgcgcctcggcgtgtttccccctccccccttccctccgtcccctcccctccccggagaagagagttggtgttaagagtcagggatcttggctgtgtgtctgcggatctgtagtggcggcggcggcggcggcggcggggaggcagcaggcgcgggagcgggcgcaggagcaggcggcggcggtggcggcggcggttagacatgaacgccgcctcggcgccggcggtgcacggagagccccttctcgcgcgcgggcggtttgtgtgattttgctaaaatgcatcaccaacagcgaatggctgccttagggacggacaaagagctgagtgatttactggatttcagtgcgatgttttcacctcctgtgagcagtgggaaaaatggaccaacttctttggcaagtggacattttactggctcaaatgtagaagacagaagtagctcagggtcctgggggaatggaggacatccaagcccgtccaggaactatggagatgggactccctatgaccacatgaccagcagggaccttgggtcacatgacaatctctctccaccttttgtcaattccagaatacaaagtaaaacagaaaggggctcatactcatcttatgggagagaatcaaacttacagggttgccaccaggtctatgctccatcagcaagcactgccgactacaatagggactcgccaggctatccttcctccaaaccagcaaccagcactttccctagctccttcttcatgcaagatggccatcacagcagtgacccttggagctcctccagtgggatgaatcagcctggctatgcaggaatgttgggcaactcttctcatattccacagtccagcagctactgtagcctgcatccacatgaacgtttgagctatccatcacactcctcagcagacatcaattccagtcttcctccgatgtccactttccatcgtagtggtacaaaccattacagcacctcttcctgtacgcctcctgccaacgggacagacagtataatggcaaatagaggaagcggggcagccggcagctcccagactggagatgctctggggaaagcacttgcttcgatctattctccagatcacactaacaacagcttttcatcaaacccttcaactcctgttggctctcctccatctctctcagcaggcacagctgtttggtctagaaatggaggacaggcctcatcgtctcctaattatgaaggacccttacactctttgcaaagccgaattgaagatcgtttagaaagactggatgatgctattcatgttctccggaaccatgcagtgggcccatccacagctatgcctggtggtcatggggacatgcatggaatcattggaccttctcataatggagccatgggtggtctgggctcagggtatggaaccggccttctttcagccaacagacattcactcatggtggggacccatcgtgaagatggcgtggccctgagaggcagccattctcttctgccaaaccaggttccggttccacagcttcctgtccagtctgcgacttcccctgacctgaacccaccccaggacccttacagaggcatgccaccaggactacaggggcagagtgtctcctctggcagctctgagatcaaatccgatgacgagggtgatgagaacctgcaagacacgaaatcttcggaggacaagaaattagatgacgacaagaaggatatcaaatcaattactagcaataatgacgatgaggacctgacaccagagcagaaggcagagcgtgagaaggagcggaggatggccaacaatgcccgagagcgtctgcgggtccgtgacatcaacgaggctttcaaagagctcggccgcatggtgcagctccacctcaagagtgacaagccccagaccaagctcctgatcctccaccaggcggtggccgtcatcctcagtctggagcagcaagtccgagaaaggaatctgaatccgaaagctgcgtgtctgaaaagaagggaggaagagaaggtgtcctcagagcctccccctctctccttggccggcccacaccctggaatgggagacgcatcgaatcacatgggacagatgtaaaagggtccaagttgccacattgcttcattaaaacaagagaccacttccttaacagctgtattatcttaaacccacataaacacttctccttaacccccatttttgtaatataagacaagtctgagtagttatgaatcgcagacgcaagaggtttcagcattcccaattatcaaaaaacagaaaaacaaaaaaaagaaagaaaaaagtgcaacttgagggacgactttctttaacatatcattcagaatgtgcaaagcagtatgtacaggctgagacacagcccagagactgaacggcaatctttccacactgtggaacaatgcatttgtgcctaaacttcttttggaaaaaaaaaatataattaatttgtaagtctgaaaaaaaaatatttaatttaaaaaaaattgtaaacttgcaataatgaaaaagtgtacttctgaagaaaactacatgaacgtttttgttggtattcaagtcagctagtgtttataattactggatattgaattaggggaagctcggctgccctagtaacaaaaccagcaaacgtcctgatgacaacgaagtgatgacattagccattccttagggtaggaggaacagatggatcttatagacctatgacaaatatatatataaatatatatataaatatatattaaaaatttagtgactatggtaagcttttgttcatttgtttcagacttttttctcctgtaaaaaaatagtactgattaacttttttaaaagaaagattttactgtaaatatggatttttttttttttggtcttatttctgtccctttccctggtttgttatcgtaacctgtagtgccaactctgcttccagaggggtagtgcaggatgaaatgctgaccctgatgttgcttctcattcataaataagtagaaagttgtttctccagtcttttgggaacacaggacttaaaagtcacatcatgtgtagatattacaagcagcattaccaagacatggcaaaaagagtttgtctgaattgtaatgttgcgtttgtgaacctattctgggattttcagaggtacaaggttagaatgctacaatgttaccactgtgccttccaatgtttatatcatcggaaacataacataatcaaagtggctgtgatttaacaaaatgattaaagtgttacctacctgtgtagccgaagtagtgtgcagtgaggcgtttctgaatacatggtcagatttttggaaaaaaacaaaaacaaaaaaaacaagtaaagttcaaaaaccgtcaaatgagaaaattgcaagtagtgtgacagagctgattgattttgttgctttcttgattttttttttcaaaatgggtttactaaaatgtagatgacttaactgcctcctccttcgtctgaaaaatgccaatattcaatcatcatgcagcattataacaagccttataagtcctaaagcattaagttgcacttttttgaggaggggtagtgcagtatttctctggccagtatgaatgaagtttatacttaccatatttgatagaaacatagatcaagctatggcacagcgactcatcagatagctagctttgacgtctgggcacaattgaaccaacttccatcgtgaatctttataatgattgactttggtgtatagtgcagtaaacaaatagtgctcctagttaagtatttgtcagcatccttttgtctctaacttgtttctatttttacagccacacaattcttggcatgtattaagaaaaaaaaaaatccctgttcaagtagtttttccacctatcagcactgagtaaatgccataaatccattgaaatggtctaaatgttccatctgttctcctgttttgccagttatatagtaatgaaatacatttgtaaattttatgcaacaaatggcaaacgtatcattattttgaaattgtgtatgtaaaagttatatttttacatgtagactcttgttattatgtgttttaatacattgtatcagtttttgtttttttttaaaaactgtggtttaaaaagaagtctcatttaaatgaaatagctacaagaatcagaattttatgttcatttctgaaaatgtaagaacaaataagatagttaccacgtggtcatcttttacaaacccataaacattttgattagctgtgtgtgtgttgaaaaactgtaaatatgttcagtagcgataaaactaaaataactttgatttgttgataagttcctaaaatgtggaggtggattaaaaccttaggagaatagcagaaatcaaacttcatgaaaagttattttggggctttcctgtgaaatgtatgaacaaagaggctcagagaaggacatggaagacaataatgtatactctctcctcctccctgaataatgaaaaccatgtgtatttgttccctccgtatgttaaagatttccttttagtggtacattctgcactcattttgtatagtctaccaaggcgggtatccctaggaacaatattatataggaagcaggtatactctgatcacattcaggataagtgtacagaagaaaatacggtgtttactctttagggaactggaaacactccctgcattgatgtacattttaagaatggcacttttgatacatgttatcataaaggtgcttaatagagctgaattaaagtttttcaaatctgtaaacaaagcaaaaaagtaaattgtagtcatttgattattttttaaattggtgctttatattttgttctcactcagagtaaaagctgcaatttattgttcaccagctttgatgtattcattactcagtaatgcaatacctctattgttgaattccctttggaaataagtgaaaattctaacggccactgaaagctgctcgctaggttttgcttggtggagaaacataatctgcacctatccatattaattgggttgtatccccattaaaaaagaaaaaaagggaatgtggcctttttagtgtgttttttattgttgttgttttgtaattatcaaacccaggtaagatattggtatcctgcactggattttcaaatgaagttcagcagaagacagttaagattaaagtactatacaaaaatttcaaaagggtccatactacgctatctgtatgacgacacttaggctggggatctctttcagaaactcggactttaaaagcaacttggagcagttgatccacctccacattcaagtaatttatgaatatgcagaatagggatctgttcatctagaaatttttaccatttgtcttctgtgtagctgcaaggaacactaatgtttatacaactgtcagtccacccagtggtgcaactggttctgattcagtcttccgattcctttttatttttcactttttcctatttctgaatttttttttttatttgtgatcttgattttgatgaggggttggggagtggggagggagtcgaaccaagacttggagttaagaggattttcatcttttgcatccaacaggcagaatatgatctgtgtccaaaagtgaacttgagtcaggaatgaatcaatttcagcataaacaagcacaaaaatttagtctgctggctgactggaagcaaaaaagtcaagatggaatatgatgaattccaacacaatggggcaccaaggcctttaggcctctctttttattttgctttggttttgtttgtttttctttagagacatgctctttctcatgggacttgaagtggactcatctttgtgcagtgctggttttgccatactcatttcaagtattatagacatatgtaatggtgaaaatatatgaactgtggcctttttcattcttgttacttgtgatgcaattaagtgaagataagaaaaaaaaaaaaaaagcagagatttaccatgtatcagtgcctggctttttgttataaagctttgtttgtctagtgctcttttgctataaaatagactgtagtacaccctagtaggaaaaaaaaaaaactaaatttaaaaataaaaaatatatttggcttatttttcgcaggagcaatccttttataccatgaatattacaaaaaaattgtcagattctgaatatttcttctttgtagatttttggaatcattatgagtaaaagtttgttactttattttactatttaaaagatgttattttaccatgtgttaccaagatgaaactgtatgggtagcttttttgtttgttttttgttttgtttttgtttttgtttttgtttttagttgtaggtcgcagcggggaaattttttgcgactgtacacatagctgcagcattaaaaacttaaaaaaattgttaaaaaaaaaaaaagggaaaacatttcaaaaaaaaaaaaaaagataaacagttacaccttgttttcaatgtgtggctgagtgcctcgattttttcatgtttttggtgtatttctgatttgtagaagtgtccaaacaggttgtgtgctggagttccttcaagacaaaaacaaacccagcttggtcaaggccattacctgtttcccatctgtagttattcgatgaagtcatgtacatgaccgttctgtagcaataaatgtgccatttttataaactgtttctgacacttgtttcatttcattttgcattgtccatatagctatgattctcttctgtaagtaaaacgcatctatatttcattttccaagtgttggaggtattgacagcttaacaaacaaaacatacaaaaaaaatcacaaaaacaaattgaaaagcaaagcacatgattgatcaaggaagagatgcccttaatgaaaatggaacgggatgcatgcaaaacaaaaagaaaactgtctagaggattaactaattgaaggaatataattaatgtgtgtgtaacactgaagctatgcatttgaagagctctgaactgcaccagtgttttcggttgtgctgcaggttgctaagtcaagtcagccttaaccttttgcaccagttggtcggctgtttggcagaacattctcagatcttttcagtcaaaaatctaagatgatttattttgtatcactttgttaaaagctgaatattgttaactacagttaatattaacactgtatttatactttctcaaactacatccgccccaccacttctggttgcctctgttgactattaatccagatgtaaacaaccagatgtttttttctaacttgtacaaactgacgtgtgtcaactatcatggaaggaaaaaaatgtacagattaaaattattcagtgttatgtactgtaagttaatatttttgtagaatggacatcaatctactttgcaaaatttggaggctatttcaacattgcactgtagaaatgtaaagtaatgtatgcaatgtaaaggaaagcccgcggtagctgagcgcttcataacagaatgttctaatcaagtacgtggtatttggggatgtctccaatattgctcttgtattctttctaattgggtttagtgactagttgaaggaaaatgttataacgccatttggttcacatgtgaagtgccctccatagccaaatgttgggatttttttttttttcgtttttggttggactgtttgcagatatttaaattttatgaaatttccaaagattttggttgataacccccttttaccttctaaatgatttgagatgttcttatgttcttactgtgtgttttaaatatatataaaagagccacaagcattt

SEQ ID NO: 192225 - DNA, 826 bp, Homo sapiens
  Payload ID: 17968
  Gene Name: transcription factor 4
  ENST ID: ENST00000628636
  CDS Start-End: 153-826
gtatttgggcttagatcttctggtgcctccctcggcgtgctacccataaggtcgaaagaaaagcaagtaaaacagaaaggggctcatactcatcttatgggagagaatcaaacttacagggttgccaccagcagagtctccttggaggtgacatggatatgggcaacccaggaaccctttcgcccaccaaacctggttcccagtactatcagtattctagcaataatccccgaaggaggcctcttcacagtagtgccatggaggtacagacaaagaaagttcgaaaagttcctccaggtttgccatcttcagtctatgctccatcagcaagcactgccgactacaatagggactcgccaggctatccttcctccaaaccagcaaccagcactttccctagctccttcttcatgcaagatggccatcacagcagtgacccttggagctcctccagtgggatgaatcagcctggctatgcaggaatgttgggcaactcttctcatattccacagtccagcagctactgtagcctgcatccacatgaacgtttgagctatccatcacactcctcagcagacatcaattccagtcttcctccgatgtccactttccatcgtagtggtacaaaccattacagcacctcttcctgtacgcctcctgccaacgggacagacagtataatggcaaatagaggaagcggggcagccggcagctcccagactggagatgctctggggaaagcacttgcttcgatctattctccagatcacactaacaacagcttttcatcaaacccttcaactcctgttggctctcctccatctct

SEQ ID NO: 192226 - DNA, 1701 bp, Homo sapiens
  Payload ID: 17968
  Gene Name: transcription factor 4
  Uniprot ID: P15884
  ENST ID: ENST00000626584
  CDS Start-End: 346-1701
tagtaaaacatgttaggacagccaagccccagcatgttgtgttctgtcctctggctggcagattcacgccacaacagtttattcatccacatgctttttggcgactcttcatcacgtatttgggcttagatcttctggtgcctccctcggcgtgctacccataaggtcgaaagaaaagcaagtaaaacagaaaggggctcatactcatcttatgggagagaatcaaacttacagggttgccaccaggtctatgctccatcagcaagcactgccgactacaatagggactcgccaggctatccttcctccaaaccagcaaccagcactttccctagctccttcttcatgcaagatggccatcacagcagtgacccttggagctcctccagtgggatgaatcagcctggctatgcaggaatgttgggcaactcttctcatattccacagtccagcagctactgtagcctgcatccacatgaacgtttgagctatccatcacactcctcagcagacatcaattccagtcttcctccgatgtccactttccatcgtagtggtacaaaccattacagcacctcttcctgtacgcctcctgccaacgggacagacagtataatggcaaatagaggaagcggggcagccggcagctcccagactggagatgctctggggaaagcacttgcttcgatctattctccagatcacactaacaacagcttttcatcaaacccttcaactcctgttggctctcctccatctctctcagcaggcacagctgtttggtctagaaatggaggacaggcctcatcgtctcctaattatgaaggacccttacactctttgcaaagccgaattgaagatcgtttagaaagactggatgatgctattcatgttctccggaaccatgcagtgggcccatccacagctatgcctggtggtcatggggacatgcatggaatcattggaccttctcataatggagccatgggtggtctgggctcagggtatggaaccggccttctttcagccaacagacattcactcatggtggggacccatcgtgaagatggcgtggccctgagaggcagccattctcttctgccaaaccaggttccggttccacagcttcctgtccagtctgcgacttcccctgacctgaacccaccccaggacccttacagaggcatgccaccaggactacaggggcagagtgtctcctctggcagctctgagatcaaatccgatgacgagggtgatgagaacctgcaagacacgaaatcttcggaggacaagaaattagatgacgacaagaaggatatcaaatcaattactagcaataatgacgatgaggacctgacaccagagcagaaggcagagcgtgagaaggagcggaggatggccaacaatgcccgagagcgtctgcgggtccgtgacatcaacgaggctttcaaagagctcggccgcatggtgcagctccacctcaagagtgacaagccccagaccaagctcctgatcctccaccaggcggtggccgtcatcctcagtctggagcagcaagtccgagaaaggaatctgaatccgaaagctgcgtgtctgaaaagaagggaggaagagaaggtgtcctcagagcctccccctctctccttggccggcccacaccctggaatgggagacgcatcgaatcacatgggacagatgtaa

SEQ ID NO: 192227 - DNA, 579 bp, Homo sapiens
  Payload ID: 17968
  Gene Name: transcription factor 4
  ENST ID: ENST00000626425
  CDS Start-End: 43-579
aaattgctctcctgttagagacgaaatgagaatttagtgcagatgttttcacctcctgtgagcagtgggaaaaatggaccaacttctttggcaagtggacattttactggctcaaatgtagaagacagaagtagctcagggtcctgggggaatggaggacatccaagcccgtccaggaactatggagatgggactccctatgaccacatgaccagcagggaccttgggtcacatgacaatctctctccaccttttgtcaattccagaatacaaagtaaaacagaaaggggctcatactcatcttatgggagagaatcaaacttacagggttgccaccagagtctccttggaggtgacatggatatgggcaacccaggaaccctttcgcccaccaaacctggttcccagtactatcagtattctagcaataatccccgaaggaggcctcttcacagtagtgccatggaggtacagacaaagaaagttcgaaaagttcctccaggtttgccatcttcagtctatgctccatcagcaagcactgccgactacaatagggactcgccaggctatccttcctcc

SEQ ID NO: 192228 - DNA, 807 bp, Homo sapiens
  Payload ID: 17968
  Gene Name: transcription factor 4
  ENST ID: ENST00000629343
  CDS Start-End: 99-807
acatgctttttggcgactcttcatcacgtatttgggcttagatcttctggtgcctccctcggcgtgctacccataagcagagtctccttggaggtgacatggatatgggcaacccaggaaccctttcgcccaccaaacctggttcccagtactatcagtattctagcaataatccccgaaggaggcctcttcacagtagtgccatggaggtacagacaaagaaagttcgaaaagttcctccaggtttgccatcttcagtctatgctccatcagcaagcactgccgactacaatagggactcgccaggctatccttcctccaaaccagcaaccagcactttccctagctccttcttcatgcaagatggccatcacagcagtgacccttggagctcctccagtgggatgaatcagcctggctatgcaggaatgttgggcaactcttctcatattccacagtccagcagctactgtagcctgcatccacatgaacgtttgagctatccatcacactcctcagcagacatcaattccagtcttcctccgatgtccactttccatcgtagtggtacaaaccattacagcacctcttcctgtacgcctcctgccaacgggacagacagtataatggcaaatagaggaagcggggcagccggcagctcccagactggagatgctctggggaaagcacttgcttcgatctattctccagatcacactaacaacagcttttcatcaaacccttcaactcctgttggctctcctccatctctctcagcaggcacagctgtttggtctagaaatggag

SEQ ID NO: 192229 - DNA, 737 bp, Homo sapiens
  Payload ID: 17968
  Gene Name: transcription factor 4
  ENST ID: ENST00000630319
  CDS Start-End: 130-737
gatgtattttactaaataaacccttagcataaactctaagctgtttggtaacagtatgaaagatctttgaggagctctgaaggcacaagtgtcttcttttcaactgtaatatttctttgtttcttttagatgttttcacctcctgtgagcagtgggaaaaatggaccaacttctttggcaagtggacattttactggctcaagtaaaacagaaaggggctcatactcatcttatgggagagaatcaaacttacagggttgccaccagcagagtctccttggaggtgacatggatatgggcaacccaggaaccctttcgcccaccaaacctggttcccagtactatcagtattctagcaataatccccgaaggaggcctcttcacagtagtgccatggaggtacagacaaagaaagttcgaaaagttcctccaggtttgccatcttcagtctatgctccatcagcaagcactgccgactacaatagggactcgccaggctatccttcctccaaaccagcaaccagcactttccctagctccttcttcatgcaagatggccatcacagcagtgacccttggagctcctccagtgggatgaatcagcctggctatgcaggaatgttgggcaactcttctcatattccacagtccagcagctactgtagcctgcatccacatgaacgtttgagctatccatcacactcctcagcagacatcaattccagtcttcctccgat

SEQ ID NO: 192230 - DNA, 635 bp, Homo sapiens
  Payload ID: 17968
  Gene Name: transcription factor 4
  ENST ID: ENST00000630268
  CDS Start-End: 171-635
atattcggcatctgaaagatttgttgcattgaggtgaacagtgcttggttaagagctcctgccggagtgcagttcatggcagtttgtttggaaagaattctgcaggaaagaaatttacagccattccagcgcaacggaaacatctttggaatagtctccttggaggtgacatggatatgggcaacccaggaaccctttcgcccaccaaacctggttcccagtactatcagtattctagcaataatccccgaaggaggcctcttcacagtagtgccatggaggtacagacaaagaaagttcgaaaagttcctccaggtttgccatcttcagtctatgctccatcagcaagcactgccgactacaatagggactcgccaggctatccttcctccaaaccagcaaccagcactttccctagctccttcttcatgcaagatggccatcacagcagtgacccttggagctcctccagtgggatgaatcagcctggctatgcaggaatgttgggcaactcttctcatattccacagtccagcagctactgtagcctgcatccacatgaacgtttgagctatccatcacactcctcagcagacatcaattccagtcttcctccgatgtccactttccatcgt

SEQ ID NO: 192231 - DNA, 3789 bp, Homo sapiens
  Payload ID: 17968
  Gene Name: transcription factor 4
  Uniprot ID: P15884
  ENST ID: ENST00000629387
  CDS Start-End: 532-2547
ttataagcccgcagttcccggatgtgaatggattacaatgtatctttcagggaaacctattattatcaatgtgactccacgggggagtccatggtgatgatgatgaggaggaggatgatgatgatgagacacctctaaacttggaacaagtttaagactttatgagagaagaaaaaaaatcaccaacaagaattgtttgaggaaaaattataactatcctgtgttcatttttttttttataaacaataagaaaaagttgttggatttttttttaatgatttcttttttgggggagggaattttgttgcagttttatggtggaaaatgcaaaaaccagagccaggtgcataatcttgtaatctgtggatatccctggagcaggactgagtaccagttaaaatactttttggggatacacatgtgagatactaagtacttgcagaagatttttgtctctctttttaaagtctctttccttggaatattgtgagaatatttgtggccatttaaggtttgtgtgattttgctaaaatgcatcaccaacagcgaatggctgccttagggacggacaaagagctgagtgatttactggatttcagtgcgatgttttcacctcctgtgagcagtgggaaaaatggaccaacttctttggcaagtggacattttactggctcaaatgtagaagacagaagtagctcagggtcctgggggaatggaggacatccaagcccgtccaggaactatggagatgggactccctatgaccacatgaccagcagggaccttgggtcacatgacaatctctctccaccttttgtcaattccagaatacaaagtaaaacagaaaggggctcatactcatcttatgggagagaatcaaacttacagggttgccaccagcagagtctccttggaggtgacatggatatgggcaacccaggaaccctttcgcccaccaaacctggttcccagtactatcagtattctagcaataatccccgaaggaggcctcttcacagtagtgccatggaggtacagacaaagaaagttcgaaaagttcctccaggtttgccatcttcagtctatgctccatcagcaagcactgccgactacaatagggactcgccaggctatccttcctccaaaccagcaaccagcactttccctagctccttcttcatgcaagatggccatcacagcagtgacccttggagctcctccagtgggatgaatcagcctggctatgcaggaatgttgggcaactcttctcatattccacagtccagcagctactgtagcctgcatccacatgaacgtttgagctatccatcacactcctcagcagacatcaattccagtcttcctccgatgtccactttccatcgtagtggtacaaaccattacagcacctcttcctgtacgcctcctgccaacgggacagacagtataatggcaaatagaggaagcggggcagccggcagctcccagactggagatgctctggggaaagcacttgcttcgatctattctccagatcacactaacaacagcttttcatcaaacccttcaactcctgttggctctcctccatctctctcagcaggcacagctgtttggtctagaaatggaggacaggcctcatcgtctcctaattatgaaggacccttacactctttgcaaagccgaattgaagatcgtttagaaagactggatgatgctattcatgttctccggaaccatgcagtgggcccatccacagctatgcctggtggtcatggggacatgcatggaatcattggaccttctcataatggagccatgggtggtctgggctcagggtatggaaccggccttctttcagccaacagacattcactcatggtggggacccatcgtgaagatggcgtggccctgagaggcagccattctcttctgccaaaccaggttccggttccacagcttcctgtccagtctgcgacttcccctgacctgaacccaccccaggacccttacagaggcatgccaccaggactacaggggcagagtgtctcctctggcagctctgagatcaaatccgatgacgagggtgatgagaacctgcaagacacgaaatcttcggaggacaagaaattagatgacgacaagaaggatatcaaatcaattactaggtcaagatctagcaataatgacgatgaggacctgacaccagagcagaaggcagagcgtgagaaggagcggaggatggccaacaatgcccgagagcgtctgcgggtccgtgacatcaacgaggctttcaaagagctcggccgcatggtgcagctccacctcaagagtgacaagccccagaccaagctcctgatcctccaccaggcggtggccgtcatcctcagtctggagcagcaagtccgagaaaggaatctgaatccgaaagctgcgtgtctgaaaagaagggaggaagagaaggtgtcctcagagcctccccctctctccttggccggcccacaccctggaatgggagacgcatcgaatcacatgggacagatgtaaaagggtccaagttgccacattgcttcattaaaacaagagaccacttccttaacagctgtattatcttaaacccacataaacacttctccttaacccccatttttgtaatataagacaagtctgagtagttatgaatcgcagacgcaagaggtttcagcattcccaattatcaaaaaacagaaaaacaaaaaaaagaaagaaaaaagtgcaacttgagggacgactttctttaacatatcattcagaatgtgcaaagcagtatgtacaggctgagacacagcccagagactgaacggcaatctttccacactgtggaacaatgcatttgtgcctaaacttcttttggaaaaaaaaaatataattaatttgtaagtctgaaaaaaaaatatttaatttaaaaaaaattgtaaacttgcaataatgaaaaagtgtacttctgaagaaaactacatgaacgtttttgttggtattcaagtcagctagtgtttataattactggatattgaattaggggaagctcggctgccctagtaacaaaaccagcaaacgtcctgatgacaacgaagtgatgacattagccattccttagggtaggaggaacagatggatcttatagacctatgacaaatatatatataaatatatatataaatatatattaaaaatttagtgactatggtaagcttttgttcatttgtttcagacttttttctcctgtaaaaaaatagtactgattaacttttttaaaagaaagattttactgtaaatatggatttttttttttttggtcttatttctgtccctttccctggtttgttatcgtaacctgtagtgccaactctgcttccagaggggtagtgcaggatgaaatgctgaccctgatgttgcttctcattcataaataagtagaaagttgtttctccagtcttttgggaacacaggacttaaaagtcacatcatgtgtagatattacaagcagcattaccaagacatggcaaaaagagtttgtctgaattgtaatgttgcgtttgtgaacctattctgggattttcagaggtacaaggttagaatgctacaatgttaccactgtgccttccaatgtttatatcatcggaaacataacataatcaaagtggctgtgatttaacaaaatgattaaagtgttacctacctgtgtagccgaagtagtgtgcagtgaggcgtttctgaatacatggtcagatttttggaaaaaaacaaaaa

SEQ ID NO: 192232 - DNA, 1277 bp, Homo sapiens
  Payload ID: 17968
  Gene Name: transcription factor 4
  ENST ID: ENST00000628078
  CDS Start-End: 656-1277
cctgtttcccaaatgtaaattccatcatcatcttgatcatgatggggttcactcctgggaaagggagtttttaaaaaagagagagagagagagactcagaattttgaatagtttctttgctaaattcaccatctggagagcctgtgattgattagttttggcctcactattaagtgtcaatataatcaatgggaattactaggctagggtcattacatagataatttgcctgctgtgtaaataaaaatgaaattgtttaaattttgtgcaagagaaagtgaaaataaggagttacgatttgtttgttagagaaagtggaggccattggaatgacagtttttggaagtgtggagcagtttggctaagaataggaatgaaggatatttttttccagtttatcatagccagagtgaggaagtgttattccctctcttgcttgcatacattgccagtagtgcctactttacgtatgtaaacatcggggaagagcagtagatgtctgttacctggaggagatttttttttaaggaaaaacacaatttacacttttttgtcgtttctcttggcaggtaaaacagaaaggggctcatactcatcttatgggagagaatcaaacttacagggttgccaccagcagagtctccttggaggtgacatggatatgggcaacccaggaaccctttcgcccaccaaacctggttcccagtactatcagtattctagcaataatccccgaaggaggcctcttcacagtagtgccatggaggtacagacaaagaaagttcgaaaagttcctccaggtttgccatcttcagtctatgctccatcagcaagcactgccgactacaatagggactcgccaggctatccttcctccaaaccagcaaccagcactttccctagctccttcttcatgcaagatggccatcacagcagtgacccttggagctcctccagtgggatgaatcagcctggctatgcaggaatgttgggcaactcttctcatattccacagtccagcagctactgtagcctgcatccacatgaacgtttgagctatccatcacactcctcagcagacatcaattccagtcttcctccgatgtccactttccatcgtagtggtacaaaccattacagcacctcttcctgtacgcctcctgccaacgggacagacagtataatggcaaatagaggaagcggggcagccggcagctcccagactggagatgctctggggaaagcacttgcttcgatctattctccagatcacacta

SEQ ID NO: 192233 - DNA, 735 bp, Homo sapiens
  Payload ID: 17968
  Gene Name: transcription factor 4
  ENST ID: ENST00000630828
  CDS Start-End: 51-735
attggaatgacagtttttggaagtgtggagcagtttggctaagaataggaatgaaggatatttttttccagtttatcatagccagagtgaggaagtgttattccctctcttgcttgcatacattgccagtagtgcctactttacgtaaaacagaaaggggctcatactcatcttatgggagagaatcaaacttacagggttgccaccagcagagtctccttggaggtgacatggatatgggcaacccaggaaccctttcgcccaccaaacctggttcccagtactatcagtattctagcaataatccccgaaggaggcctcttcacagtagtgccatggaggtacagacaaagaaagttcgaaaagttcctccaggtttgccatcttcagtctatgctccatcagcaagcactgccgactacaatagggactcgccaggctatccttcctccaaaccagcaaccagcactttccctagctccttcttcatgcaagatggccatcacagcagtgacccttggagctcctccagtgggatgaatcagcctggctatgcaggaatgttgggcaactcttctcatattccacagtccagcagctactgtagcctgcatccacatgaacgtttgagctatccatcacactcctcagcagacatcaattccagtcttcctccgatgtccactttccatcgtagtggtacaaaccattacagcacctcttcctgtacgcctc

SEQ ID NO: 192234 - DNA, 721 bp, Homo sapiens
  Payload ID: 17968
  Gene Name: transcription factor 4
  ENST ID: ENST00000628689
  CDS Start-End: 98-340
gaaaatgcaactgaaggaattgttgtgaaaaaagggacagcgagtttgaaataaaagttgttagagtggtactgaggagaaaaaagaatccgagaccatgtactgcgcatacacaatcccgggcatgggcggcaactctttgatgtactactataatgggaaagcggtctatgctccatcagcaagcactgccgactacaatagggactcgccaggctatccttcctccaaaccagcaaccagcactttccctagctccttcttcatgcaagagctatccatcacactcctcagcagacatcaattccagtcttcctccgatgtccactttccatcgtagtggtacaaaccattacagcacctcttcctgtacgcctcctgccaacgggacagacagtataatggcaaatagaggaagcggggcagccggcagctcccagactggagatgctctggggaaagcacttgcttcgatctattctccagatcacactaacaacagcttttcatcaaacccttcaactcctgttggctctcctccatctctctcagcaggcacagctgtttggtctagaaatggaggacaggcctcatcgtctcctaattatgaaggacccttacactctttgcaaagccgaattgaagatcgtttagaaagactggatgatgctattcatgttctccggaaccatgcagtgggcccatccacagctatgcctgg

SEQ ID NO: 192235 - DNA, 501 bp, Homo sapiens
  Payload ID: 17968
  Gene Name: transcription factor 4
  ENST ID: ENST00000630224
  CDS Start-End: 61-306
gatgtctacagtatcacctttcttgtagattggcacttatgcggccaaaggaacaacaccatgttttctaaaaggctggagaaaataccacaggtgcctctcctctttcccttcatcttcatcattttgacaaattactcaaagatggagggtgcagttgaaagccagccatcattttttaaaacttctcaggacattgtaacatgcacttgggttgagaactgctactcgagcttctccaggaggcccttggaggtttgtgtgattttgctaaaatgcatcaccaacagcgaatggctgccttagggacggacaaagagctgagtgatttactggatttcagtgcgatgttttcacctcctgtgagcagtgggaaaaatggaccaacttctttggcaagtggacattttactggctcaaatgtagaagacagaagtagctcagggtcctgggggaatggaggacatccaagcccgtccaggaactatggagatgggactc

SEQ ID NO: 192236 - DNA, 601 bp, Homo sapiens
  Payload ID: 17968
  Gene Name: transcription factor 4
  ENST ID: ENST00000627784
  CDS Start-End: 134-601
agcaggcgcgggagcgggcgcaggagcaggcggcggcggtggcggcggcggttagacatgaacgccgcctcggcgccggcggtgcacggagagccccttctcgcgcgcgggcggtttgtgtgattttgctaaaatgcatcaccaacagcgaatggctgccttagggacggacaaagagctgagtgatttactggatttcagtgcgatgttttcacctcctgtgagcagtgggaaaaatggaccaacttctttggcaagtggacattttactggctcaaatgtagaagacagaagtagctcagggtcctgggggaatggaggacatccaagcccgtccaggaactatggagatgggactccctatgaccacatgaccagcagggaccttgggtcacatgacaatctctctccaccttttgtcaattccagaatacaaagtaaaacagaaaggggctcatactcatcttatgggagagaatcaaacttacagggttgccaccagagtctccttggaggtgacatggatatgggcaacccaggaaccctttcgcccaccaaacctggttcccagtactatcagtattctagcaataatccccga

SEQ ID NO: 192237 - DNA, 882 bp, Homo sapiens
  Payload ID: 17968
  Gene Name: transcription factor 4
  ENST ID: ENST00000627685
  CDS Start-End: 271-882
tggggctctttcatgctgctgctgctgctgctgctgctgctgctgctgctgctgctgctgctgctgctgctgctgctgctgctgctgctcctcctcctcctcctccttctcctcctcctcctcctcttctagaccttcttttggagaaatggctttcggaagttttgccaggaaacgtagccctaggcaggcagctttgcagccccctttctgcttgttgcactttctccattcgttcctttgctttttgcaggctctgactcagggaagatgttttcacctcctgtgagcagtgggaaaaatggaccaacttctttggcaagtggacattttactggctcaaatgtagaagacagaagtagctcagggtcctgggggaatggaggacatccaagcccgtccaggaactatggagatgggactccctatgaccacatgaccagcagggaccttgggtcacatgacaatctctctccaccttttgtcaattccagaatacaaagtaaaacagaaaggggctcatactcatcttatgggagagaatcaaacttacagggttgccaccagcagagtctccttggaggtgacatggatatgggcaacccaggaaccctttcgcccaccaaacctggttcccagtactatcagtattctagcaataatccccgaaggaggcctcttcacagtagtgccatggaggtacagacaaagaaagttcgaaaagttcctccaggtttgccatcttcagtctatgctccatcagcaagcactgccgactacaatagggactcgccaggctatccttcctccaaaccagcaaccagcactttccctagctccttcttcatgcaagatggccatcacagcagtgacccttggagc

SEQ ID NO: 192238 - DNA, 1018 bp, Homo sapiens
  Payload ID: 17968
  Gene Name: transcription factor 4
  ENST ID: ENST00000630720
  CDS Start-End: 74-1018
gtgaaaaaagggacagcgagtttgaaataaaagttgttagagtggtactgaggagaaaaaagaatccgagaccatgtactgcgcatacacaatcccgggcatgggcggcaactctttgatgtactactataatgggaaagcggtctatgctccatcagcaagcactgccgactacaatagggactcgccaggctatccttcctccaaaccagcaaccagcactttccctagctccttcttcatgcaagatggccatcacagcagtgacccttggagctcctccagtgggatgaatcagcctggctatgcaggaatgttgggcaactcttctcatattccacagtccagcagctactgtagcctgcatccacatgaacgtttgagctatccatcacactcctcagcagacatcaattccagtcttcctccgatgtccactttccatcgtagtggtacaaaccattacagcacctcttcctgtacgcctcctgccaacgggacagacagtataatggcaaatagaggaagcggggcagccggcagctcccagactggagatgctctggggaaagcacttgcttcgatctattctccagatcacactaacaacagcttttcatcaaacccttcaactcctgttggctctcctccatctctctcaggcacagctgtttggtctagaaatggaggacaggcctcatcgtctcctaattatgaaggacccttacactctttgcaaagccgaattgaagatcgtttagaaagactggatgatgctattcatgttctccggaaccatgcagtgggcccatccacagctatgcctggtggtcatggggacatgcatggaatcattggaccttctcataatggagccatgggtggtctgggctcagggtatggaaccggccttctttcagccaacagacattcactcatggtggggacccatcgtgaagatggcgtggccctgagaggcagccattctcttctgccaaaccaggttccggttccacag

SEQ ID NO: 192239 - DNA, 606 bp, Homo sapiens
  Payload ID: 17968
  Gene Name: transcription factor 4
  ENST ID: ENST00000625925
  CDS Start-End: 202-606
agattcacgccacaacagtttattcatccacatgctttttggcgactcttcatcacgtatttgggcttagatcttctggtgcctccctcggcgtgctacccataaggtcgaaagaaaagtaaaacagaaaggggctcatactcatcttatgggagagaatcaaacttacagggttgccaccagagtctccttggaggtgacatggatatgggcaacccaggaaccctttcgcccaccaaacctggttcccagtactatcagtattctagcaataatccccgaaggaggcctcttcacagtagtgccatggaggtacagacaaagaaagttcgaaaagttcctccaggtttgccatcttcagtctatgctccatcagcaagcactgccgactacaatagggactcgccaggctatccttcctccaaaccagcaaccagcactttccctagctccttcttcatgcaagatggccatcacagcagtgacccttggagctcctccagtgggatgaatcagcctggctatgcaggaatgttgggcaactcttctcatattccacagtccagcagctactgtagcctgcatccacatgaacgtttgagctat

SEQ ID NO: 192240 - DNA, 833 bp, Homo sapiens
  Payload ID: 17968
  Gene Name: transcription factor 4
  ENST ID: ENST00000626595
  CDS Start-End: 171-833
gtgtgagtgagagggaacgagagtaagagaaagaaagaagtgaggggatgtaaactcgaataaatttcaaagtgcctccgagggatgcaacgggcaaaaactgaactgttcaggcttcagattgtaactgacgatctgaggaaaaatgaggtttgtgtgattttgctaaaatgcatcaccaacagcgaatggctgccttagggacggacaaagagctgagtgatttactggatttcagtgcgatgttttcacctcctgtgagcagtgggaaaaatggaccaacttctttggcaagtggacattttactggctcaaatgtagaagacagaagtagctcagggtcctgggggaatggaggacatccaagcccgtccaggaactatggagatgggactccctatgaccacatgaccagcagggaccttgggtcacatgacaatctctctccaccttttgtcaattccagaatacaaagtaaaacagaaaggggctcatactcatcttatgggagagaatcaaacttacagggttgccaccagcagagtctccttggaggtgacatggatatgggcaacccaggaaccctttcgcccaccaaacctggttcccagtactatcagtattctagcaataatccccgaaggaggcctcttcacagtagtgccatggaggtacagacaaagaaagttcgaaaagttcctccaggtttgccatcttcagtctatgctccatcagcaagcactgccgactacaatagggactcgccaggctatccttcctccaaaccagcaaccagcactttccctagctccttcttcatgcaagatggccat

SEQ ID NO: 192241 - DNA, 831 bp, Homo sapiens
  Payload ID: 17968
  Gene Name: transcription factor 4
  ENST ID: ENST00000630712
  CDS Start-End: 446-831
agattctcttttttttaataataggaaagtacttttatttgtgacccaagtatgagaatttctggcaaactttttttttaatattaaaaaaaaccccccaaaccctccaccttttcccttctttccttttccctttcaagactatttaaatgtacatagtaaaacatgttaggacagccaagccccagcatgttgtgttctgtcctctggctggcagattcacgccacaacagtttattcatccacatgctttttggcgactcttcatcacgtatttgggcttagatcttctggtgcctccctcggcgtgctacccataaggtcgaaagaaaagcaagtattcgatttctctattcagggtaaaacagaaaggggctcatactcatcttatgggagagaatcaaacttacagggttgccaccagcagagtctccttggaggtgacatggatatgggcaacccaggaaccctttcgcccaccaaacctggttcccagtactatcagtattctagcaataatccccgaaggaggcctcttcacagtagtgccatggaggtacagacaaagaaagttcgaaaagttcctccaggtttgccatcttcagtctatgctccatcagcaagcactgccgactacaatagggactcgccaggctatccttcctccaaaccagcaaccagcactttccctagctccttcttcatgcaagatggccatcacagcagtgacccttggagctcctccagtgggatgaatcagcctggctatgcaggaatgttgggcaactcttctcatattccacagtccagcagctactgtagcctgcatcc

SEQ ID NO: 192242 - DNA, 622 bp, Homo sapiens
  Payload ID: 17968
  Gene Name: transcription factor 4
  ENST ID: ENST00000626631
  CDS Start-End: 1-246
ctcggccgcatggtgcagctccacctcaagagtgacaagccccagaccaagctcctgatcctccaccaggcggtggccgtcatcctcagtctggagcagcaagtccgagaaaggaatctgaatccgaaagctgcgtgtctgaaaagaagggaggaagagaaggtgtcctcagagcctccccctctctccttggccggcccacaccctggaatgggagacgcatcgaatcacatgggacagatgtaaaagggcaagtttgttttcagccatttctgagatcgatcattcaaaactctcatcagtgtatcagccataaaagtgaatttcacccaaattgacagatattttctttcatggaaaaagaattttttttaaaaaaagcatactttttctgttacaaatatattaatgaattttttctctcttttttcctttctcaggtccaagttgccacattgcttcattaaaacaagagaccacttccttaacagctgtattatcttaaacccacataaacacttctccttaacccccatttttgtaatataagacaagtctgagtagttatgaatcgcagacgcaagaggtttcagcattcccaattatcaaaaaacagaaaaac

SEQ ID NO: 192243 - DNA, 699 bp, Homo sapiens
  Payload ID: 17968
  Gene Name: transcription factor 4
  ENST ID: ENST00000627320
  CDS Start-End: 76-480
agtgcccattctcttgatgtctacagtatcacctttcttgtagattggcacttatgcggccaaaggaacaacaccatgttttctaaaaggctggagaaaataccacaggtgcctctcctctttcccttcatcttcatcattttgacaaattactcaaagatggagggtgcagttgaaagccagccatcattttttaaaacttctcaggacattgtaacatgcacttgggttgagaactgctactcgagcttctccaggaggcccttggagcaaatgttttgtaaacaccaatctaagaacattatctcttggacgggcatggtggctcacacctgtaatcccagcactttgggaggccaagatggagtctcattctgtcatccagaccggagtgcagtggcaccatctcagctcactgcaacctccacctcccaggttcaagctatcctcctgcctcagcctcctgagtacccgggataggcatgttttcacctcctgtgagcagtgggaaaaatggaccaacttctttggcaagtggacattttactggctcaaatgtagaagacagaagtagctcagggtcctgggggaatggaggacatccaagcccgtccaggaactatggagatgggactccctatgaccacatgaccagcagggaccttgggtcacatgacaatctctctccaccttttgtca

SEQ ID NO: 192244 - DNA, 3045 bp, Homo sapiens
  Payload ID: 17969
  Gene Name: transcription factor 7 (T-cell specific, HMG-box)
  Uniprot ID: P36402
  ENST ID: ENST00000342854
  CDS Start-End: 197-1351
cccgccagctcgcggagccgctctgccccgcgccctagcccgcgcctgcagcccgcccaggcggagtcagcccgcgctccgcccgccgcgatccgagctcggaggttcggactccgggctcgccgccccccgggccggctccgcgccccgcactcccggcgcccagcgccccgcgccccggcgggcggagcgcaccatgccgcagctggactccggcgggggcggcgcgggcggcggcgacgacctcggcgcgccggacgagctgctggccttccaggatgaaggcgaggagcaggacgacaagagccgcgacagcgccgccggtcccgagcgcgacctggccgagctcaagtcgtcgctcgtgaacgagtccgagggcgcggccggcggcgcagggatcccgggggtcccgggggccggcgccggggcccgcggcgaggccgaggctctcgggcgggaacacgctgcgcagagactcttcccggacaaacttccagagcccctggaggacggcctgaaggccccggagtgcaccagcggcatgtacaaagagaccgtctactccgccttcaatctgctcatgcattacccacccccctcgggagcagggcagcacccccagccgcagcccccgctgcacaaggccaatcagcccccccacggtgtcccccaactctctctctacgaacatttcaacagcccacatcccacccctgcacctgcggacatcagccagaagcaagttcacaggcctctgcagacccctgacctctctggcttctactccctgacctcaggcagcatggggcagctcccccacactgtgagctggttcacccacccatccttgatgctaggttctggtgtacctggtcacccagcagccatcccccacccggccattgtgcccccctcagggaagcaggagctgcagcccttcgaccgcaacctgaagacacaagcagagtccaaggcagagaaggaggccaagaagccaaccatcaagaagcccctcaatgccttcatgctgtacatgaaggagatgagagccaaggtcattgcagagtgcacacttaaggagagcgctgccatcaaccagatcctgggccgcaggtggcacgcgctgtcgcgagaagagcaggccaagtactatgagctggcccgcaaggagaggcagctgcacatgcagctatacccaggctggtcagcgcgggacaactacgggaagaagaagaggcggtcgagggaaaagcaccaagaatccaccacaggaggaaaaagaaatgcattcggtacttacccggagaaggccgctgccccagccccgttccttccgatgacagtgctctaggctgccccgggtccccagctccccaggactcaccctcataccatctgctgccccgcttccccacagaactgcttactagccctgcggagccggcacctacatccccaggtctctccactgctctcagcctcccaaccccagggcccccacaggccccccgcagcaccctgcagagcacacaggtacagcaacaggaatctcagagacaggtggcctagcaggcacaggacacctggccgcctccaggagcctaccccctgaaagtgacagagacccagatctcatggaaactggccaggggtcctgttaacgtcatctcagggtccagaccctgaagatttcagaggctgcaggacttctgcctgaacctggggtcatcgattcaaactgctccaagtggtgggaatcagatctgtcttgatgtgtcatctaattaagggaatcccttgtacctatggctgcctgcatctattctttgtaccatctgtcttgccagccagaagcctctgcctccctagcttttctgctataggtcagagatgggctgaactgagcctagctaccttctctacccatctcccccatcccccactgccacaccctccccattcagacacttcatggaccaagaatgagctggtttgtcaaacaacatgtgagcatggtcacaagcacaaagctcaagatgacagctcttctaaggaaatggagaagctctgtttataaaaacaaaaacaaaaccagctgctactcataagttggaccagaggaagccccttactatgatctcaggagcttgcaagaagcaggaaggggaatggaataggttaagtttaggcctatcaacctaagcaacagaaataatctgacactaccttatcaggcaaattggggaggggagggtgtatctagctctagttcaaattatttggaagtgttccctgagaaacccaccagcctaagaagctctggccccaggcttgtcactagcagctgcagtcaacagttcaaagaagtcatggcccaaatccagtgtgcacccctccccattcacagagcctttttcacaattccatttccagttcatctatggcagtccagccagctcctgggcagcttgagagggcaaacccaaaacctcatgacagccagagcctgtctttcagcattcagtccgcctggccggctccagtttccccatggggctgcgggacagaggaccattacaactagatcaaggagcccagaaaacctccagtagtggacaacaggttttcaccatagcctacgttaacccatttttgagccaagcttcaaccctcagccttgaaaaacaagtctttaatttaatttttgttttttgcctaaatccaaagaaaaagggctgccgggccaggcgcggtggctcacgcctgtaatcccagcactttggcaggccgaggcaggtggatcacctgacgtcagtagtttgagaccagcctggccaacatggtgaaaccctgtatctactaaaaatacaaaaattagccggacgtggtggtgcgcgcatgtaatcccagctactcgggaggctgaggcggaagaatcacttgaacccgggaggcggaggttccagtgagccgagatggcgctattgcactccagtctgggtaacagggagactgcatctcaaaaaaaaaaaaaaaaaaaaaaaa

SEQ ID NO: 192245 - DNA, 2929 bp, Homo sapiens
  Payload ID: 17969
  Gene Name: transcription factor 7 (T-cell specific, HMG-box)
  Uniprot ID: P36402
  ENST ID: ENST00000378560
  CDS Start-End: 98-904
atccccgcctcccctcctgcccaggtgactgactaatccgccgccttcaggagacagaattggccaaggcctgaaggccccggagtgcaccagcggcatgtacaaagagaccgtctactccgccttcaatctgctcatgcattacccacccccctcgggagcagggcagcacccccagccgcagcccccgctgcacaaggccaatcagcccccccacggtgtcccccaactctctctctacgaacatttcaacagcccacatcccacccctgcacctgcggacatcagccagaagcaagttcacaggcctctgcagacccctgacctctctggcttctactccctgacctcaggcagcatggggcagctcccccacactgtgagctggttcacccacccatccttgatgctaggttctggtgtacctggtcacccagcagccatcccccacccggccattgtgcccccctcagggaagcaggagctgcagcccttcgaccgcaacctgaagacacaagcagagtccaaggcagagaaggaggccaagaagccaaccatcaagaagcccctcaatgccttcatgctgtacatgaaggagatgagagccaaggtcattgcagagtgcacacttaaggagagcgctgccatcaaccagatcctgggccgcaggtggcacgcgctgtcgcgagaagagcaggccaagtactatgagctggcccgcaaggagaggcagctgcacatgcagctatacccaggctggtcagcgcgggacaactacgggaagaagaagaggcggtcgagggaaaagcaccaagaatccaccacagaccctggctcgcctaagaaatgccgtgctcgctttggcctcaaccagcagacggattggtgtggtccgtgcagataactctcttcactattcctaggaggaaaaagaaatgcattcggtacttacccggagaaggccgctgccccagccccgttccttccgatgacagtgctctaggctgccccgggtccccagctccccaggactcaccctcataccatctgctgccccgcttccccacagaactgcttactagccctgcggagccggcacctacatccccaggtctctccactgctctcagcctcccaaccccagggcccccacaggccccccgcagcaccctgcagagcacacaggtacagcaacaggaatctcagagacaggtggcctagcaggcacaggacacctggccgcctccaggagcctaccccctgaaagtgacagagacccagatctcatggaaactggccaggggtcctgttaacgtcatctcagggtccagaccctgaagatttcagaggctgcaggacttctgcctgaacctggggtcatcgattcaaactgctccaagtggtgggaatcagatctgtcttgatgtgtcatctaattaagggaatcccttgtacctatggctgcctgcatctattctttgtaccatctgtcttgccagccagaagcctctgcctccctagcttttctgctataggtcagagatgggctgaactgagcctagctaccttctctacccatctcccccatcccccactgccacaccctccccattcagacacttcatggaccaagaatgagctggtttgtcaaacaacatgtgagcatggtcacaagcacaaagctcaagatgacagctcttctaaggaaatggagaagctctgtttataaaaacaaaaacaaaaccagctgctactcataagttggaccagaggaagccccttactatgatctcaggagcttgcaagaagcaggaaggggaatggaataggttaagtttaggcctatcaacctaagcaacagaaataatctgacactaccttatcaggcaaattggggaggggagggtgtatctagctctagttcaaattatttggaagtgttccctgagaaacccaccagcctaagaagctctggccccaggcttgtcactagcagctgcagtcaacagttcaaagaagtcatggcccaaatccagtgtgcacccctccccattcacagagcctttttcacaattccatttccagttcatctatggcagtccagccagctcctgggcagcttgagagggcaaacccaaaacctcatgacagccagagcctgtctttcagcattcagtccgcctggccggctccagtttccccatggggctgcgggacagaggaccattacaactagatcaaggagcccagaaaacctccagtagtggacaacaggttttcaccatagcctacgttaacccatttttgagccaagcttcaaccctcagccttgaaaaacaagtctttaatttaatttttgttttttgcctaaatccaaagaaaaagggctgccgggccaggcgcggtggctcacgcctgtaatcccagcactttggcaggccgaggcaggtggatcacctgacgtcagtagtttgagaccagcctggccaacatggtgaaaccctgtatctactaaaaatacaaaaattagccggacgtggtggtgcgcgcatgtaatcccagctactcgggaggctgaggcggaagaatcacttgaacccgggaggcggaggttccagtgagccgagatggcgctattgcactccagtctgggtaacagggagactgcatctcaaaaaaaaaaaaaaaaaaaaaaaagggctgtccatgtattcacacacccctcaaaaaaagcctttagttcctactttagccactggtttctcagaatccaaagatcacatattctagtgtaacactgcaagaagtcttgagaaaaagattattgtagtgttcaaaatatttttgtattgttaatgcatcatcatagaaaaacttttaaacatgagaataaagatactttttactgggtttgtttttcaaagcctga

SEQ ID NO: 192246 - DNA, 2815 bp, Homo sapiens
  Payload ID: 17969
  Gene Name: transcription factor 7 (T-cell specific, HMG-box)
  Uniprot ID: P36402
  ENST ID: ENST00000395023
  CDS Start-End: 80-889
gcccaggtgactgactaatccgccgccttcaggagacagaattggccaaggcctgaaggccccggagtgcaccagcggcatgtacaaagagaccgtctactccgccttcaatctgctcatgcattacccacccccctcgggagcagggcagcacccccagccgcagcccccgctgcacaaggccaatcagcccccccacggtgtcccccaactctctctctacgaacatttcaacagcccacatcccacccctgcacctgcggacatcagccagaagcaagttcacaggcctctgcagacccctgacctctctggcttctactccctgacctcaggcagcatggggcagctcccccacactgtgagctggttcacccacccatccttgatgctaggttctggtgtacctggtcacccagcagccatcccccacccggccattgtgcccccctcagggaagcaggagctgcagcccttcgaccgcaacctgaagacacaagcagagtccaaggcagagaaggaggccaagaagccaaccatcaagaagcccctcaatgccttcatgctgtacatgaaggagatgagagccaaggtcattgcagagtgcacacttaaggagagcgctgccatcaaccagatcctgggccgcaggtggcacgcgctgtcgcgagaagagcaggccaagtactatgagctggcccgcaaggagaggcagctgcacatgcagctatacccaggctggtcagcgcgggacaactacgggaagaagaagaggcggtcgagggaaaagcaccaagaatccaccacaggaggaaaaagaaatgcattcggtacttacccggagaaggccgctgccccagccccgttccttccgatgacagtgctctaggctgccccgggtccccagctccccaggactcaccctcataccatctgctgccccgcttccccacagaactgcttactagccctgcggagccggcacctacatccccaggtctctccactgctctcagcctcccaaccccagggcccccacaggccccccgcagcaccctgcagagcacacaggtacagcaacaggaatctcagagacaggtggcctagcaggcacaggacacctggccgcctccaggagcctaccccctgaaagtgacagagacccagatctcatggaaactggccaggggtcctgttaacgtcatctcagggtccagaccctgaagatttcagaggctgcaggacttctgcctgaacctggggtcatcgattcaaactgctccaagtggtgggaatcagatctgtcttgatgtgtcatctaattaagggaatcccttgtacctatggctgcctgcatctattctttgtaccatctgtcttgccagccagaagcctctgcctccctagcttttctgctataggtcagagatgggctgaactgagcctagctaccttctctacccatctcccccatcccccactgccacaccctccccattcagacacttcatggaccaagaatgagctggtttgtcaaacaacatgtgagcatggtcacaagcacaaagctcaagatgacagctcttctaaggaaatggagaagctctgtttataaaaacaaaaacaaaaccagctgctactcataagttggaccagaggaagccccttactatgatctcaggagcttgcaagaagcaggaaggggaatggaataggttaagtttaggcctatcaacctaagcaacagaaataatctgacactaccttatcaggcaaattggggaggggagggtgtatctagctctagttcaaattatttggaagtgttccctgagaaacccaccagcctaagaagctctggccccaggcttgtcactagcagctgcagtcaacagttcaaagaagtcatggcccaaatccagtgtgcacccctccccattcacagagcctttttcacaattccatttccagttcatctatggcagtccagccagctcctgggcagcttgagagggcaaacccaaaacctcatgacagccagagcctgtctttcagcattcagtccgcctggccggctccagtttccccatggggctgcgggacagaggaccattacaactagatcaaggagcccagaaaacctccagtagtggacaacaggttttcaccatagcctacgttaacccatttttgagccaagcttcaaccctcagccttgaaaaacaagtctttaatttaatttttgttttttgcctaaatccaaagaaaaagggctgccgggccaggcgcggtggctcacgcctgtaatcccagcactttggcaggccgaggcaggtggatcacctgacgtcagtagtttgagaccagcctggccaacatggtgaaaccctgtatctactaaaaatacaaaaattagccggacgtggtggtgcgcgcatgtaatcccagctactcgggaggctgaggcggaagaatcacttgaacccgggaggcggaggttccagtgagccgagatggcgctattgcactccagtctgggtaacagggagactgcatctcaaaaaaaaaaaaaaaaaaaaaaaagggctgtccatgtattcacacacccctcaaaaaaagcctttagttcctactttagccactggtttctcagaatccaaagatcacatattctagtgtaacactgcaagaagtcttgagaaaaagattattgtagtgttcaaaatatttttgtattgttaatgcatcatcatagaaaaacttttaaacatgagaataaagatactttttactgggtttgtttttcaaagcctga

SEQ ID NO: 192247 - DNA, 3330 bp, Homo sapiens
  Payload ID: 17969
  Gene Name: transcription factor 7 (T-cell specific, HMG-box)
  ENST ID: ENST00000395029
  CDS Start-End: 196-1641
ccgccagctcgcggagccgctctgccccgcgccctagcccgcgcctgcagcccgcccaggcggagtcagcccgcgctccgcccgccgcgatccgagctcggaggttcggactccgggctcgccgccccccgggccggctccgcgccccgcactcccggcgcccagcgccccgcgccccggcgggcggagcgcaccatgccgcagctggactccggcgggggcggcgcgggcggcggcgacgacctcggcgcgccggacgagctgctggccttccaggatgaaggcgaggagcaggacgacaagagccgcgacagcgccgccggtcccgagcgcgacctggccgagctcaagtcgtcgctcgtgaacgagtccgagggcgcggccggcggcgcagggatcccgggggtcccgggggccggcgccggggcccgcggcgaggccgaggctctcgggcgggaacacgctgcgcagagactcttcccggacaaacttccagagcccctggaggacggcctgaaggccccggagtgcaccagcggcatgtacaaagagaccgtctactccgccttcaatctgctcatgcattacccacccccctcgggagcagggcagcacccccagccgcagcccccgctgcacaaggccaatcagcccccccacggtgtcccccaactctctctctacgaacatttcaacagcccacatcccacccctgcacctgcggacatcagccagaagcaagttcacaggcctctgcagacccctgacctctctggcttctactccctgacctcaggcagcatggggcagctcccccacactgtgagctggttcacccacccatccttgatgctaggttctggtgtacctggtcacccagcagccatcccccacccggccattgtgcccccctcagggaagcaggagctgcagcccttcgaccgcaacctgaagacacaagcagagtccaaggcagagaaggaggccaagaagccaaccatcaagaagcccctcaatgccttcatgctgtacatgaaggagatgagagccaaggtcattgcagagtgcacacttaaggagagcgctgccatcaaccagatcctgggccgcaggtggcacgcgctgtcgcgagaagagcaggccaagtactatgagctggcccgcaaggagaggcagctgcacatgcagctatacccaggctggtcagcgcgggacaactacgggaagaagaagaggcggtcgagggaaaagcaccaagaatccaccacagaccctggctcgcctaagaaatgccgtgctcgctttggcctcaaccagcagacggattggtgtggtccgtgcaggaggaaaaagaaatgcattcggtacttacccggagaaggccgctgccccagccccgttccttccgatgacagtgctctaggctgccccgggtccccagctccccaggactcaccctcataccatctgctgccccgcttccccacagaactgcttactagccctgcggagccggcacctacatccccaggtctctccactgctctcagcctcccaaccccagggcccccacaggccccccgcagcaccctgcagagcacacaggtacagcaacaggaatctcagagacaggtggcctagcaggcacaggacacctggccgcctccaggagcctaccccctgaaagtgacagagacccagatctcatggaaactggccaggggtcctgttaacgtcatctcagggtccagaccctgaagatttcagaggctgcaggacttctgcctgaacctggggtcatcgattcaaactgctccaagtggtgggaatcagatctgtcttgatgtgtcatctaattaagggaatcccttgtacctatggctgcctgcatctattctttgtaccatctgtcttgccagccagaagcctctgcctccctagcttttctgctataggtcagagatgggctgaactgagcctagctaccttctctacccatctcccccatcccccactgccacaccctccccattcagacacttcatggaccaagaatgagctggtttgtcaaacaacatgtgagcatggtcacaagcacaaagctcaagatgacagctcttctaaggaaatggagaagctctgtttataaaaacaaaaacaaaaccagctgctactcataagttggaccagaggaagccccttactatgatctcaggagcttgcaagaagcaggaaggggaatggaataggttaagtttaggcctatcaacctaagcaacagaaataatctgacactaccttatcaggcaaattggggaggggagggtgtatctagctctagttcaaattatttggaagtgttccctgagaaacccaccagcctaagaagctctggccccaggcttgtcactagcagctgcagtcaacagttcaaagaagtcatggcccaaatccagtgtgcacccctccccattcacagagcctttttcacaattccatttccagttcatctatggcagtccagccagctcctgggcagcttgagagggcaaacccaaaacctcatgacagccagagcctgtctttcagcattcagtccgcctggccggctccagtttccccatggggctgcgggacagaggaccattacaactagatcaaggagcccagaaaacctccagtagtggacaacaggttttcaccatagcctacgttaacccatttttgagccaagcttcaaccctcagccttgaaaaacaagtctttaatttaatttttgttttttgcctaaatccaaagaaaaagggctgccgggccaggcgcggtggctcacgcctgtaatcccagcactttggcaggccgaggcaggtggatcacctgacgtcagtagtttgagaccagcctggccaacatggtgaaaccctgtatctactaaaaatacaaaaattagccggacgtggtggtgcgcgcatgtaatcccagctactcgggaggctgaggcggaagaatcacttgaacccgggaggcggaggttccagtgagccgagatggcgctattgcactccagtctgggtaacagggagactgcatctcaaaaaaaaaaaaaaaaaaaaaaaagggctgtccatgtattcacacacccctcaaaaaaagcctttagttcctactttagccactggtttctcagaatccaaagatcacatattctagtgtaacactgcaagaagtcttgagaaaaagattattgtagtgttcaaaatatttttgtattgttaatgcatcatcatagaaaaacttttaaacatgagaataaagatactttttactggg

SEQ ID NO: 192248 - DNA, 796 bp, Homo sapiens
  Payload ID: 17969
  Gene Name: transcription factor 7 (T-cell specific, HMG-box)
  ENST ID: ENST00000517741
  CDS Start-End: 280-582
gacagaattggccaaggtttcttggttggagggcggggggtgggaggtcaagtaggggccacctcggggaggcctgccctccaggtccttcccctaaaacttggcactgccgatactcccagcccgttccttcccaagtcaggaacttgcaggggaccccttggcaattctttttctctcaagagcagacagccttcagtcccagccgctgccagggctggtgtgtctgacccagctgtggtttttccaggcctgaaggccccggagtgcaccagcggcatgtacaaagagaccgtctactccgccttcaatctgctcatgcattacccacccccctcgggagcagggcagcacccccagccgcagcccccgctggtaagtggaccccgcagccagtgccgccctgtgcttgcagcctccttgaccagcacaaggccaatcagcccccccacggtgtcccccaactctctctctacgaacatttcaacagcccacatcccacccctgcacctgcggacatcagccagaagcaagttcacaggcctctgcagacccctgacctctctggcttctactccctgacctcaggcagcatggggcagctcccccacactgtgagctggcccagccctcctctctaccccctgtccccttcctgcggatatagacagcacttccctgcccccactgcagcccctggcgccccctaccccaggttcacccacccatccttgatgctaggttctggtgtacctggtcacccagcagccatcccccacccggccattgtgccccc

SEQ ID NO: 192249 - DNA, 539 bp, Homo sapiens
  Payload ID: 17969
  Gene Name: transcription factor 7 (T-cell specific, HMG-box)
  ENST ID: ENST00000521639
  CDS Start-End: 98-539
acttccggtgccctgacctttataggagtaaacagacccccgccatccccgcctcccctcctgcccaggcctgaaggccccggagtgcaccagcggcatgtacaaagagaccgtctactccgccttcaatctgctcatgcattacccacccccctcgggagcagggcagcacccccagccgcagcccccgctgcacaaggccaatcagcccccccacggtgtcccccaactctctctctacgaacatttcaacagcccacatcccacccctgcacctgcggacatcagccagaagcaagttcacaggcctctgcagacccctgacctctctggcttctactccctgacctcaggcagcatggggcagctcccccacactgtgagctggttcacccacccatccttgatgctaggttctggtgtacctggtcacccagcagccatcccccacccggccattgtgcccccctcagggaagcaggagctgcagcccttcgaccgcaacctgaagacacaagcagagtccaaggcagagaagg

SEQ ID NO: 192250 - DNA, 557 bp, Homo sapiens
  Payload ID: 17969
  Gene Name: transcription factor 7 (T-cell specific, HMG-box)
  ENST ID: ENST00000522375
  CDS Start-End: 98-557
atccccgcctcccctcctgcccaggtgactgactaatccgccgccttcaggagacagaattggccaaggcctgaaggccccggagtgcaccagcggcatgtacaaagagaccgtctactccgccttcaatctgctcatgcattacccacccccctcgggagcagggcagcacccccagccgcagcccccgctgcacaaggccaatcagcccccccacggtgtcccccaactctctctctacgaacatttcaacagcccacatcccacccctgcacctgcggacatcagccagaagcaagttcacaggcctctgcagacccctgacctctctggcttctactccctgacctcaggcagcatggggcagctcccccacactgtgagctggcccagccctcctctctaccccctgtccccttcctgcggatatagacagcacttccctgcccccactgcagcccctggcgccccctaccccaggttcacccacccatccttgatgctaggttctggtgtacctggtcacccagcagccatcccccacccggccattgtgc

SEQ ID NO: 192251 - DNA, 570 bp, Homo sapiens
  Payload ID: 17969
  Gene Name: transcription factor 7 (T-cell specific, HMG-box)
  ENST ID: ENST00000517799
  CDS Start-End: 1-444
ggtgtacctggtcacccagcagccatcccccacccggccattgtgcccccctcagggaagcaggagctgcagcccttcgaccgcaacctgaagacacaagcagagtccaaggcagagaaggaggccaagaagccaaccatcaagaagcccctcaatgccttcatgctgtacatgaaggagatgagagccaaggtcattgcagagtgcacacttaaggagagcgctgccatcaaccagatcctgggccgcaggtggcacgcgctgtcgcgagaagagcaggccaagtactatgagctggcccgcaaggagaggcagctgcacatgcagctatacccaggctggtcagcgcgggacaactacgggaagaagaagaggcggtcgagggaaaagcaccaagaatccaccacagatgggatccctgcctgtaccatcctgagcccttaatctgaaaaagcaaggtgacaacaacacagaaccatctggttgccaggaggaaaaagaaatgcattcggtacttacccggagaaggccgctgccccagccccgttccttccgatgacagtgctctag

SEQ ID NO: 192252 - DNA, 799 bp, Homo sapiens
  Payload ID: 17969
  Gene Name: transcription factor 7 (T-cell specific, HMG-box)
  ENST ID: ENST00000517855
  CDS Start-End: 1-613
gttcacccacccatccttgatgctaggttctggtgtacctggtcacccagcagccatcccccacccggccattgtgcccccctcagggaagcaggagctgcagcccttcgaccgcaacctgaagacacaagcagagtccaaggcagagaaggaggccaagaagccaaccatcaagaagcccctcaatgccttcatgctgtacatgaaggagatgagagccaaggtcattgcagagtgcacacttaaggagagcgctgccatcaaccagatcctgggccgcaggtggcacgcgctgtcgcgagaagagcaggccaagtactatgagctggcccgcaaggagaggcagctgcacatgcagctatacccaggctggtcagcgcgggacaactacgggaagaagaagaggcggtcgagggaaaagcaccaagaatccaccacaggaggaaaaagaaatgcattcgaactgcttactagccctgcggagccggcacctacatccccaggtctctccactgctctcagcctcccaaccccagggcccccacaggccccccgcagcaccctgcagagcacacaggtacagcaacaggaatctcagagacaggtggcctagcaggcacaggacacctggccgcctccaggagcctaccccctgaaagtgacagagacccagatctcatggaaactggccaggggtcctgttaacgtcatctcagggtccagaccctgaagatttcagaggctgcaggacttctgcctgaacctggggtcatcgattcaaactgctccaagtggtggg

SEQ ID NO: 192253 - DNA, 1408 bp, Homo sapiens
  Payload ID: 17969
  Gene Name: transcription factor 7 (T-cell specific, HMG-box)
  Uniprot ID: P36402
  ENST ID: ENST00000520958
  CDS Start-End: 329-1138
cccgcctcccctcctgcccaggtgactgactaatccgccgccttcaggagacagaattggccaaggtttcttggttggagggcggggggtgggaggtcaagtaggggccacctcggggaggcctgccctccaggtccttcccctaaaacttggcactgccgatactcccagcccgttccttcccaagtcaggaacttgcaggggaccccttggcaattctttttctctcaagagcagacagccttcagtcccagccgctgccagggctggtgtgtctgacccagctgtggtttttccaggcctgaaggccccggagtgcaccagcggcatgtacaaagagaccgtctactccgccttcaatctgctcatgcattacccacccccctcgggagcagggcagcacccccagccgcagcccccgctgcacaaggccaatcagcccccccacggtgtcccccaactctctctctacgaacatttcaacagcccacatcccacccctgcacctgcggacatcagccagaagcaagttcacaggcctctgcagacccctgacctctctggcttctactccctgacctcaggcagcatggggcagctcccccacactgtgagctggttcacccacccatccttgatgctaggttctggtgtacctggtcacccagcagccatcccccacccggccattgtgcccccctcagggaagcaggagctgcagcccttcgaccgcaacctgaagacacaagcagagtccaaggcagagaaggaggccaagaagccaaccatcaagaagcccctcaatgccttcatgctgtacatgaaggagatgagagccaaggtcattgcagagtgcacacttaaggagagcgctgccatcaaccagatcctgggccgcaggtggcacgcgctgtcgcgagaagagcaggccaagtactatgagctggcccgcaaggagaggcagctgcacatgcagctatacccaggctggtcagcgcgggacaactacgggaagaagaagaggcggtcgagggaaaagcaccaagaatccaccacaggaggaaaaagaaatgcattcggtacttacccggagaaggccgctgccccagccccgttccttccgatgacagtgctctaggctgccccgggtccccagctccccaggactcaccctcataccatctgctgccccgcttccccacagaactgcttactagccctgcggagccggcacctacatccccaggtctctccactgctctcagcctcccaaccccagggcccccacaggccccccgcagcaccctgcagagcacacaggtacagcaacaggaatctcagagacaggtggcctagcaggcacaggacacctggccgcctccaggagcctaccccctgaaagtgacag

SEQ ID NO: 192254 - DNA, 547 bp, Homo sapiens
  Payload ID: 17969
  Gene Name: transcription factor 7 (T-cell specific, HMG-box)
  ENST ID: ENST00000519037
  CDS Start-End: 119-547
agacagaggcccagggtctacgaaggatgtgcggtgagactggagaagaaggtcccagcctgtgaccttggtgctggggcagcgctggttccagagcctgggagaagctgatgggcgcatgcagcatgttggcatcatgcacaaggccaatcagcccccccacggtgtcccccaactctctctctacgaacatttcaacagcccacatcccacccctgcacctgcggacatcagccagaagcaagttcacaggcctctgcagacccctgacctctctggcttctactccctgacctcaggcagcatggggcagctcccccacactgtgagctggttcacccacccatccttgatgctaggttctggtgtacctggtcacccagcagccatcccccacccggccattgtgcccccctcagggaagcaggagctgcagcccttcgaccgcaacctgaagacacaagcagagtccaaggcagagaaggaggccaagaagccaaccatcaagaagcccctcaatgccttcatgctgtacatgaaggagatg

SEQ ID NO: 192255 - DNA, 651 bp, Homo sapiens
  Payload ID: 17969
  Gene Name: transcription factor 7 (T-cell specific, HMG-box)
  ENST ID: ENST00000520652
  CDS Start-End: 1-216
tactccgccttcaatctgctcatgcattacccacccccctcgggagcagggcagcacccccagccgcagcccccgctgcacaaggccaatcagcccccccacggtgtcccccaactctctctctacgaacatttcaacagcccacatcccacccctgcacctgcggacatcagccagaagcaaggtacaagcctgggatggggaggggcccagtgaaaccagagcctaagggccaagaccccagcttctgagaccagttcacaggcctctgcagacccctgacctctctggcttctactccctgacctcaggcagcatggggcagctcccccacactgtgagctggcccagccctcctctctaccccctgtccccttcctgcggatatagacagcacttccctgcccccactgcagcccctggcgccccctaccccaggttcacccacccatccttgatgctaggttctggtgtacctggtcacccagcagccatcccccacccggccattgtgcccccctcagggaagcaggagctgcagcccttcgaccgcaacctgaagacacaagcagagtccaaggcagagaaggaggccaagaagccaaccatcaagaagcccctcaatgccttcatgctgtacatgaaggagat

SEQ ID NO: 192256 - DNA, 459 bp, Homo sapiens
  Payload ID: 17969
  Gene Name: transcription factor 7 (T-cell specific, HMG-box)
  ENST ID: ENST00000520699
  CDS Start-End: 1-317
tcatgctgtacatgaaggagatgagagccaaggtcattgcagagtgcacacttaaggagagcgctgccatcaaccagatcctgggccgcaggtggcacgcgctgtcgcgagaagagcaggccaagtactatgagctggcccgcaaggagaggcagctgcacatgcagctatacccaggctggtcagcgcgggacaactacgggaagaagaagaggcggtcgagggaaaagcaccaagaatccaccacagaaaatttaaagttgacagatatcagaaggtcgcaagaactacagatgtggaagcagacactgttatgagcaactacattcctcccatagaatgctgctcaatactggcacacagaccagaggtagccagcagtacacaagactgcaaggcaacaagtacattatcaatgaattagccatctatcactcaaactatgtcccgcattggaag

SEQ ID NO: 192257 - DNA, 600 bp, Homo sapiens
  Payload ID: 17969
  Gene Name: transcription factor 7 (T-cell specific, HMG-box)
  ENST ID: ENST00000517851
  CDS Start-End: 98-600
acttccggtgccctgacctttataggagtaaacagacccccgccatccccgcctcccctcctgcccaggcctgaaggccccggagtgcaccagcggcatgtacaaagagaccgtctactccgccttcaatctgctcatgcattacccacccccctcgggagcagggcagcacccccagccgcagcccccgctgcacaaggccaatcagcccccccacggtgtcccccaactctctctctacgaacatttcaacagcccacatcccacccctgcacctgcggacatcagccagaagcaagttcacaggcctctgcagacccctgacctctctggcttctactccctgacctcaggcagcatggggcagctcccccacactgtgagctggcccagccctcctctctaccccctgtccccttcctgcggatatagacagcacttccctgcccccactgcagcccctggcgccccctaccccaggttcacccacccatccttgatgctaggttctggtgtacctggtcacccagcagccatcccccacccggccattgtgcccccctcagggaagcaggagctgcagcccttcgaccgcaacct

SEQ ID NO: 192258 - DNA, 1254 bp, Homo sapiens
  Payload ID: 17969
  Gene Name: transcription factor 7 (T-cell specific, HMG-box)
  Uniprot ID: P36402
  ENST ID: ENST00000518915
  CDS Start-End: 80-889
gcccaggtgactgactaatccgccgccttcaggagacagaattggccaaggcctgaaggccccggagtgcaccagcggcatgtacaaagagaccgtctactccgccttcaatctgctcatgcattacccacccccctcgggagcagggcagcacccccagccgcagcccccgctgcacaaggccaatcagcccccccacggtgtcccccaactctctctctacgaacatttcaacagcccacatcccacccctgcacctgcggacatcagccagaagcaagttcacaggcctctgcagacccctgacctctctggcttctactccctgacctcaggcagcatggggcagctcccccacactgtgagctggttcacccacccatccttgatgctaggttctggtgtacctggtcacccagcagccatcccccacccggccattgtgcccccctcagggaagcaggagctgcagcccttcgaccgcaacctgaagacacaagcagagtccaaggcagagaaggaggccaagaagccaaccatcaagaagcccctcaatgccttcatgctgtacatgaaggagatgagagccaaggtcattgcagagtgcacacttaaggagagcgctgccatcaaccagatcctgggccgcaggtggcacgcgctgtcgcgagaagagcaggccaagtactatgagctggcccgcaaggagaggcagctgcacatgcagctatacccaggctggtcagcgcgggacaactacgggaagaagaagaggcggtcgagggaaaagcaccaagaatccaccacagagacaaactggcccagagaactcaaggatggtaatggacaagagtcactgtccatgtcttcttcctctagcccagcttgaggactgggatggctgggcaaggaagccataggcattgcggccccttgccttggtgcagatgtgagtcccacaaacacatctggagaagctcaaaggccgggactgggagatgactcccttggaagacaggagagatgactcccttggaagacagatgacagcccataggcctagtgacaaaaggcccctttgccaccttgtggctgttctgggaactgcacctgtcctaggtctgggccagaccaagcagaatggcagtctgaggacactgacttaccacccaagtcccaggaagagaggacaaggaatcagccaggcctgtgcaaaggcagcattttttggttgtggtgtatgactatgaattc

SEQ ID NO: 192259 - DNA, 584 bp, Homo sapiens
  Payload ID: 17969
  Gene Name: transcription factor 7 (T-cell specific, HMG-box)
  ENST ID: ENST00000518887
  CDS Start-End: 217-584
gcgccgccccagttgcgcgcggccctcggggtctccagcgcgcagagcgtccctgccccggcgtcggccccgacccccgcggtcccaccgcccctcactcccctccggttctccctccaggctctcgggcgggaacacgctgcgcagagactcttcccggacaaacttccagagcccctggaggacggcctgaaggccccggagtgcaccagcggcatgtacaaagagaccgtctactccgccttcaatctgctcatgcattacccacccccctcgggagcagggcagcacccccagccgcagcccccgctgcacaaggccaatcagcccccccacggtgtcccccaactctctctctacgaacatttcaacagcccacatcccacccctgcacctgcggacatcagccagaagcaagttcacaggcctctgcagacccctgacctctctggcttctactccctgacctcaggcagcatggggcagctcccccacactgtgagctggttcacccacccatccttgatgctaggttctggtgtacctggtcacccagcagccatcccccacccggccattgtgcc

SEQ ID NO: 192260 - DNA, 553 bp, Homo sapiens
  Payload ID: 17969
  Gene Name: transcription factor 7 (T-cell specific, HMG-box)
  ENST ID: ENST00000519447
  CDS Start-End: 64-366
aatccgccgccttcaggagacagaattggccaaggcctgaaggccccggagtgcaccagcggcatgtacaaagagaccgtctactccgccttcaatctgctcatgcattacccacccccctcgggagcagggcagcacccccagccgcagcccccgctggtaagtggaccccgcagccagtgccgccctgtgcttgcagcctccttgaccagcacaaggccaatcagcccccccacggtgtcccccaactctctctctacgaacatttcaacagcccacatcccacccctgcacctgcggacatcagccagaagcaagttcacaggcctctgcagacccctgacctctctggcttctactccctgacctcaggcagcatggggcagctcccccacactgtgagctggttcacccacccatccttgatgctaggttctggtgtacctggtcacccagcagccatcccccacccggccattgtgcccccctcagggaagcaggagctgcagcccttcgaccgcaacctgaagacacaagcagagtccaaggcaga

SEQ ID NO: 192261 - DNA, 2968 bp, Homo sapiens
  Payload ID: 17970
  Gene Name: transcription factor 7-like 1 (T-cell specific, HMG-box)
  Uniprot ID: Q9HCS4
  ENST ID: ENST00000282111
  CDS Start-End: 276-2042
ggccaggggctgggacgccccggcggagcaggcggcggcggtggcgagttggggagccctaggctcggcgctgccggaggggcccgagccgagccgcctgcgccccggccgggcagcgccgggcccgcttcccgcggggccacgccctgtcaaactttgttgcggcggctagcgcagcgggcccgcaagcgggcgggaggggcgccgggccgggccgggcagggcgcgggcggctaggggctccgagagcggcggccccggcccgcggccccaccatgccccagctcggcggcgggggcggcggcggcggcggcggcagcgggggaggcggcggctccagcgccggggcggccggcggaggggacgacctcggggcgaacgacgagctgatccccttccaggacgaggggggcgaggagcaggagccgagcagcgatagcgcctcggcgcagcgggacctagacgaggtcaagtcgtccctggtcaacgagtcggagaaccagagcagcagctcggactcggaggcggagaggcgcccgcagcccgtccgggacactttccagaagccgcgggactatttcgccgaagtgagaaggcctcaggacagcgcgttctttaaaggacccccgtaccctgggtaccccttcctgatgatcccggacctgagcagcccgtacctctccaacggacccctgtctcccggaggagcgcgcacctacctgcagatgaaatggcccctcctcgatgtcccctccagcgccacagtcaaggacacgaggtcaccatctccagcacacttgtctaataaagttcctgtcgttcagcacccgcatcacatgcatccgctgactcccctcatcacctacagcaatgaccacttctcccccggctcccctcccacccacctctccccagagatcgatccaaagacaggaatcccccggccccctcacccatccgagctgtcaccgtattacccactctctcccggagctgtcggacaaatcccccaccccctcggctggctcgtcccacagcaaggccagcccatgtactcccttcctcccggtggcttccggcacccttaccccgccctcgccatgaacgcctcgatgtccagcctggtctccagtcggttctctcctcacatggtggctcctgcccaccctggcctgcccacctcagggatcccccaccctgccatcgtctcccccatcgtcaagcaggaaccggcaccccccagcctgagccctgcagtgagcgtgaaatcaccagtcaccgtgaaaaaggaggaggaaaagaagccccacgtgaagaagcctctgaatgccttcatgttgtatatgaaggagatgagggccaaggtggtggctgagtgcaccctgaaggaaagtgcagccattaaccagatccttggaagaaagtggcacaacctgtctcgagaagaacaggccaagtactacgagctggcccggaaggagcggcagcttcactcgcagctctacccaacctggtcagcccgggacaactatggtaagaaaaagaagaggaagagagaaaagcagctgtcccagacacagtcacagcagcaagtccaggaggcagagggtgccctggcctccaagagcaagaagccatgtgttcagtacctgccccccgagaagccctgtgacagccctgcctcctcccacgggagcatgctggactccccggccactccctctgcagctttggcctcaccagctgcccctgctgccacccattcggagcaagcccagcccctctccctcaccaccaaaccagaaacccgggcccagctggctctccactctgccgccttcctgtcggctaaggctgcagcctcctcctctgggcagatgggcagccagcctcccctcctgtcccggcccctcccccttgggtccatgcccacagctctgctggcctctcccccgtccttccccgccacgctccatgcccaccaggccctcccggtgctacaggcccagcctctttccctggtcaccaagtctgcccactaagctccccccgacccctgcaggctgtcacatgactcattgagtagtaatgattcagaagaaaaagaaaaaggagactttattggtcaatatttgaccactctggactgttctgtaaagtggctggtaacaacagcactttacagtttgtagatgtaaccagtagctgatcttaaggcttttttaaaaaacaaaacaaaacaacaaaaaaaaatctttataagaaagagaactgaaaagtagcgtgctattcgtcctgtaggtgctgtggtggatggacctgggcagagggcacttctctctcttacctctcttgcactttctgtctcctgtctcttctcgcccctgccgcctgccccagcttccccgactccatctgcagctctgccattgtgacatttcctgttacccagcccaagttttcatcgtctgctcaataccgtgggttcttcttcgtcctctgtcctctgcccagtgtgaggccatcaccatgtgagaagacatcttggcctgatttgctgccaccagcgtcccctccctcagtgggcccgaactcgccagccccagctttcagtggagaaagcggtcctctgaaatggtttcctcccaacccccgcatttaaagggactcaaggtgcctgccacttcctcagcgaagaagtctgtgttcctccccgtccttgccagtggcgatcatcccttcacaatcccagagtggcaggcgggaccggccccatggtctggctcctgtcacctgggtccgtgccagcacaatctgccaaagttctagagaccctgttcccttccccatcacctcacatgcttcttctgtgtgtatttctttttgtttttatggtttttggagcaatttaaactcccagttgtttattttcacaaaagaaaataaaattgcagttgcaagacctttt

SEQ ID NO: 192262 - DNA, 559 bp, Homo sapiens
  Payload ID: 17970
  Gene Name: transcription factor 7-like 1 (T-cell specific, HMG-box)
  ENST ID: ENST00000442813
  CDS Start-End: 474-559
aaacaggtgcttggggcagctaaaaataaccaccctgggaagtgaaactgtggcagtgccaaggagctaagaacgtggtgatttaccagaagtcttcagaggcaagccatcttcaattcagaaggggaatcccacatgtgtgttgaatatgaggcattgtttaagacacctcctgccctcaccacattggcaaactgacagcgtcaacttgaaacaagtctgcacattgtggccattttcactccacaacaaatgtttggtctccctctgtcacccaggctagagtgcagcgaaatcacagctcactgcagcctcgacctcctgggctcaagagatcctcccacctcagccttctcagtagctgggactacaggatataagtggattcgtatggtgtgtagccttttgattctggcttcctctgctcactaatatgcacttgaaattcatccacattgctgcagtacctgcagatgaaatggcccctcctcgatgtcccctccagcgccacagtcaaggacacgaggtcaccatctccagcacacttgtctaataaagt

SEQ ID NO: 192263 - DNA, 620 bp, Homo sapiens
  Payload ID: 17971
  Gene Name: transcription factor 7-like 2 (T-cell specific, HMG-box)
  ENST ID: ENST00000277945
  CDS Start-End: 1-620
ctgaccgtcaatgcttccatgtccaggttccctccccatatggtcccaccacatcatacgctacacacgacgggcattccgcatccggccatagtcacaccaacagtcaaacaggaatcgtcccagagtgatgtcggctcactccatagttcaaagcatcaggactccaaaaaggaagaagaaaagaagaagccccacataaagaaacctcttaatgcattcatgttgtatatgaaggaaatgagagcaaaggtcgtagctgagtgcacgttgaaagaaagcgcggccatcaaccagatccttgggcggaggtggcatgcactgtccagagaagagcaagcgaaatactacgagctggcccggaaggagcgacagcttcatatgcaactgtaccccggctggtccgcgcgggataactatggaaagaagaagaagaggaaaagggacaagcagccgggagagaccaatgacctgagcgctcctaagaaatgccgagcgcgctttggccttgatcaacagaataactggtgcggcccttgcaggagaaaaaaaaagtgcgttcgctacatacaaggtgaaggcagctgcctcagcccaccctcttcagatggaagcttact

SEQ ID NO: 192264 - DNA, 1174 bp, Homo sapiens
  Payload ID: 17971
  Gene Name: transcription factor 7-like 2 (T-cell specific, HMG-box)
  ENST ID: ENST00000349937
  CDS Start-End: 306-1172
ttttttttttttaccccccttttttatttattatttttttgcacattgatcggatccttgggaacgagagaaaaaagaaacccaaactcacgcgtgcagaagatctccccccccttcccctcccctcctccctcttttcccctccccaggagaaaaagacccccaagcagaaaaaagttcaccttggactcgtctttttcttgcaatattttttgggggggcaaaactttttgggggtgattttttttggcttttcttcctccttcatttttcttccaaaattgctgctggtgggtgaaaaaaaaatgccgcagctgaacggcggtggaggggatgacctaggcgccaacgacgaactgatttccttcaaagacgagggcgaacaggaggagaagagctccgaaaactcctcggcagagagggatttagctgatgtcaaatcgtctctagtcaatgaatcagaaacgaatcaaaacagctcctccgattccgaggcggaaagacggcctccgcctcgctccgaaagtttccgagacaaatcccgggaaagtttggaagaagcggccaagaggcaagatggagggctctttaaggggccaccgtatcccggctaccccttcatcatgatccccgacctgacgagcccctacctccccaacggatcgctctcgcccaccgcccgaaccctccattttcagtccggcagcacacattactctgcgtacaaaacgattgaacaccagattgcagttcagtatctccagatgaaatggccactgcttgatgtccaggcagggagcctccagagtagacaagccctcaaggatgcccggtccccatcaccggcacacattgtctctaacaaagtgccagtggtgcagcaccctcaccatgtccaccccctcacgcctcttatcacgtacagcaatgaacacttcacgccgggaaacccacctccacacttaccagccgacgtagaccccaaaacaggaatcccacggcctccgcaccctccagatatatccccgtattacccactatcgcctggcaccgtaggacaaatcccccatccgctaggatggcaaggtcaaccagtgtacccaatcacgacaggaggattcagacacccctaccccacagctctgaccgtcaatgcttccatgtccaggtgagt

SEQ ID NO: 192265 - DNA, 4029 bp, Homo sapiens
  Payload ID: 17971
  Gene Name: transcription factor 7-like 2 (T-cell specific, HMG-box)
  Uniprot ID: Q9NQB0
  ENST ID: ENST00000352065
  CDS Start-End: 508-1887
aataatctccgctcccagactactccgttcctccggatttcgatccccctttttctatctgtcaatcagcgccgcctttgaactgaaaagctctcagtctaacttcaactcactcaaatccgagcggcacgagcacctcctgtatcttcggcttccccccccctttgctctttatatctgacttcttgttgttgttggtgttttttttttttttaccccccttttttatttattatttttttgcacattgatcggatccttgggaacgagagaaaaaagaaacccaaactcacgcgtgcagaagatctccccccccttcccctcccctcctccctcttttcccctccccaggagaaaaagacccccaagcagaaaaaagttcaccttggactcgtctttttcttgcaatattttttgggggggcaaaactttttgggggtgattttttttggcttttcttcctccttcatttttcttccaaaattgctgctggtgggtgaaaaaaaaatgccgcagctgaacggcggtggaggggatgacctaggcgccaacgacgaactgatttccttcaaagacgagggcgaacaggaggagaagagctccgaaaactcctcggcagagagggatttagctgatgtcaaatcgtctctagtcaatgaatcagaaacgaatcaaaacagctcctccgattccgaggcggaaagacggcctccgcctcgctccgaaagtttccgagacaaatcccgggaaagtttggaagaagcggccaagaggcaagatggagggctctttaaggggccaccgtatcccggctaccccttcatcatgatccccgacctgacgagcccctacctccccaacggatcgctctcgcccaccgcccgaacctatctccagatgaaatggccactgcttgatgtccaggcagggagcctccagagtagacaagccctcaaggatgcccggtccccatcaccggcacacattgtctctaacaaagtgccagtggtgcagcaccctcaccatgtccaccccctcacgcctcttatcacgtacagcaatgaacacttcacgccgggaaacccacctccacacttaccagccgacgtagaccccaaaacaggaatcccacggcctccgcaccctccagatatatccccgtattacccactatcgcctggcaccgtaggacaaatcccccatccgctaggatggttagtaccacagcaaggtcaaccagtgtacccaatcacgacaggaggattcagacacccctaccccacagctctgaccgtcaatgcttccatgtccaggttccctccccatatggtcccaccacatcatacgctacacacgacgggcattccgcatccggccatagtcacaccaacagtcaaacaggaatcgtcccagagtgatgtcggctcactccatagttcaaagcatcaggactccaaaaaggaagaagaaaagaagaagccccacataaagaaacctcttaatgcattcatgttgtatatgaaggaaatgagagcaaaggtcgtagctgagtgcacgttgaaagaaagcgcggccatcaaccagatccttgggcggaggtggcatgcactgtccagagaagagcaagcgaaatactacgagctggcccggaaggagcgacagcttcatatgcaactgtaccccggctggtccgcgcgggataactatggaaagaagaagaagaggaaaagggacaagcagccgggagagaccaatgaacacagcgaatgtttcctaaatccttgcctttcacttcctccgattacagacctgagcgctcctaagaaatgccgagcgcgctttggccttgatcaacagaataactggtgcggcccttgcagtctttgaatttggaatattacaatggagaaaaaaaaagtgcgttcgctacatacaaggtgaaggcagctgcctcagcccaccctcttcagatggaagcttactagattcgcctcccccctccccgaacctgctaggctcccctccccgagacgccaagtcacagactgagcagacccagcctctgtcgctgtccctgaagcccgaccccctggcccacctgtccatgatgcctccgccacccgccctcctgctcgctgaggccacccacaaggcctccgccctctgtcccaacggggccctggacctgcccccagccgctttgcagcctgccgccccctcctcatcaattgcacagccgtcgacttcttccttacattcccacagctccctggccgggacccagccccagccgctgtcgctcgtcaccaagtctttagaatagctttagcgtcgtgaaccccgctgctttgtttatggttttgtttcacttttcttaatttgccccccacccccaccttgaaaggttttgttttgtactctcttaattttgtgccatgtggctacattagttgatgtttatcgagttcattggtcaatatttgacccattcttatttcaatttctccttttaaatatgtagatgagagaagaacctcatgattctaccaaaatttttatcaacagctgtttaaagtctttgtagcgtttaaaaaatatatatatatacataactgttatgtagttcggatagcttagttttaaaagactgattaaaaaacaaaaagaaaaaaaaagcaattttgaagcagccctccagaaggagttggttctgtattatttgtattaaatacgagcttgcgaaccaatcattttacatctggtttttaaaccgtaagggcaccatgaatgcagtgccgttactttttttttttttttctgtgtgaaacaactcttattgtgatgttacttgttattgtttaaatgtacagaaacaaagggtaaaaatgtgttaatataccttgttccatggtgttgttcttttggggggaggggacgctactcaacacttaatagaatcacaacgctgttgggccagtagtatttattgctttagagattgcttgtcgtacctgtatgtcgtccctttttaaatatgttttcctttttcttgaaactgtataaagtttttttcccccttagcataagcatcttatatataacaactcatttgtacaaggtttttaagtttatatataaaatgtgtatatatatttttgtttcccctttttgacttttttttttctgtatgaaacccagatgtcaccaaatggacattaatagttgcattaaggatcagtagcattaacaaaagttgctttaaaagccattatgtaaaacaagacttgaaaatgagtgagggaattttagcgacactgtctgagcagcagtgggaaccatcttcgtttcccctttgaactcccagtgggatgccctaccctgcgcccttaggacccggactgaccgtgtacaaaactttacgtgccaaaattctcagtgaatttagctttctccctctttttgatgctgtaatttttgttcatcatgttttgctgtgatgttacataggtagatttgtatgtagttttaatgtcacctataacaaaatgtgtttggtagcagattgtccagaaagcattttaaatgaagaggtataaacccttaagggccaaaattctgtatattagattactcttaaacgaaaaaccagctgccgcttttatgtacacatattacatacgagtaggcagcagactttaaaaataaaaaaaacctaggcatgttgatgttgcaaaatgctgtataaagctgaaacctgttcattcagtgccattgtagttgacatgaagcgattgtaaaactgtctccgatttttctctggtttattaaaatgctaactataacattttttgtgaatactttgaatgtttcctaacagttgtgatgttactgttccgttttatgctcttattccaagttcatttttaatggtttggaagccatttttgtaatgaataaatgttcatgctgtacagtatctgtagcatgccgttctggattaataaaagcaacttagtatgtgcagataaa

SEQ ID NO: 192266 - DNA, 667 bp, Homo sapiens
  Payload ID: 17971
  Gene Name: transcription factor 7-like 2 (T-cell specific, HMG-box)
  ENST ID: ENST00000346198
  CDS Start-End: 1-667
acgaatcaaaacagctcctccgattccgaggcggaaagacggcctccgcctcgctccgaaagtttccgagacaaatcccgggaaagtttggaagaagcggccaagaggcaagatggagggctctttaaggggccaccgtatcccggctaccccttcatcatgatccccgacctgacgagcccctacctccccaacggatcgctctcgcccaccgcccgaaccctccattttcagtccggcagcacacattactctgcgtacaaaacgattgaacaccagattgcagttcagtatctccagatgaaatggccactgcttgatgtccaggcagggagcctccagagtagacaagccctcaaggatgcccggtccccatcaccggcacacattgtcagccccctcccttgctgcactcagggacatgactgtcagcacttctaccccccctcagacttcactgtcagcactcaagtcttcagggacatgaaaaggagccactccttacaaaaagttggggagccctggtgtattgagtctaacaaagtgccagtggtgcagcaccctcaccatgtccaccccctcacgcctcttatcacgtacagcaatgaacacttcacgccgggaaacccacctccacacttaccagccgacgtagaccccaaaacag

SEQ ID NO: 192267 - DNA, 4021 bp, Homo sapiens
  Payload ID: 17971
  Gene Name: transcription factor 7-like 2 (T-cell specific, HMG-box)
  Uniprot ID: Q9NQB0
  ENST ID: ENST00000355717
  CDS Start-End: 508-1977
aataatctccgctcccagactactccgttcctccggatttcgatccccctttttctatctgtcaatcagcgccgcctttgaactgaaaagctctcagtctaacttcaactcactcaaatccgagcggcacgagcacctcctgtatcttcggcttccccccccctttgctctttatatctgacttcttgttgttgttggtgttttttttttttttaccccccttttttatttattatttttttgcacattgatcggatccttgggaacgagagaaaaaagaaacccaaactcacgcgtgcagaagatctccccccccttcccctcccctcctccctcttttcccctccccaggagaaaaagacccccaagcagaaaaaagttcaccttggactcgtctttttcttgcaatattttttgggggggcaaaactttttgggggtgattttttttggcttttcttcctccttcatttttcttccaaaattgctgctggtgggtgaaaaaaaaatgccgcagctgaacggcggtggaggggatgacctaggcgccaacgacgaactgatttccttcaaagacgagggcgaacaggaggagaagagctccgaaaactcctcggcagagagggatttagctgatgtcaaatcgtctctagtcaatgaatcagaaacgaatcaaaacagctcctccgattccgaggcggaaagacggcctccgcctcgctccgaaagtttccgagacaaatcccgggaaagtttggaagaagcggccaagaggcaagatggagggctctttaaggggccaccgtatcccggctaccccttcatcatgatccccgacctgacgagcccctacctccccaacggatcgctctcgcccaccgcccgaacctatctccagatgaaatggccactgcttgatgtccaggcagggagcctccagagtagacaagccctcaaggatgcccggtccccatcaccggcacacattgtcagccccctcccttgctgcactcagggacatgactgtcagcacttctaccccccctcagacttcactgtcagcactcaagtcttcagggacatgaaaaggagccactccttacaaaaagttggggagccctggtgtattgagtctaacaaagtgccagtggtgcagcaccctcaccatgtccaccccctcacgcctcttatcacgtacagcaatgaacacttcacgccgggaaacccacctccacacttaccagccgacgtagaccccaaaacaggaatcccacggcctccgcaccctccagatatatccccgtattacccactatcgcctggcaccgtaggacaaatcccccatccgctaggatggttagtaccacagcaaggtcaaccagtgtacccaatcacgacaggaggattcagacacccctaccccacagctctgaccgtcaatgcttccatgtccaggttccctccccatatggtcccaccacatcatacgctacacacgacgggcattccgcatccggccatagtcacaccaacagtcaaacaggaatcgtcccagagtgatgtcggctcactccatagttcaaagcatcaggactccaaaaaggaagaagaaaagaagaagccccacataaagaaacctcttaatgcattcatgttgtatatgaaggaaatgagagcaaaggtcgtagctgagtgcacgttgaaagaaagcgcggccatcaaccagatccttgggcggaggtggcatgcactgtccagagaagagcaagcgaaatactacgagctggcccggaaggagcgacagcttcatatgcaactgtaccccggctggtccgcgcgggataactatggaaagaagaagaagaggaaaagggacaagcagccgggagagaccaatggagaaaaaaaaagtgcgttcgctacatacaaggtgaaggcagctgcctcagcccaccctcttcagatggaagcttactagattcgcctcccccctccccgaacctgctaggctcccctccccgagacgccaagtcacagactgagcagacccagcctctgtcgctgtccctgaagcccgaccccctggcccacctgtccatgatgcctccgccacccgccctcctgctcgctgaggccacccacaaggcctccgccctctgtcccaacggggccctggacctgcccccagccgctttgcagcctgccgccccctcctcatcaattgcacagccgtcgacttcttccttacattcccacagctccctggccgggacccagccccagccgctgtcgctcgtcaccaagtctttagaatagctttagcgtcgtgaaccccgctgctttgtttatggttttgtttcacttttcttaatttgccccccacccccaccttgaaaggttttgttttgtactctcttaattttgtgccatgtggctacattagttgatgtttatcgagttcattggtcaatatttgacccattcttatttcaatttctccttttaaatatgtagatgagagaagaacctcatgattctaccaaaatttttatcaacagctgtttaaagtctttgtagcgtttaaaaaatatatatatatacataactgttatgtagttcggatagcttagttttaaaagactgattaaaaaacaaaaagaaaaaaaaagcaattttgaagcagccctccagaaggagttggttctgtattatttgtattaaatacgagcttgcgaaccaatcattttacatctggtttttaaaccgtaagggcaccatgaatgcagtgccgttactttttttttttttttctgtgtgaaacaactcttattgtgatgttacttgttattgtttaaatgtacagaaacaaagggtaaaaatgtgttaatataccttgttccatggtgttgttcttttggggggaggggacgctactcaacacttaatagaatcacaacgctgttgggccagtagtatttattgctttagagattgcttgtcgtacctgtatgtcgtccctttttaaatatgttttcctttttcttgaaactgtataaagtttttttcccccttagcataagcatcttatatataacaactcatttgtacaaggtttttaagtttatatataaaatgtgtatatatatttttgtttcccctttttgacttttttttttctgtatgaaacccagatgtcaccaaatggacattaatagttgcattaaggatcagtagcattaacaaaagttgctttaaaagccattatgtaaaacaagacttgaaaatgagtgagggaattttagcgacactgtctgagcagcagtgggaaccatcttcgtttcccctttgaactcccagtgggatgccctaccctgcgcccttaggacccggactgaccgtgtacaaaactttacgtgccaaaattctcagtgaatttagctttctccctctttttgatgctgtaatttttgttcatcatgttttgctgtgatgttacataggtagatttgtatgtagttttaatgtcacctataacaaaatgtgtttggtagcagattgtccagaaagcattttaaatgaagaggtataaacccttaagggccaaaattctgtatattagattactcttaaacgaaaaaccagctgccgcttttatgtacacatattacatacgagtaggcagcagactttaaaaataaaaaaaacctaggcatgttgatgttgcaaaatgctgtataaagctgaaacctgttcattcagtgccattgtagttgacatgaagcgattgtaaaactgtctccgatttttctctggtttattaaaatgctaactataacattttttgtgaatactttgaatgtttcctaacagttgtgatgttactgttccgttttatgctcttattccaagttcatttttaatggtttggaagccatttttgtaatgaataaatgttcatgctgtacagtatctgtagcatgccgttctggattaataaaagcaacttagtatgtgcagataaa

SEQ ID NO: 192268 - DNA, 4073 bp, Homo sapiens
  Payload ID: 17971
  Gene Name: transcription factor 7-like 2 (T-cell specific, HMG-box)
  Uniprot ID: Q9NQB0
  ENST ID: ENST00000355995
  CDS Start-End: 508-2367
aataatctccgctcccagactactccgttcctccggatttcgatccccctttttctatctgtcaatcagcgccgcctttgaactgaaaagctctcagtctaacttcaactcactcaaatccgagcggcacgagcacctcctgtatcttcggcttccccccccctttgctctttatatctgacttcttgttgttgttggtgttttttttttttttaccccccttttttatttattatttttttgcacattgatcggatccttgggaacgagagaaaaaagaaacccaaactcacgcgtgcagaagatctccccccccttcccctcccctcctccctcttttcccctccccaggagaaaaagacccccaagcagaaaaaagttcaccttggactcgtctttttcttgcaatattttttgggggggcaaaactttttgggggtgattttttttggcttttcttcctccttcatttttcttccaaaattgctgctggtgggtgaaaaaaaaatgccgcagctgaacggcggtggaggggatgacctaggcgccaacgacgaactgatttccttcaaagacgagggcgaacaggaggagaagagctccgaaaactcctcggcagagagggatttagctgatgtcaaatcgtctctagtcaatgaatcagaaacgaatcaaaacagctcctccgattccgaggcggaaagacggcctccgcctcgctccgaaagtttccgagacaaatcccgggaaagtttggaagaagcggccaagaggcaagatggagggctctttaaggggccaccgtatcccggctaccccttcatcatgatccccgacctgacgagcccctacctccccaacggatcgctctcgcccaccgcccgaaccctccattttcagtccggcagcacacattactctgcgtacaaaacgattgaacaccagattgcagttcagtatctccagatgaaatggccactgcttgatgtccaggcagggagcctccagagtagacaagccctcaaggatgcccggtccccatcaccggcacacattgtctctaacaaagtgccagtggtgcagcaccctcaccatgtccaccccctcacgcctcttatcacgtacagcaatgaacacttcacgccgggaaacccacctccacacttaccagccgacgtagaccccaaaacaggaatcccacggcctccgcaccctccagatatatccccgtattacccactatcgcctggcaccgtaggacaaatcccccatccgctaggatggttagtaccacagcaaggtcaaccagtgtacccaatcacgacaggaggattcagacacccctaccccacagctctgaccgtcaatgcttccatgtccaggttccctccccatatggtcccaccacatcatacgctacacacgacgggcattccgcatccggccatagtcacaccaacagtcaaacaggaatcgtcccagagtgatgtcggctcactccatagttcaaagcatcaggactccaaaaaggaagaagaaaagaagaagccccacataaagaaacctcttaatgcattcatgttgtatatgaaggaaatgagagcaaaggtcgtagctgagtgcacgttgaaagaaagcgcggccatcaaccagatccttgggcggaggtggcatgcactgtccagagaagagcaagcgaaatactacgagctggcccggaaggagcgacagcttcatatgcaactgtaccccggctggtccgcgcgggataactatggaaagaagaagaagaggaaaagggacaagcagccgggagagaccaatgaacacagcgaatgtttcctaaatccttgcctttcacttcctccgattacagacctgagcgctcctaagaaatgccgagcgcgctttggccttgatcaacagaataactggtgcggcccttgcaggagaaaaaaaaagtgcgttcgctacatacaaggtgaaggcagctgcctcagcccaccctcttcagatggaagcttactagattcgcctcccccctccccgaacctgctaggctcccctccccgagacgccaagtcacagactgagcagacccagcctctgtcgctgtccctgaagcccgaccccctggcccacctgtccatgatgcctccgccacccgccctcctgctcgctgaggccacccacaaggcctccgccctctgtcccaacggggccctggacctgcccccagccgctttgcagcctgccgccccctcctcatcaattgcacagccgtcgacttcttccttacattcccacagctccctggccgggacccagccccagccgctgtcgctcgtcaccaagtctttagaatagctttagcgtcgtgaaccccgctgctttgtttatggttttgtttcacttttcttaatttgccccccacccccaccttgaaaggttttgttttgtactctcttaattttgtgccatgtggctacattagttgatgtttatcgagttcattggtcaatatttgacccattcttatttcaatttctccttttaaatatgtagatgagagaagaacctcatgattctaccaaaatttttatcaacagctgtttaaagtctttgtagcgtttaaaaaatatatatatatacataactgttatgtagttcggatagcttagttttaaaagactgattaaaaaacaaaaagaaaaaaaaagcaattttgaagcagccctccagaaggagttggttctgtattatttgtattaaatacgagcttgcgaaccaatcattttacatctggtttttaaaccgtaagggcaccatgaatgcagtgccgttactttttttttttttttctgtgtgaaacaactcttattgtgatgttacttgttattgtttaaatgtacagaaacaaagggtaaaaatgtgttaatataccttgttccatggtgttgttcttttggggggaggggacgctactcaacacttaatagaatcacaacgctgttgggccagtagtatttattgctttagagattgcttgtcgtacctgtatgtcgtccctttttaaatatgttttcctttttcttgaaactgtataaagtttttttcccccttagcataagcatcttatatataacaactcatttgtacaaggtttttaagtttatatataaaatgtgtatatatatttttgtttcccctttttgacttttttttttctgtatgaaacccagatgtcaccaaatggacattaatagttgcattaaggatcagtagcattaacaaaagttgctttaaaagccattatgtaaaacaagacttgaaaatgagtgagggaattttagcgacactgtctgagcagcagtgggaaccatcttcgtttcccctttgaactcccagtgggatgccctaccctgcgcccttaggacccggactgaccgtgtacaaaactttacgtgccaaaattctcagtgaatttagctttctccctctttttgatgctgtaatttttgttcatcatgttttgctgtgatgttacataggtagatttgtatgtagttttaatgtcacctataacaaaatgtgtttggtagcagattgtccagaaagcattttaaatgaagaggtataaacccttaagggccaaaattctgtatattagattactcttaaacgaaaaaccagctgccgcttttatgtacacatattacatacgagtaggcagcagactttaaaaataaaaaaaacctaggcatgttgatgttgcaaaatgctgtataaagctgaaacctgttcattcagtgccattgtagttgacatgaagcgattgtaaaactgtctccgatttttctctggtttattaaaatgctaactataacattttttgtgaatactttgaatgtttcctaacagttgtgatgttactgttccgttttatgctcttattccaagttcatttttaatggtttggaagccatttttgtaatgaataaatgttcatgctgtacagtatctgtagcatgccgttctggattaataaaagcaacttagtatgtgcagataaa

SEQ ID NO: 192269 - DNA, 1274 bp, Homo sapiens
  Payload ID: 17971
  Gene Name: transcription factor 7-like 2 (T-cell specific, HMG-box)
  ENST ID: ENST00000369386
  CDS Start-End: 112-474
caggaatcgtcccagagtgatgtcggctcactccatagttcaaagcatcaggactccaaaaaggaagaagaaaagaagaagccccacataaagaaacctcttaatgcattcatgttgtatatgaaggaaatgagagcaaaggtcgtagctgagtgcacgttgaaagaaagcgcggccatcaaccagatccttgggcggaggtggcatgcactgtccagagaagagcaagcgaaatactacgagctggcccggaaggagcgacagcttcatatgcaactgtaccccggctggtccgcgcgggataactatggaaagaagaagaagaggaaaagggacaagcagccgggagagaccaatgacctgagcgctcctaagaaatgccgagcgcgctttggccttgatcaacagaataactggtgcggcccttgcagatgcaaatactccaaagaagtgtcgggcactgttcgggcttgaccgacagactttatggtgcaaaccgtgcaggagaaaaaaaaagtgcgttcgctacatacaaggtgaaggcagctgcctcagcccaccctcttcagatggaagcttactagattcgcctcccccctccccgaacctgctaggctcccctccccgagacgccaagtcacagactgagcagacccagcctctgtcgctgtccctgaagcccgaccccctggcccacctgtccatgatgcctccgccacccgccctcctgctcgctgaggccacccacaaggcctccgccctctgtcccaacggggccctggacctgcccccagccgctttgcagcctgccgccccctcctcatcaattgcacagccgtcgacttcttccttacattcccacagctccctggccgggacccagccccagccgctgtcgctcgtcaccaagtctttagaatagctttagcgtcgtgaaccccgctgctttgtttatggttttgtttcacttttcttaatttgccccccacccccaccttgaaaggttttgttttgtactctcttaattttgtgccatgtggctacattagttgatgtttatcgagttcattggtcaatatttgacccattcttatttcaatttctccttttaaatatgtagatgagagaagaacctcatgattctaccaaaatttttatcaacagctgtttaaagtctttgtagcgtttaaaaaatatatatatatacataactgttatgtagttcggatagcttagttttaaaagactgattaaaaaacaaaaagaaaaaaaaa

SEQ ID NO: 192270 - DNA, 738 bp, Homo sapiens
  Payload ID: 17971
  Gene Name: transcription factor 7-like 2 (T-cell specific, HMG-box)
  ENST ID: ENST00000369389
  CDS Start-End: 186-716
caggaatcccacggcctccgcaccctccagatatatccccgtattacccactatcgcctggcaccgtaggacaaatcccccatccgctaggatggttagtaccacagcaaggtcaaccagtgtacccaatcacgacaggaggattcagacacccctaccccacagctctgaccgtcaatgcttccatgtccaggttccctccccatatggtcccaccacatcatacgctacacacgacgggcattccgcatccggccatagtcacaccaacagtcaaacaggaatcgtcccagagtgatgtcggctcactccatagttcaaagcatcaggactccaaaaaggaagaagaaaagaagaagccccacataaagaaacctcttaatgcattcatgttgtatatgaaggaaatgagagcaaaggtcgtagctgagtgcacgttgaaagaaagcgcggccatcaaccagatccttgggcggaggtggcatgcactgtccagagaagagcaagcgaaatactacgagctggcccggaaggagcgacagcttcatatgcaactgtaccccggctggtccgcgcgggataactatggaaagaagaagaagaggaaaagggacaagcagccgggagagaccaatggagaaaaaaaaagtgcgttcgctacatacaaggtgaaggcagctgcctcagcccaccctcttcagatggaagcttactagattcgcctcccccctccccgaa

SEQ ID NO: 192271 - DNA, 1041 bp, Homo sapiens
  Payload ID: 17971
  Gene Name: transcription factor 7-like 2 (T-cell specific, HMG-box)
  ENST ID: ENST00000369395
  CDS Start-End: 86-1039
gcaaaactttttgggggtgattttttttggcttttcttcctccttcatttttcttccaaaattgctgctggtgggtgaaaaaaaaatgccgcagctgaacggcggtggaggggatgacctaggcgccaacgacgaactgatttccttcaaagacgagggcgaacaggaggagaagagctccgaaaactcctcggcagagagggatttagctgatgtcaaatcgtctctagtcaatgaatcagaaacgaatcaaaacagctcctccgattccgaggcggaaagacggcctccgcctcgctccgaaagtttccgagacaaatcccgggaaagtttggaagaagcggccaagaggcaagatggagggctctttaaggggccaccgtatcccggctaccccttcatcatgatccccgacctgacgagcccctacctccccaacggatcgctctcgcccaccgcccgaacctatctccagatgaaatggccactgcttgatgtccaggcagggagcctccagagtagacaagccctcaaggatgcccggtccccatcaccggcacacattgtccagagccccctcccttgctgcactcagggacatgactgtcagcacttctaccccccctcagacttcactgtcagcactcaagtcttcagggacatgaaaaggagccactccttacaaaaagttggggagccctggtgtattgagtctaacaaagtgccagtggtgcagcaccctcaccatgtccaccccctcacgcctcttatcacgtacagcaatgaacacttcacgccgggaaacccacctccacacttaccagccgacgtagaccccaaaacaggaatcccacggcctccgcaccctccagatatatccccgtattacccactatcgcctggcaccgtaggacaaatcccccatccgctaggatggttagtaccacagcaaggtcaaccagtgtacccaatcacgacaggaggattcagacacccctaccccacagctctgaccgtcaatgcttccatgtccaggtgagt

SEQ ID NO: 192272 - DNA, 3802 bp, Homo sapiens
  Payload ID: 17971
  Gene Name: transcription factor 7-like 2 (T-cell specific, HMG-box)
  Uniprot ID: Q9NQB0
  ENST ID: ENST00000369397
  CDS Start-End: 306-2096
ttttttttttttaccccccttttttatttattatttttttgcacattgatcggatccttgggaacgagagaaaaaagaaacccaaactcacgcgtgcagaagatctccccccccttcccctcccctcctccctcttttcccctccccaggagaaaaagacccccaagcagaaaaaagttcaccttggactcgtctttttcttgcaatattttttgggggggcaaaactttttgggggtgattttttttggcttttcttcctccttcatttttcttccaaaattgctgctggtgggtgaaaaaaaaatgccgcagctgaacggcggtggaggggatgacctaggcgccaacgacgaactgatttccttcaaagacgagggcgaacaggaggagaagagctccgaaaactcctcggcagagagggatttagctgatgtcaaatcgtctctagtcaatgaatcagaaacgaatcaaaacagctcctccgattccgaggcggaaagacggcctccgcctcgctccgaaagtttccgagacaaatcccgggaaagtttggaagaagcggccaagaggcaagatggagggctctttaaggggccaccgtatcccggctaccccttcatcatgatccccgacctgacgagcccctacctccccaacggatcgctctcgcccaccgcccgaacctatctccagatgaaatggccactgcttgatgtccaggcagggagcctccagagtagacaagccctcaaggatgcccggtccccatcaccggcacacattgtctctaacaaagtgccagtggtgcagcaccctcaccatgtccaccccctcacgcctcttatcacgtacagcaatgaacacttcacgccgggaaacccacctccacacttaccagccgacgtagaccccaaaacaggaatcccacggcctccgcaccctccagatatatccccgtattacccactatcgcctggcaccgtaggacaaatcccccatccgctaggatggttagtaccacagcaaggtcaaccagtgtacccaatcacgacaggaggattcagacacccctaccccacagctctgaccgtcaatgcttccatgtccaggttccctccccatatggtcccaccacatcatacgctacacacgacgggcattccgcatccggccatagtcacaccaacagtcaaacaggaatcgtcccagagtgatgtcggctcactccatagttcaaagcatcaggactccaaaaaggaagaagaaaagaagaagccccacataaagaaacctcttaatgcattcatgttgtatatgaaggaaatgagagcaaaggtcgtagctgagtgcacgttgaaagaaagcgcggccatcaaccagatccttgggcggaggtggcatgcactgtccagagaagagcaagcgaaatactacgagctggcccggaaggagcgacagcttcatatgcaactgtaccccggctggtccgcgcgggataactatggaaagaagaagaagaggaaaagggacaagcagccgggagagaccaatgaacacagcgaatgtttcctaaatccttgcctttcacttcctccgattacagacctgagcgctcctaagaaatgccgagcgcgctttggccttgatcaacagaataactggtgcggcccttgcaggagaaaaaaaaagtgcgttcgctacatacaaggtgaaggcagctgcctcagcccaccctcttcagatggaagcttactagattcgcctcccccctccccgaacctgctaggctcccctccccgagacgccaagtcacagactgagcagacccagcctctgtcgctgtccctgaagcccgaccccctggcccacctgtccatgatgcctccgccacccgccctcctgctcgctgaggccacccacaaggcctccgccctctgtcccaacggggccctggacctgcccccagccgctttgcagcctgccgccccctcctcatcaattgcacagccgtcgacttcttccttacattcccacagctccctggccgggacccagccccagccgctgtcgctcgtcaccaagtctttagaatagctttagcgtcgtgaaccccgctgctttgtttatggttttgtttcacttttcttaatttgccccccacccccaccttgaaaggttttgttttgtactctcttaattttgtgccatgtggctacattagttgatgtttatcgagttcattggtcaatatttgacccattcttatttcaatttctccttttaaatatgtagatgagagaagaacctcatgattctaccaaaatttttatcaacagctgtttaaagtctttgtagcgtttaaaaaatatatatatatacataactgttatgtagttcggatagcttagttttaaaagactgattaaaaaacaaaaagaaaaaaaaagcaattttgaagcagccctccagaaggagttggttctgtattatttgtattaaatacgagcttgcgaaccaatcattttacatctggtttttaaaccgtaagggcaccatgaatgcagtgccgttactttttttttttttttctgtgtgaaacaactcttattgtgatgttacttgttattgtttaaatgtacagaaacaaagggtaaaaatgtgttaatataccttgttccatggtgttgttcttttggggggaggggacgctactcaacacttaatagaatcacaacgctgttgggccagtagtatttattgctttagagattgcttgtcgtacctgtatgtcgtccctttttaaatatgttttcctttttcttgaaactgtataaagtttttttcccccttagcataagcatcttatatataacaactcatttgtacaaggtttttaagtttatatataaaatgtgtatatatatttttgtttcccctttttgacttttttttttctgtatgaaacccagatgtcaccaaatggacattaatagttgcattaaggatcagtagcattaacaaaagttgctttaaaagccattatgtaaaacaagacttgaaaatgagtgagggaattttagcgacactgtctgagcagcagtgggaaccatcttcgtttcccctttgaactcccagtgggatgccctaccctgcgcccttaggacccggactgaccgtgtacaaaactttacgtgccaaaattctcagtgaatttagctttctccctctttttgatgctgtaatttttgttcatcatgttttgctgtgatgttacataggtagatttgtatgtagttttaatgtcacctataacaaaatgtgtttggtagcagattgtccagaaagcattttaaatgaagaggtataaacccttaagggccaaaattctgtatattagattactcttaaacgaaaaaccagctgccgcttttatgtacacatattacatacgagtaggcagcagactttaaaaataaaaaaaacctaggcatgttgatgttgcaaaatgctgtataaagctgaaacctgttcattcagtgccattgtagttgacatgaagcgattgtaaaactgtctccgatttttctctggtttattaaaatgctaactataacattttttgtgaatactttgaatgtttcctaacagttgtgatgttactgttccgttttatgctcttattccaagttcatttttaatggtttggaagccatttttgtaatgaataaatgttcatgctgtacagtatctgtagcatgccgttctggattaataaaagcaacttagtatgtgcagataaa

SEQ ID NO: 192273 - DNA, 768 bp, Homo sapiens
  Payload ID: 17971
  Gene Name: transcription factor 7-like 2 (T-cell specific, HMG-box)
  ENST ID: ENST00000470254
  CDS Start-End: 1-327
gctgagtgcacgttgaaagaaagcgcggccatcaaccagatccttgggcggaggtggcatgcactgtccagagaagagcaagcgaaatactacgagctggcccggaaggagcgacagcttcatatgcaactgtaccccggctggtccgcgcgggataactatggaaagaagaagaagaggaaaagggacaagcagccgggagagaccaatgacctgagcgctcctaagaaatgccgagcgcgctttggccttgatcaacagaataactggtgcggcccttgcagatgcaaatactccaaagaagtgtcgggcactgttcgggcttgaccgacagactttatggtgcaaaccgtgcagtctttgaatttggaatattacaatggagaaaaaaaaagtgcgttcgctacatacaaggtgaaggcagctgcctcagcccaccctcttcagatggaagcttactagattcgcctcccccctccccgaacctgctaggctcccctccccgagacgccaagtcacagactgagcagacccagcctctgtcgctgtccctgaagcccgaccccctggcccacctgtccatgatgcctccgccacccgccctcctgctcgctgaggccacccacaaggcctccgccctctgtcccaacggggccctggacctgcccccagccgctttgcagcctgccgccccctcctcatcaattgcacagccgtcgacttcttccttacattcccacagctccctggccgggacccagccccagc

SEQ ID NO: 192274 - DNA, 4092 bp, Homo sapiens
  Payload ID: 17971
  Gene Name: transcription factor 7-like 2 (T-cell specific, HMG-box)
  ENST ID: ENST00000545257
  CDS Start-End: 508-1938
aataatctccgctcccagactactccgttcctccggatttcgatccccctttttctatctgtcaatcagcgccgcctttgaactgaaaagctctcagtctaacttcaactcactcaaatccgagcggcacgagcacctcctgtatcttcggcttccccccccctttgctctttatatctgacttcttgttgttgttggtgttttttttttttttaccccccttttttatttattatttttttgcacattgatcggatccttgggaacgagagaaaaaagaaacccaaactcacgcgtgcagaagatctccccccccttcccctcccctcctccctcttttcccctccccaggagaaaaagacccccaagcagaaaaaagttcaccttggactcgtctttttcttgcaatattttttgggggggcaaaactttttgggggtgattttttttggcttttcttcctccttcatttttcttccaaaattgctgctggtgggtgaaaaaaaaatgccgcagctgaacggcggtggaggggatgacctaggcgccaacgacgaactgatttccttcaaagacgagggcgaacaggaggagaagagctccgaaaactcctcggcagagagggatttagctgatgtcaaatcgtctctagtcaatgaatcagaaacgaatcaaaacagctcctccgattccgaggcggaaagacggcctccgcctcgctccgaaagtttccgagacaaatcccgggaaagtttggaagaagcggccaagaggcaagatggagggctctttaaggggccaccgtatcccggctaccccttcatcatgatccccgacctgacgagcccctacctccccaacggatcgctctcgcccaccgcccgaacctatctccagatgaaatggccactgcttgatgtccaggcagggagcctccagagtagacaagccctcaaggatgcccggtccccatcaccggcacacattgtctctaacaaagtgccagtggtgcagcaccctcaccatgtccaccccctcacgcctcttatcacgtacagcaatgaacacttcacgccgggaaacccacctccacacttaccagccgacgtagaccccaaaacaggaatcccacggcctccgcaccctccagatatatccccgtattacccactatcgcctggcaccgtaggacaaatcccccatccgctaggatggttagtaccacagcaaggtcaaccagtgtacccaatcacgacaggaggattcagacacccctaccccacagctctgaccgtcaatgcttccatgtccagctttctgtcttctaggttccctccccatatggtcccaccacatcatacgctacacacgacgggcattccgcatccggccatagtcacaccaacagtcaaacaggaatcgtcccagagtgatgtcggctcactccatagttcaaagcatcaggactccaaaaaggaagaagaaaagaagaagccccacataaagaaacctcttaatgcattcatgttgtatatgaaggaaatgagagcaaaggtcgtagctgagtgcacgttgaaagaaagcgcggccatcaaccagatccttgggcggaggtggcatgcactgtccagagaagagcaagcgaaatactacgagctggcccggaaggagcgacagcttcatatgcaactgtaccccggctggtccgcgcgggataactatggaaagaagaagaagaggaaaagggacaagcagccgggagagaccaatgaacacagcgaatgtttcctaaatccttgcctttcacttcctccgattacagacctgagcgctcctaagaaatgccgagcgcgctttggccttgatcaacagaataactggtgcggcccttgcagatgcaaatactccaaagaagtgtcgggcactgttcgggcttgaccgacagactttatggtgcaaaccgtgcaggagaaaaaaaaagtgcgttcgctacatacaaggtgaaggcagctgcctcagcccaccctcttcagatggaagcttactagattcgcctcccccctccccgaacctgctaggctcccctccccgagacgccaagtcacagactgagcagacccagcctctgtcgctgtccctgaagcccgaccccctggcccacctgtccatgatgcctccgccacccgccctcctgctcgctgaggccacccacaaggcctccgccctctgtcccaacggggccctggacctgcccccagccgctttgcagcctgccgccccctcctcatcaattgcacagccgtcgacttcttccttacattcccacagctccctggccgggacccagccccagccgctgtcgctcgtcaccaagtctttagaatagctttagcgtcgtgaaccccgctgctttgtttatggttttgtttcacttttcttaatttgccccccacccccaccttgaaaggttttgttttgtactctcttaattttgtgccatgtggctacattagttgatgtttatcgagttcattggtcaatatttgacccattcttatttcaatttctccttttaaatatgtagatgagagaagaacctcatgattctaccaaaatttttatcaacagctgtttaaagtctttgtagcgtttaaaaaatatatatatatacataactgttatgtagttcggatagcttagttttaaaagactgattaaaaaacaaaaagaaaaaaaaagcaattttgaagcagccctccagaaggagttggttctgtattatttgtattaaatacgagcttgcgaaccaatcattttacatctggtttttaaaccgtaagggcaccatgaatgcagtgccgttactttttttttttttttctgtgtgaaacaactcttattgtgatgttacttgttattgtttaaatgtacagaaacaaagggtaaaaatgtgttaatataccttgttccatggtgttgttcttttggggggaggggacgctactcaacacttaatagaatcacaacgctgttgggccagtagtatttattgctttagagattgcttgtcgtacctgtatgtcgtccctttttaaatatgttttcctttttcttgaaactgtataaagtttttttcccccttagcataagcatcttatatataacaactcatttgtacaaggtttttaagtttatatataaaatgtgtatatatatttttgtttcccctttttgacttttttttttctgtatgaaacccagatgtcaccaaatggacattaatagttgcattaaggatcagtagcattaacaaaagttgctttaaaagccattatgtaaaacaagacttgaaaatgagtgagggaattttagcgacactgtctgagcagcagtgggaaccatcttcgtttcccctttgaactcccagtgggatgccctaccctgcgcccttaggacccggactgaccgtgtacaaaactttacgtgccaaaattctcagtgaatttagctttctccctctttttgatgctgtaatttttgttcatcatgttttgctgtgatgttacataggtagatttgtatgtagttttaatgtcacctataacaaaatgtgtttggtagcagattgtccagaaagcattttaaatgaagaggtataaacccttaagggccaaaattctgtatattagattactcttaaacgaaaaaccagctgccgcttttatgtacacatattacatacgagtaggcagcagactttaaaaataaaaaaaacctaggcatgttgatgttgcaaaatgctgtataaagctgaaacctgttcattcagtgccattgtagttgacatgaagcgattgtaaaactgtctccgatttttctctggtttattaaaatgctaactataacattttttgtgaatactttgaatgtttcctaacagttgtgatgttactgttccgttttatgctcttattccaagttcatttttaatggtttggaagccatttttgtaatgaataaatgttcatgctgtacagtatctgtagcatgccgttctggattaataaaagcaacttagtatgtgcagataaa

SEQ ID NO: 192275 - DNA, 3778 bp, Homo sapiens
  Payload ID: 17971
  Gene Name: transcription factor 7-like 2 (T-cell specific, HMG-box)
  ENST ID: ENST00000534894
  CDS Start-End: 508-1734
aataatctccgctcccagactactccgttcctccggatttcgatccccctttttctatctgtcaatcagcgccgcctttgaactgaaaagctctcagtctaacttcaactcactcaaatccgagcggcacgagcacctcctgtatcttcggcttccccccccctttgctctttatatctgacttcttgttgttgttggtgttttttttttttttaccccccttttttatttattatttttttgcacattgatcggatccttgggaacgagagaaaaaagaaacccaaactcacgcgtgcagaagatctccccccccttcccctcccctcctccctcttttcccctccccaggagaaaaagacccccaagcagaaaaaagttcaccttggactcgtctttttcttgcaatattttttgggggggcaaaactttttgggggtgattttttttggcttttcttcctccttcatttttcttccaaaattgctgctggtgggtgaaaaaaaaatgccgcagctgaacggcggtggaggggatgacctaggcgccaacgacgaactgatttccttcaaagacgagggcgaacaggaggagaagagctccgaaaactcctcggcagagagggatttagctgatgtcaaatcgtctctagtcaatgaatcagaaacgaatcaaaacagctcctccgattccgaggcggaaagacggcctccgcctcgctccgaaagtttccgagacaaatcccgggaaagtttggaagaagcggccaagaggcaagatggagggctctttaaggggccaccgtatcccggctaccccttcatcatgatccccgacctgacgagcccctacctccccaacggatcgctctcgcccaccgcccgaacctctaacaaagtgccagtggtgcagcaccctcaccatgtccaccccctcacgcctcttatcacgtacagcaatgaacacttcacgccgggaaacccacctccacacttaccagccgacgtagaccccaaaacaggaatcccacggcctccgcaccctccagatatatccccgtattacccactatcgcctggcaccgtaggacaaatcccccatccgctaggatggttagtaccacagcaaggtcaaccagtgtacccaatcacgacaggaggattcagacacccctaccccacagctctgaccgtcaatgcttccatgtccaggttccctccccatatggtcccaccacatcatacgctacacacgacgggcattccgcatccggccatagtcacaccaacagtcaaacaggaatcgtcccagagtgatgtcggctcactccatagttcaaagcatcaggactccaaaaaggaagaagaaaagaagaagccccacataaagaaacctcttaatgcattcatgttgtatatgaaggaaatgagagcaaaggtcgtagctgagtgcacgttgaaagaaagcgcggccatcaaccagatccttgggcggaggtggcatgcactgtccagagaagagcaagcgaaatactacgagctggcccggaaggagcgacagcttcatatgcaactgtaccccggctggtccgcgcgggataactatggaaagaagaagaagaggaaaagggacaagcagccgggagagaccaatggagaaaaaaaaagtgcgttcgctacatacaaggtgaaggcagctgcctcagcccaccctcttcagatggaagcttactagattcgcctcccccctccccgaacctgctaggctcccctccccgagacgccaagtcacagactgagcagacccagcctctgtcgctgtccctgaagcccgaccccctggcccacctgtccatgatgcctccgccacccgccctcctgctcgctgaggccacccacaaggcctccgccctctgtcccaacggggccctggacctgcccccagccgctttgcagcctgccgccccctcctcatcaattgcacagccgtcgacttcttccttacattcccacagctccctggccgggacccagccccagccgctgtcgctcgtcaccaagtctttagaatagctttagcgtcgtgaaccccgctgctttgtttatggttttgtttcacttttcttaatttgccccccacccccaccttgaaaggttttgttttgtactctcttaattttgtgccatgtggctacattagttgatgtttatcgagttcattggtcaatatttgacccattcttatttcaatttctccttttaaatatgtagatgagagaagaacctcatgattctaccaaaatttttatcaacagctgtttaaagtctttgtagcgtttaaaaaatatatatatatacataactgttatgtagttcggatagcttagttttaaaagactgattaaaaaacaaaaagaaaaaaaaagcaattttgaagcagccctccagaaggagttggttctgtattatttgtattaaatacgagcttgcgaaccaatcattttacatctggtttttaaaccgtaagggcaccatgaatgcagtgccgttactttttttttttttttctgtgtgaaacaactcttattgtgatgttacttgttattgtttaaatgtacagaaacaaagggtaaaaatgtgttaatataccttgttccatggtgttgttcttttggggggaggggacgctactcaacacttaatagaatcacaacgctgttgggccagtagtatttattgctttagagattgcttgtcgtacctgtatgtcgtccctttttaaatatgttttcctttttcttgaaactgtataaagtttttttcccccttagcataagcatcttatatataacaactcatttgtacaaggtttttaagtttatatataaaatgtgtatatatatttttgtttcccctttttgacttttttttttctgtatgaaacccagatgtcaccaaatggacattaatagttgcattaaggatcagtagcattaacaaaagttgctttaaaagccattatgtaaaacaagacttgaaaatgagtgagggaattttagcgacactgtctgagcagcagtgggaaccatcttcgtttcccctttgaactcccagtgggatgccctaccctgcgcccttaggacccggactgaccgtgtacaaaactttacgtgccaaaattctcagtgaatttagctttctccctctttttgatgctgtaatttttgttcatcatgttttgctgtgatgttacataggtagatttgtatgtagttttaatgtcacctataacaaaatgtgtttggtagcagattgtccagaaagcattttaaatgaagaggtataaacccttaagggccaaaattctgtatattagattactcttaaacgaaaaaccagctgccgcttttatgtacacatattacatacgagtaggcagcagactttaaaaataaaaaaaacctaggcatgttgatgttgcaaaatgctgtataaagctgaaacctgttcattcagtgccattgtagttgacatgaagcgattgtaaaactgtctccgatttttctctggtttattaaaatgctaactataacattttttgtgaatactttgaatgtttcctaacagttgtgatgttactgttccgttttatgctcttattccaagttcatttttaatggtttggaagccatttttgtaatgaataaatgttcatgctgtacagtatctgtagcatgccgttctggattaataaaagcaacttagtatgtgcagataaa

SEQ ID NO: 192276 - DNA, 4136 bp, Homo sapiens
  Payload ID: 17971
  Gene Name: transcription factor 7-like 2 (T-cell specific, HMG-box)
  ENST ID: ENST00000542695
  CDS Start-End: 826-2430
aataatctccgctcccagactactccgttcctccggatttcgatccccctttttctatctgtcaatcagcgccgcctttgaactgaaaagctctcagtctaacttcaactcactcaaatccgagcggcacgagcacctcctgtatcttcggcttccccccccctttgctctttatatctgacttcttgttgttgttggtgttttttttttttttaccccccttttttatttattatttttttgcacattgatcggatccttgggaacgagagaaaaaagaaacccaaactcacgcgtgcagaagatctccccccccttcccctcccctcctccctcttttcccctccccaggagaaaaagacccccaagcagaaaaaagttcaccttggactcgtctttttcttgcaatattttttgggggggcaaaactttttgggggtgattttttttggcttttcttcctccttcatttttcttccaaaattgctgctggtgggtgaaaaaaaaatgccgcagctgaacggcggtggaggggatgacctaggcgccaacgacgaactgatttccttcaaagacgagggcgaacaggaggagaagagctccgaaaactcctcggcagagagggatttagctgatgtcaaatcgtctctagtcaatgaatcagaaacgaatcaaaacagctcctccgattccgaggcggaaagacggcctccgcctcgctccgaaagtttccgagacaaatcccgggaaagtttggaagaagcggccaagaggcaagatggagggctctttaaggggccaccgtatcccggctaccccttcatcatgatccccgacctgacgagcccctacctccccaacggatcgctctcgcccaccgcccgaacctatctccagatgaaatggccactgcttgatgtccaggcagggagcctccagagtagacaagccctcaaggatgcccggtccccatcaccggcacacattgtccagagccccctcccttgctgcactcagggacatgactgtcagcacttctaccccccctcagacttcactgtcagcactcaagtcttcagggacatgaaaaggagccactccttacaaaaagttggggagccctggtgtattgagtctaacaaagtgccagtggtgcagcaccctcaccatgtccaccccctcacgcctcttatcacgtacagcaatgaacacttcacgccgggaaacccacctccacacttaccagccgacgtagaccccaaaacaggaatcccacggcctccgcaccctccagatatatccccgtattacccactatcgcctggcaccgtaggacaaatcccccatccgctaggatggcaaggtcaaccagtgtacccaatcacgacaggaggattcagacacccctaccccacagctctgaccgtcaatgcttccatgtccaggttccctccccatatggtcccaccacatcatacgctacacacgacgggcattccgcatccggccatagtcacaccaacagtcaaacaggaatcgtcccagagtgatgtcggctcactccatagttcaaagcatcaggactccaaaaaggaagaagaaaagaagaagccccacataaagaaacctcttaatgcattcatgttgtatatgaaggaaatgagagcaaaggtcgtagctgagtgcacgttgaaagaaagcgcggccatcaaccagatccttgggcggaggtggcatgcactgtccagagaagagcaagcgaaatactacgagctggcccggaaggagcgacagcttcatatgcaactgtaccccggctggtccgcgcgggataactatggaaagaagaagaagaggaaaagggacaagcagccgggagagaccaatgaacacagcgaatgtttcctaaatccttgcctttcacttcctccgattacagatgcaaatactccaaagaagtgtcgggcactgttcgggcttgaccgacagactttatggtgcaaaccgtgcaggagaaaaaaaaagtgcgttcgctacatacaaggtgaaggcagctgcctcagcccaccctcttcagatggaagcttactagattcgcctcccccctccccgaacctgctaggctcccctccccgagacgccaagtcacagactgagcagacccagcctctgtcgctgtccctgaagcccgaccccctggcccacctgtccatgatgcctccgccacccgccctcctgctcgctgaggccacccacaaggcctccgccctctgtcccaacggggccctggacctgcccccagccgctttgcagcctgccgccccctcctcatcaattgcacagccgtcgacttcttccttacattcccacagctccctggccgggacccagccccagccgctgtcgctcgtcaccaagtctttagaatagctttagcgtcgtgaaccccgctgctttgtttatggttttgtttcacttttcttaatttgccccccacccccaccttgaaaggttttgttttgtactctcttaattttgtgccatgtggctacattagttgatgtttatcgagttcattggtcaatatttgacccattcttatttcaatttctccttttaaatatgtagatgagagaagaacctcatgattctaccaaaatttttatcaacagctgtttaaagtctttgtagcgtttaaaaaatatatatatatacataactgttatgtagttcggatagcttagttttaaaagactgattaaaaaacaaaaagaaaaaaaaagcaattttgaagcagccctccagaaggagttggttctgtattatttgtattaaatacgagcttgcgaaccaatcattttacatctggtttttaaaccgtaagggcaccatgaatgcagtgccgttactttttttttttttttctgtgtgaaacaactcttattgtgatgttacttgttattgtttaaatgtacagaaacaaagggtaaaaatgtgttaatataccttgttccatggtgttgttcttttggggggaggggacgctactcaacacttaatagaatcacaacgctgttgggccagtagtatttattgctttagagattgcttgtcgtacctgtatgtcgtccctttttaaatatgttttcctttttcttgaaactgtataaagtttttttcccccttagcataagcatcttatatataacaactcatttgtacaaggtttttaagtttatatataaaatgtgtatatatatttttgtttcccctttttgacttttttttttctgtatgaaacccagatgtcaccaaatggacattaatagttgcattaaggatcagtagcattaacaaaagttgctttaaaagccattatgtaaaacaagacttgaaaatgagtgagggaattttagcgacactgtctgagcagcagtgggaaccatcttcgtttcccctttgaactcccagtgggatgccctaccctgcgcccttaggacccggactgaccgtgtacaaaactttacgtgccaaaattctcagtgaatttagctttctccctctttttgatgctgtaatttttgttcatcatgttttgctgtgatgttacataggtagatttgtatgtagttttaatgtcacctataacaaaatgtgtttggtagcagattgtccagaaagcattttaaatgaagaggtataaacccttaagggccaaaattctgtatattagattactcttaaacgaaaaaccagctgccgcttttatgtacacatattacatacgagtaggcagcagactttaaaaataaaaaaaacctaggcatgttgatgttgcaaaatgctgtataaagctgaaacctgttcattcagtgccattgtagttgacatgaagcgattgtaaaactgtctccgatttttctctggtttattaaaatgctaactataacattttttgtgaatactttgaatgtttcctaacagttgtgatgttactgttccgttttatgctcttattccaagttcatttttaatggtttggaagccatttttgtaatgaataaatgttcatgctgtacagtatctgtagcatgccgttctggattaataaaagcaacttagtatgtgcagataaa

SEQ ID NO: 192277 - DNA, 4037 bp, Homo sapiens
  Payload ID: 17971
  Gene Name: transcription factor 7-like 2 (T-cell specific, HMG-box)
  ENST ID: ENST00000543371
  CDS Start-End: 508-2331
aataatctccgctcccagactactccgttcctccggatttcgatccccctttttctatctgtcaatcagcgccgcctttgaactgaaaagctctcagtctaacttcaactcactcaaatccgagcggcacgagcacctcctgtatcttcggcttccccccccctttgctctttatatctgacttcttgttgttgttggtgttttttttttttttaccccccttttttatttattatttttttgcacattgatcggatccttgggaacgagagaaaaaagaaacccaaactcacgcgtgcagaagatctccccccccttcccctcccctcctccctcttttcccctccccaggagaaaaagacccccaagcagaaaaaagttcaccttggactcgtctttttcttgcaatattttttgggggggcaaaactttttgggggtgattttttttggcttttcttcctccttcatttttcttccaaaattgctgctggtgggtgaaaaaaaaatgccgcagctgaacggcggtggaggggatgacctaggcgccaacgacgaactgatttccttcaaagacgagggcgaacaggaggagaagagctccgaaaactcctcggcagagagggatttagctgatgtcaaatcgtctctagtcaatgaatcagaaacgaatcaaaacagctcctccgattccgaggcggaaagacggcctccgcctcgctccgaaagtttccgagacaaatcccgggaaagtttggaagaagcggccaagaggcaagatggagggctctttaaggggccaccgtatcccggctaccccttcatcatgatccccgacctgacgagcccctacctccccaacggatcgctctcgcccaccgcccgaaccctccattttcagtccggcagcacacattactctgcgtacaaaacgattgaacaccagattgcagttcagtatctccagatgaaatggccactgcttgatgtccaggcagggagcctccagagtagacaagccctcaaggatgcccggtccccatcaccggcacacattgtctctaacaaagtgccagtggtgcagcaccctcaccatgtccaccccctcacgcctcttatcacgtacagcaatgaacacttcacgccgggaaacccacctccacacttaccagccgacgtagaccccaaaacaggaatcccacggcctccgcaccctccagatatatccccgtattacccactatcgcctggcaccgtaggacaaatcccccatccgctaggatggttagtaccacagcaaggtcaaccagtgtacccaatcacgacaggaggattcagacacccctaccccacagctctgaccgtcaatgcttccatgtccagctttctgtcttctaggttccctccccatatggtcccaccacatcatacgctacacacgacgggcattccgcatccggccatagtcacaccaacagtcaaacaggaatcgtcccagagtgatgtcggctcactccatagttcaaagcatcaggactccaaaaaggaagaagaaaagaagaagccccacataaagaaacctcttaatgcattcatgttgtatatgaaggaaatgagagcaaaggtcgtagctgagtgcacgttgaaagaaagcgcggccatcaaccagatccttgggcggaggtggcatgcactgtccagagaagagcaagcgaaatactacgagctggcccggaaggagcgacagcttcatatgcaactgtaccccggctggtccgcgcgggataactatggaaagaagaagaagaggaaaagggacaagcagccgggagagaccaatgatgcaaatactccaaagaagtgtcgggcactgttcgggcttgaccgacagactttatggtgcaaaccgtgcaggagaaaaaaaaagtgcgttcgctacatacaaggtgaaggcagctgcctcagcccaccctcttcagatggaagcttactagattcgcctcccccctccccgaacctgctaggctcccctccccgagacgccaagtcacagactgagcagacccagcctctgtcgctgtccctgaagcccgaccccctggcccacctgtccatgatgcctccgccacccgccctcctgctcgctgaggccacccacaaggcctccgccctctgtcccaacggggccctggacctgcccccagccgctttgcagcctgccgccccctcctcatcaattgcacagccgtcgacttcttccttacattcccacagctccctggccgggacccagccccagccgctgtcgctcgtcaccaagtctttagaatagctttagcgtcgtgaaccccgctgctttgtttatggttttgtttcacttttcttaatttgccccccacccccaccttgaaaggttttgttttgtactctcttaattttgtgccatgtggctacattagttgatgtttatcgagttcattggtcaatatttgacccattcttatttcaatttctccttttaaatatgtagatgagagaagaacctcatgattctaccaaaatttttatcaacagctgtttaaagtctttgtagcgtttaaaaaatatatatatatacataactgttatgtagttcggatagcttagttttaaaagactgattaaaaaacaaaaagaaaaaaaaagcaattttgaagcagccctccagaaggagttggttctgtattatttgtattaaatacgagcttgcgaaccaatcattttacatctggtttttaaaccgtaagggcaccatgaatgcagtgccgttactttttttttttttttctgtgtgaaacaactcttattgtgatgttacttgttattgtttaaatgtacagaaacaaagggtaaaaatgtgttaatataccttgttccatggtgttgttcttttggggggaggggacgctactcaacacttaatagaatcacaacgctgttgggccagtagtatttattgctttagagattgcttgtcgtacctgtatgtcgtccctttttaaatatgttttcctttttcttgaaactgtataaagtttttttcccccttagcataagcatcttatatataacaactcatttgtacaaggtttttaagtttatatataaaatgtgtatatatatttttgtttcccctttttgacttttttttttctgtatgaaacccagatgtcaccaaatggacattaatagttgcattaaggatcagtagcattaacaaaagttgctttaaaagccattatgtaaaacaagacttgaaaatgagtgagggaattttagcgacactgtctgagcagcagtgggaaccatcttcgtttcccctttgaactcccagtgggatgccctaccctgcgcccttaggacccggactgaccgtgtacaaaactttacgtgccaaaattctcagtgaatttagctttctccctctttttgatgctgtaatttttgttcatcatgttttgctgtgatgttacataggtagatttgtatgtagttttaatgtcacctataacaaaatgtgtttggtagcagattgtccagaaagcattttaaatgaagaggtataaacccttaagggccaaaattctgtatattagattactcttaaacgaaaaaccagctgccgcttttatgtacacatattacatacgagtaggcagcagactttaaaaataaaaaaaacctaggcatgttgatgttgcaaaatgctgtataaagctgaaacctgttcattcagtgccattgtagttgacatgaagcgattgtaaaactgtctccgatttttctctggtttattaaaatgctaactataacattttttgtgaatactttgaatgtttcctaacagttgtgatgttactgttccgttttatgctcttattccaagttcatttttaatggtttggaagccatttttgtaatgaataaatgttcatgctgtacagtatctgtagcatgccgttctggattaataaaagcaacttagtatgtgcagataaa

SEQ ID NO: 192278 - DNA, 4000 bp, Homo sapiens
  Payload ID: 17971
  Gene Name: transcription factor 7-like 2 (T-cell specific, HMG-box)
  Uniprot ID: Q9NQB0
  ENST ID: ENST00000538897
  CDS Start-End: 508-1956
aataatctccgctcccagactactccgttcctccggatttcgatccccctttttctatctgtcaatcagcgccgcctttgaactgaaaagctctcagtctaacttcaactcactcaaatccgagcggcacgagcacctcctgtatcttcggcttccccccccctttgctctttatatctgacttcttgttgttgttggtgttttttttttttttaccccccttttttatttattatttttttgcacattgatcggatccttgggaacgagagaaaaaagaaacccaaactcacgcgtgcagaagatctccccccccttcccctcccctcctccctcttttcccctccccaggagaaaaagacccccaagcagaaaaaagttcaccttggactcgtctttttcttgcaatattttttgggggggcaaaactttttgggggtgattttttttggcttttcttcctccttcatttttcttccaaaattgctgctggtgggtgaaaaaaaaatgccgcagctgaacggcggtggaggggatgacctaggcgccaacgacgaactgatttccttcaaagacgagggcgaacaggaggagaagagctccgaaaactcctcggcagagagggatttagctgatgtcaaatcgtctctagtcaatgaatcagaaacgaatcaaaacagctcctccgattccgaggcggaaagacggcctccgcctcgctccgaaagtttccgagacaaatcccgggaaagtttggaagaagcggccaagaggcaagatggagggctctttaaggggccaccgtatcccggctaccccttcatcatgatccccgacctgacgagcccctacctccccaacggatcgctctcgcccaccgcccgaaccctccattttcagtccggcagcacacattactctgcgtacaaaacgattgaacaccagattgcagttcagtatctccagatgaaatggccactgcttgatgtccaggcagggagcctccagagtagacaagccctcaaggatgcccggtccccatcaccggcacacattgtctctaacaaagtgccagtggtgcagcaccctcaccatgtccaccccctcacgcctcttatcacgtacagcaatgaacacttcacgccgggaaacccacctccacacttaccagccgacgtagaccccaaaacaggaatcccacggcctccgcaccctccagatatatccccgtattacccactatcgcctggcaccgtaggacaaatcccccatccgctaggatggttagtaccacagcaaggtcaaccagtgtacccaatcacgacaggaggattcagacacccctaccccacagctctgaccgtcaatgcttccatgtccaggttccctccccatatggtcccaccacatcatacgctacacacgacgggcattccgcatccggccatagtcacaccaacagtcaaacaggaatcgtcccagagtgatgtcggctcactccatagttcaaagcatcaggactccaaaaaggaagaagaaaagaagaagccccacataaagaaacctcttaatgcattcatgttgtatatgaaggaaatgagagcaaaggtcgtagctgagtgcacgttgaaagaaagcgcggccatcaaccagatccttgggcggaggtggcatgcactgtccagagaagagcaagcgaaatactacgagctggcccggaaggagcgacagcttcatatgcaactgtaccccggctggtccgcgcgggataactatggaaagaagaagaagaggaaaagggacaagcagccgggagagaccaatgaacacagcgaatgtttcctaaatccttgcctttcacttcctccgattacaggagaaaaaaaaagtgcgttcgctacatacaaggtgaaggcagctgcctcagcccaccctcttcagatggaagcttactagattcgcctcccccctccccgaacctgctaggctcccctccccgagacgccaagtcacagactgagcagacccagcctctgtcgctgtccctgaagcccgaccccctggcccacctgtccatgatgcctccgccacccgccctcctgctcgctgaggccacccacaaggcctccgccctctgtcccaacggggccctggacctgcccccagccgctttgcagcctgccgccccctcctcatcaattgcacagccgtcgacttcttccttacattcccacagctccctggccgggacccagccccagccgctgtcgctcgtcaccaagtctttagaatagctttagcgtcgtgaaccccgctgctttgtttatggttttgtttcacttttcttaatttgccccccacccccaccttgaaaggttttgttttgtactctcttaattttgtgccatgtggctacattagttgatgtttatcgagttcattggtcaatatttgacccattcttatttcaatttctccttttaaatatgtagatgagagaagaacctcatgattctaccaaaatttttatcaacagctgtttaaagtctttgtagcgtttaaaaaatatatatatatacataactgttatgtagttcggatagcttagttttaaaagactgattaaaaaacaaaaagaaaaaaaaagcaattttgaagcagccctccagaaggagttggttctgtattatttgtattaaatacgagcttgcgaaccaatcattttacatctggtttttaaaccgtaagggcaccatgaatgcagtgccgttactttttttttttttttctgtgtgaaacaactcttattgtgatgttacttgttattgtttaaatgtacagaaacaaagggtaaaaatgtgttaatataccttgttccatggtgttgttcttttggggggaggggacgctactcaacacttaatagaatcacaacgctgttgggccagtagtatttattgctttagagattgcttgtcgtacctgtatgtcgtccctttttaaatatgttttcctttttcttgaaactgtataaagtttttttcccccttagcataagcatcttatatataacaactcatttgtacaaggtttttaagtttatatataaaatgtgtatatatatttttgtttcccctttttgacttttttttttctgtatgaaacccagatgtcaccaaatggacattaatagttgcattaaggatcagtagcattaacaaaagttgctttaaaagccattatgtaaaacaagacttgaaaatgagtgagggaattttagcgacactgtctgagcagcagtgggaaccatcttcgtttcccctttgaactcccagtgggatgccctaccctgcgcccttaggacccggactgaccgtgtacaaaactttacgtgccaaaattctcagtgaatttagctttctccctctttttgatgctgtaatttttgttcatcatgttttgctgtgatgttacataggtagatttgtatgtagttttaatgtcacctataacaaaatgtgtttggtagcagattgtccagaaagcattttaaatgaagaggtataaacccttaagggccaaaattctgtatattagattactcttaaacgaaaaaccagctgccgcttttatgtacacatattacatacgagtaggcagcagactttaaaaataaaaaaaacctaggcatgttgatgttgcaaaatgctgtataaagctgaaacctgttcattcagtgccattgtagttgacatgaagcgattgtaaaactgtctccgatttttctctggtttattaaaatgctaactataacattttttgtgaatactttgaatgtttcctaacagttgtgatgttactgttccgttttatgctcttattccaagttcatttttaatggtttggaagccatttttgtaatgaataaatgttcatgctgtacagtatctgtagcatgccgttctggattaataaaagcaacttagtatgtgcagataaa

SEQ ID NO: 192279 - DNA, 3953 bp, Homo sapiens
  Payload ID: 17971
  Gene Name: transcription factor 7-like 2 (T-cell specific, HMG-box)
  ENST ID: ENST00000536810
  CDS Start-End: 508-2247
aataatctccgctcccagactactccgttcctccggatttcgatccccctttttctatctgtcaatcagcgccgcctttgaactgaaaagctctcagtctaacttcaactcactcaaatccgagcggcacgagcacctcctgtatcttcggcttccccccccctttgctctttatatctgacttcttgttgttgttggtgttttttttttttttaccccccttttttatttattatttttttgcacattgatcggatccttgggaacgagagaaaaaagaaacccaaactcacgcgtgcagaagatctccccccccttcccctcccctcctccctcttttcccctccccaggagaaaaagacccccaagcagaaaaaagttcaccttggactcgtctttttcttgcaatattttttgggggggcaaaactttttgggggtgattttttttggcttttcttcctccttcatttttcttccaaaattgctgctggtgggtgaaaaaaaaatgccgcagctgaacggcggtggaggggatgacctaggcgccaacgacgaactgatttccttcaaagacgagggcgaacaggaggagaagagctccgaaaactcctcggcagagagggatttagctgatgtcaaatcgtctctagtcaatgaatcagaaacgaatcaaaacagctcctccgattccgaggcggaaagacggcctccgcctcgctccgaaagtttccgagacaaatcccgggaaagtttggaagaagcggccaagaggcaagatggagggctctttaaggggccaccgtatcccggctaccccttcatcatgatccccgacctgacgagcccctacctccccaacggatcgctctcgcccaccgcccgaacctatctccagatgaaatggccactgcttgatgtccaggcagggagcctccagagtagacaagccctcaaggatgcccggtccccatcaccggcacacattgtctctaacaaagtgccagtggtgcagcaccctcaccatgtccaccccctcacgcctcttatcacgtacagcaatgaacacttcacgccgggaaacccacctccacacttaccagccgacgtagaccccaaaacaggaatcccacggcctccgcaccctccagatatatccccgtattacccactatcgcctggcaccgtaggacaaatcccccatccgctaggatggttagtaccacagcaaggtcaaccagtgtacccaatcacgacaggaggattcagacacccctaccccacagctctgaccgtcaatgcttccatgtccaggttccctccccatatggtcccaccacatcatacgctacacacgacgggcattccgcatccggccatagtcacaccaacagtcaaacaggaatcgtcccagagtgatgtcggctcactccatagttcaaagcatcaggactccaaaaaggaagaagaaaagaagaagccccacataaagaaacctcttaatgcattcatgttgtatatgaaggaaatgagagcaaaggtcgtagctgagtgcacgttgaaagaaagcgcggccatcaaccagatccttgggcggaggtggcatgcactgtccagagaagagcaagcgaaatactacgagctggcccggaaggagcgacagcttcatatgcaactgtaccccggctggtccgcgcgggataactatggaaagaagaagaagaggaaaagggacaagcagccgggagagaccaatgacctgagcgctcctaagaaatgccgagcgcgctttggccttgatcaacagaataactggtgcggcccttgcaggagaaaaaaaaagtgcgttcgctacatacaaggtgaaggcagctgcctcagcccaccctcttcagatggaagcttactagattcgcctcccccctccccgaacctgctaggctcccctccccgagacgccaagtcacagactgagcagacccagcctctgtcgctgtccctgaagcccgaccccctggcccacctgtccatgatgcctccgccacccgccctcctgctcgctgaggccacccacaaggcctccgccctctgtcccaacggggccctggacctgcccccagccgctttgcagcctgccgccccctcctcatcaattgcacagccgtcgacttcttccttacattcccacagctccctggccgggacccagccccagccgctgtcgctcgtcaccaagtctttagaatagctttagcgtcgtgaaccccgctgctttgtttatggttttgtttcacttttcttaatttgccccccacccccaccttgaaaggttttgttttgtactctcttaattttgtgccatgtggctacattagttgatgtttatcgagttcattggtcaatatttgacccattcttatttcaatttctccttttaaatatgtagatgagagaagaacctcatgattctaccaaaatttttatcaacagctgtttaaagtctttgtagcgtttaaaaaatatatatatatacataactgttatgtagttcggatagcttagttttaaaagactgattaaaaaacaaaaagaaaaaaaaagcaattttgaagcagccctccagaaggagttggttctgtattatttgtattaaatacgagcttgcgaaccaatcattttacatctggtttttaaaccgtaagggcaccatgaatgcagtgccgttactttttttttttttttctgtgtgaaacaactcttattgtgatgttacttgttattgtttaaatgtacagaaacaaagggtaaaaatgtgttaatataccttgttccatggtgttgttcttttggggggaggggacgctactcaacacttaatagaatcacaacgctgttgggccagtagtatttattgctttagagattgcttgtcgtacctgtatgtcgtccctttttaaatatgttttcctttttcttgaaactgtataaagtttttttcccccttagcataagcatcttatatataacaactcatttgtacaaggtttttaagtttatatataaaatgtgtatatatatttttgtttcccctttttgacttttttttttctgtatgaaacccagatgtcaccaaatggacattaatagttgcattaaggatcagtagcattaacaaaagttgctttaaaagccattatgtaaaacaagacttgaaaatgagtgagggaattttagcgacactgtctgagcagcagtgggaaccatcttcgtttcccctttgaactcccagtgggatgccctaccctgcgcccttaggacccggactgaccgtgtacaaaactttacgtgccaaaattctcagtgaatttagctttctccctctttttgatgctgtaatttttgttcatcatgttttgctgtgatgttacataggtagatttgtatgtagttttaatgtcacctataacaaaatgtgtttggtagcagattgtccagaaagcattttaaatgaagaggtataaacccttaagggccaaaattctgtatattagattactcttaaacgaaaaaccagctgccgcttttatgtacacatattacatacgagtaggcagcagactttaaaaataaaaaaaacctaggcatgttgatgttgcaaaatgctgtataaagctgaaacctgttcattcagtgccattgtagttgacatgaagcgattgtaaaactgtctccgatttttctctggtttattaaaatgctaactataacattttttgtgaatactttgaatgtttcctaacagttgtgatgttactgttccgttttatgctcttattccaagttcatttttaatggtttggaagccatttttgtaatgaataaatgttcatgctgtacagtatctgtagcatgccgttctggattaataaaagcaacttagtatgtgcagataaa

SEQ ID NO: 192280 - DNA, 3680 bp, Homo sapiens
  Payload ID: 17971
  Gene Name: transcription factor 7-like 2 (T-cell specific, HMG-box)
  Uniprot ID: Q9NQB0
  ENST ID: ENST00000627217
  CDS Start-End: 351-2159
cccccctttgctctttatatctgacttcttgttgttgttggtgttttttttttttttaccccccttttttatttattatttttttgcacattgatcggatccttgggaacgagagaaaaaagaaacccaaactcacgcgtgcagaagatctccccccccttcccctcccctcctccctcttttcccctccccaggagaaaaagacccccaagcagaaaaaagttcaccttggactcgtctttttcttgcaatattttttgggggggcaaaactttttgggggtgattttttttggcttttcttcctccttcatttttcttccaaaattgctgctggtgggtgaaaaaaaaatgccgcagctgaacggcggtggaggggatgacctaggcgccaacgacgaactgatttccttcaaagacgagggcgaacaggaggagaagagctccgaaaactcctcggcagagagggatttagctgatgtcaaatcgtctctagtcaatgaatcagaaacgaatcaaaacagctcctccgattccgaggcggaaagacggcctccgcctcgctccgaaagtttccgagacaaatcccgggaaagtttggaagaagcggccaagaggcaagatggagggctctttaaggggccaccgtatcccggctaccccttcatcatgatccccgacctgacgagcccctacctccccaacggatcgctctcgcccaccgcccgaaccctccattttcagtccggcagcacacattactctgcgtacaaaacgattgaacaccagattgcagttcagtatctccagatgaaatggccactgcttgatgtccaggcagggagcctccagagtagacaagccctcaaggatgcccggtccccatcaccggcacacattgtctctaacaaagtgccagtggtgcagcaccctcaccatgtccaccccctcacgcctcttatcacgtacagcaatgaacacttcacgccgggaaacccacctccacacttaccagccgacgtagaccccaaaacaggaatcccacggcctccgcaccctccagatatatccccgtattacccactatcgcctggcaccgtaggacaaatcccccatccgctaggatggttagtaccacagcaaggtcaaccagtgtacccaatcacgacaggaggattcagacacccctaccccacagctctgaccgtcaatgcttccatgtccaggttccctccccatatggtcccaccacatcatacgctacacacgacgggcattccgcatccggccatagtcacaccaacagtcaaacaggaatcgtcccagagtgatgtcggctcactccatagttcaaagcatcaggactccaaaaaggaagaagaaaagaagaagccccacataaagaaacctcttaatgcattcatgttgtatatgaaggaaatgagagcaaaggtcgtagctgagtgcacgttgaaagaaagcgcggccatcaaccagatccttgggcggaggtggcatgcactgtccagagaagagcaagcgaaatactacgagctggcccggaaggagcgacagcttcatatgcaactgtaccccggctggtccgcgcgggataactatggaaagaagaagaagaggaaaagggacaagcagccgggagagaccaatgatgcaaatactccaaagaagtgtcgggcactgttcgggcttgaccgacagactttatggtgcaaaccgtgcaggagaaaaaaaaagtgcgttcgctacatacaaggtgaaggcagctgcctcagcccaccctcttcagatggaagcttactagattcgcctcccccctccccgaacctgctaggctcccctccccgagacgccaagtcacagactgagcagacccagcctctgtcgctgtccctgaagcccgaccccctggcccacctgtccatgatgcctccgccacccgccctcctgctcgctgaggccacccacaaggcctccgccctctgtcccaacggggccctggacctgcccccagccgctttgcagcctgccgccccctcctcatcaattgcacagccgtcgacttcttccttacattcccacagctccctggccgggacccagccccagccgctgtcgctcgtcaccaagtctttagaatagctttagcgtcgtgaaccccgctgctttgtttatggttttgtttcacttttcttaatttgccccccacccccaccttgaaaggttttgttttgtactctcttaattttgtgccatgtggctacattagttgatgtttatcgagttcattggtcaatatttgacccattcttatttcaatttctccttttaaatatgtagatgagagaagaacctcatgattctaccaaaatttttatcaacagctgtttaaagtctttgtagcgtttaaaaaatatatatatatacataactgttatgtagttcggatagcttagttttaaaagactgattaaaaaacaaaaagaaaaaaaaagcaattttgaagcagccctccagaaggagttggttctgtattatttgtattaaatacgagcttgcgaaccaatcattttacatctggtttttaaaccgtaagggcaccatgaatgcagtgccgttactttttttttttttttctgtgtgaaacaactcttattgtgatgttacttgttattgtttaaatgtacagaaacaaagggtaaaaatgtgttaatataccttgttccatggtgttgttcttttggggggaggggacgctactcaacacttaatagaatcacaacgctgttgggccagtagtatttattgctttagagattgcttgtcgtacctgtatgtcgtccctttttaaatatgttttcctttttcttgaaactgtataaagtttttttcccccttagcataagcatcttatatataacaactcatttgtacaaggtttttaagtttatatataaaatgtgtatatatatttttgtttcccctttttgacttttttttttctgtatgaaacccagatgtcaccaaatggacattaatagttgcattaaggatcagtagcattaacaaaagttgctttaaaagccattatgtaaaacaagacttgaaaatgagtgagggaattttagcgacactgtctgagcagcagtgggaaccatcttcgtttcccctttgaactcccagtgggatgccctaccctgcgcccttaggacccggactgaccgtgtacaaaactttacgtgccaaaattctcagtgaatttagctttctccctctttttgatgctgtaatttttgttcatcatgttttgctgtgatgttacataggtagatttgtatgtagttttaatgtcacctataacaaaatgtgtttggtagcagattgtccagaaagcattttaaatgaagaggtataaacccttaagggccaaaattctgtatattagattactcttaaacgaaaaaccagctgccgcttttatgtacacatattacatacgagtaggcagcagactttaaaaataaaaaaaacctaggcatgttgatgttgcaaaatgctgtataaagctgaaacctgttcattcagtgccattgtagttgacatgaagcgattgtaaaactgtctccgatttttctctggtttattaaaatgctaactataaca

SEQ ID NO: 192281 - DNA, 1755 bp, Homo sapiens
  Payload ID: 17971
  Gene Name: transcription factor 7-like 2 (T-cell specific, HMG-box)
  ENST ID: ENST00000629706
  CDS Start-End: 1-1755
atgccgcagctgaacggcggtggaggggatgacctaggcgccaacgacgaactgatttccttcaaagacgagggcgaacaggaggagaagagctccgaaaactcctcggcagagagggatttagctgatgtcaaatcgtctctagtcaatgaatcagaaacgaatcaaaacagctcctccgattccgaggcggaaagacggcctccgcctcgctccgaaagtttccgagacaaatcccgggaaagtttggaagaagcggccaagaggcaagatggagggctctttaaggggccaccgtatcccggctaccccttcatcatgatccccgacctgacgagcccctacctccccaacggatcgctctcgcccaccgcccgaacctatctccagatgaaatggccactgcttgatgtccaggcagggagcctccagagtagacaagccctcaaggatgcccggtccccatcaccggcacacattgtctctaacaaagtgccagtggtgcagcaccctcaccatgtccaccccctcacgcctcttatcacgtacagcaatgaacacttcacgccgggaaacccacctccacacttaccagccgacgtagaccccaaaacaggaatcccacggcctccgcaccctccagatatatccccgtattacccactatcgcctggcaccgtaggacaaatcccccatccgctaggatggttagtaccacagcaaggtcaaccagtgtacccaatcacgacaggaggattcagacacccctaccccacagctctgaccgtcaatgcttccatgtccagctttctgtcttctaggttccctccccatatggtcccaccacatcatacgctacacacgacgggcattccgcatccggccatagtcacaccaacagtcaaacaggaatcgtcccagagtgatgtcggctcactccatagttcaaagcatcaggactccaaaaaggaagaagaaaagaagaagccccacataaagaaacctcttaatgcattcatgttgtatatgaaggaaatgagagcaaaggtcgtagctgagtgcacgttgaaagaaagcgcggccatcaaccagatccttgggcggaggtggcatgcactgtccagagaagagcaagcgaaatactacgagctggcccggaaggagcgacagcttcatatgcaactgtaccccggctggtccgcgcgggataactatggaaagaagaagaagaggaaaagggacaagcagccgggagagaccaatgatgcaaatactccaaagaagtgtcgggcactgttcgggcttgaccgacagactttatggtgcaaaccgtgcaggagaaaaaaaaagtgcgttcgctacatacaaggtgaaggcagctgcctcagcccaccctcttcagatggaagcttactagattcgcctcccccctccccgaacctgctaggctcccctccccgagacgccaagtcacagactgagcagacccagcctctgtcgctgtccctgaagcccgaccccctggcccacctgtccatgatgcctccgccacccgccctcctgctcgctgaggccacccacaaggcctccgccctctgtcccaacggggccctggacctgcccccagccgctttgcagcctgccgccccctcctcatcaattgcacagccgtcgacttcttccttacattcccacagctccctggccgggacccagccccagccgctgtcgctcgtcaccaagtctttagaatag

SEQ ID NO: 192282 - DNA, 973 bp, Homo sapiens
  Payload ID: 17972
  Gene Name: transcription factor A, mitochondrial
  Uniprot ID: Q00059
  ENST ID: ENST00000373895
  CDS Start-End: 115-759
tgataacacacgccggagggtcgcacgcgggttccagttgtgattgctggagttgtgtattgccaggaggctctccgagattggggtcgggtcactgcctcatccaccggagcgatggcgtttctccgaagcatgtggggcgtgctgagtgccctgggaaggtctggagcagagctgtgcaccggctgtggaagtcgactgcgctcccccttcagttttgtgtatttaccgaggtggttttcatctgtcttggcaagttgtccaaagaaacctgtaagttcttaccttcgattttctaaagaacaactacccatatttaaagctcagaacccagatgcaaaaactacagaactaattagaagaattgcccagcgttggagggaacttcctgattcaaagaaaaaaatatatcaagatgcttatagggcggagtggcaggtatataaagaagagataagcagatttaaagaacagctaactccaagtcagattatgtctttggaaaaagaaatcatggacaaacatttaaaaaggaaagctatgacaaaaaaaaaagaaaagctgaagactgtaaaggaaaactggaaaaatctgtctgactctgaaaaggaattatatattcagcatgctaaagaggacgaaactcgttatcataatgaaatgaagtcttgggaagaacaaatgattgaagttggacgaaaggatcttctacgtcgcacaataaagaaacaacgaaaatatggtgctgaggagtgttaaaagtagaagattgagatgtgttcacaatggataggcacaggaaaccagttaggtctcaatacctgaagctatcgtaaaattaagaaaggataaagttggtaaaccttttatatttagtatctttttattcagctcatggacttctgccagcataatacttgctttggaaaacccagataaaggttcatgcaaactttattttgtgtttaggaac

SEQ ID NO: 192283 - DNA, 663 bp, Homo sapiens
  Payload ID: 17972
  Gene Name: transcription factor A, mitochondrial
  ENST ID: ENST00000395377
  CDS Start-End: 1-658
agagctgtgcaccggctgtggaagtcgactgcgctcccccttcagttttgtgtatttaccgaggtggttttcatctgtcttggcaagttgtccaaagaaacctgtaagttcttaccttcgattttctaaagaacaactacccatatttaaagctcagaacccagatgcaaaaactacagaactaattagaagaattgcccagcgttggagggaacttcctgattcaaagaaaaaaatatatcaagatgcttatagggcggagtggcaggtatataaagaagagataagcagatttaaagaacagctaactccaagtcagattatgtctttggaaaaagaaatcatggacaaacatttaaaaaggaaagctatgacaaaaaaaaaagagttaacactgcttggaaaaccaaaaagacctcgttcagcttataacgtttatgtagctgaaagattccaagaagctaagggtgattcaccgcaggaaaagctgaagactgtaaaggaaaactggaaaaatctgtctgactctgaaaaggaagtgagtattacggttgttagtctcaagtgtctacttaggatatctgtgagagaatgtattagggcaaggcttgattcatgtgaagacaaccttgtattactaataatacaagtattctaaaatta

SEQ ID NO: 192284 - DNA, 5414 bp, Homo sapiens
  Payload ID: 17972
  Gene Name: transcription factor A, mitochondrial
  Uniprot ID: Q00059
  ENST ID: ENST00000487519
  CDS Start-End: 527-1267
ctgagacgctccgctgggcgcgcagcagccgccgatcggacctcggggtcctggatgcaggactgtctgttacgtacagcccttgtgaccgtcacgggcggacaccggccaacgccgggttggggtgaggccgccgccgcggtccctccatcaccctcctggcccggcagaggaacccactgctccgggcggccggggacagaggtggctcaacagcgccgcctcgaagccagagccctccgcaggctagaggattgcggtttcccttcatctccgcggctcttattcctcccccgcaaggccgcccaccggggtacgctctcccgcgcctgcgccaattccgccccgccccgcccccatctaccgaccggatgttagcagatttcccatagtgcctcgctagtggcgggcatgataacacacgccggagggtcgcacgcgggttccagttgtgattgctggagttgtgtattgccaggaggctctccgagattggggtcgggtcactgcctcatccaccggagcgatggcgtttctccgaagcatgtggggcgtgctgagtgccctgggaaggtctggagcagagctgtgcaccggctgtggaagtcgactgcgctcccccttcagttttgtgtatttaccgaggtggttttcatctgtcttggcaagttgtccaaagaaacctgtaagttcttaccttcgattttctaaagaacaactacccatatttaaagctcagaacccagatgcaaaaactacagaactaattagaagaattgcccagcgttggagggaacttcctgattcaaagaaaaaaatatatcaagatgcttatagggcggagtggcaggtatataaagaagagataagcagatttaaagaacagctaactccaagtcagattatgtctttggaaaaagaaatcatggacaaacatttaaaaaggaaagctatgacaaaaaaaaaagagttaacactgcttggaaaaccaaaaagacctcgttcagcttataacgtttatgtagctgaaagattccaagaagctaagggtgattcaccgcaggaaaagctgaagactgtaaaggaaaactggaaaaatctgtctgactctgaaaaggaattatatattcagcatgctaaagaggacgaaactcgttatcataatgaaatgaagtcttgggaagaacaaatgattgaagttggacgaaaggatcttctacgtcgcacaataaagaaacaacgaaaatatggtgctgaggagtgttaaaagtagaagattgagatgtgttcacaatggataggcacaggaaaccagttaggtctcaatacctgaagctatcgtaaaattaagaaaggataaagttggtaaaccttttatatttagtatctttttattcagctcatggacttctgccagcataatacttgctttggaaaacccagataaaggttcatgcaaactttattttgtgtttaggaactactgaggatcagagtaatccaagcaaatgtgaatcattttacctttgacaaaggtaaatcagactatgaagttttttttatacaggatgatgactatggaaagagtactcttgtttccttatattatggaggcaggagtttcgttttcaaaattgttacaaattgtagaagccacggtgttctgtgatataagtgtgtgtttttcataaagcaggcagaactcatctaggtaaattacagttcctaggtataattcacattgtattcagagttgatggttgtacatataagtgattgctggttttagttgcaactttgtataaaagggactgagaaatttataaacttttttcttactgtcttttttctaaagtaaaaacaaagaaattatgtgccagatttatgcatattattttatgttgcatagaataaaatttttaatctttaattttacatttcctaaatatattttaagacgaaacatttgttctatagcttttccctttttttaagtaaggaattttatttttttctgaattattttctctcgtgagtatattgatccagaaagaaaacttgtattatgtgtgttttaaaatgagaaatctaaaaaacgaaaagtctccaaagtctctggaatttgaaacactttgcataacgtataaaagcctgtttaagagacagccaactatggcctgtggatcaaatccagcctgctgcctgctttttatggcctgtgagctaggaattgtgtttataattttaaatgtttttttttaaagacttttatgatacttgaaaattaacatgaatatttagtgttcataaataaagtttgttgaaacacaaccaagatcattcttttacttgtctatggctgcttttctgtggcagagtagctgccacagaaactatagcccacaaagcctgatatttactgtctgtctgtttatggaaaaaatttatcaacccatggtctatagtatagtgtgatatgactactgttccaatgtattgaagtgttgggatagttttttcaaatgttttcagatgttcttgttttagaatcattgtcacctttaagaggaaaaaggtcatcactagataatctaaacaaattgttgcttctcagtgttagcaaggaaaataatctagtttcaaattacattgcagtataatgaaaaagatccatatactgtggaatgatattcttttaaaattatttgctatggcttggtaaaaatgtactttttccagtagcacatatcacaagaacctcactgtagttgaaagccatctttctttagtatttgtttatccttttaggagagtcaagcaaaggttttcaccacctgtttgagcagaataattctcatcagttcacagatataggataactcaatttatatgcactttatgcgttatgcaaaatatttagaaattgtagattctagatctccagaaagactttgaagactttgatgtcacaaaaagatgacttgttatatgctgagcttgacaaaggtaggaatgggagagaaaaatagtagcttatgaggaaatatgaggctttaaatatataaagttggatattttaaaataacttttccctgtgggagcttctcactctgggtgcagacaggacagtgttggccattggtgaaatagataggatgggtttgaggccagagcagtctgggagtagggggaaagagaaggaggtgtgctagtgtctatcacaggctttctcaattaggtttgcaggagaaaaagccctaagtccctgtgtcatctagaatggtactaattatgtacagtccctaggagaatggagaaaatcataactcaaatcatcgactcaattctgttctcttcagatgagctcagagagcacataggagtgtttgtaatgaggggtatgtaatgattgagatagaggaatgagttacataaacatctcgggacaaatgcagcatagaaaacatctttgtagttaccctgcggggaaatttcctctgagttcttttaacattaactacccgtattattttatacttaacattcatatcataccttcccaaatatattgggaagttcagtgttaagtacgtttctcaagtacttaacaacttaatatagggaggaaaggtgtaaacagtgaaaaaagagcaaaactattttatggtaattttatggtagtatcagcttgtatttggttctctgtttctaaaataatgtaatttttaatattttaaataataggataacctggtttccaagcctttttttcccccgacatccagaatacacactggatccaagcctttcttaaacatcagtacatgtggaagactggcatgccatataccaaatgccattcagctgtaacagtatacacagattttctcttataaagaataagaacatcataaccaatgaccactcatataaagtcttatttgtgtgtgtgtgtgtgtgtgtgtgcacgtgtgtgtgttagagtctcattatattgctcaggctggagggcatggtgtgatcttggctcactgcagccttgacctcctgggctcaagtgatccttccgagtcgttgggactacagtaggtgaacaccaccatgcctggctaatttttgtattttttttttaatcaagatgggatcttgctatgttgcccaggctggtctcaaactcctggcatcaagcgttcctccttccttggcctccttaagtgctgggattataggtgtgagccaccatgcttgaccataaagccttactatttcttttggagacacagtcttgctctgtccaagctggaatgcagtgatgtgatcatggctcactgcagccttgaactcccaggcttaagagatcctcccatctcagcctcctgagtagctgggattataggtgcagaccatcaagccttgctattattttttagacttttcttaatttcatccaacaaagtagttgctgtaggagctgagtgttagaaggaaagatgctgaagaaatgaaatcaagcagggtgtatactgtcatgaataggcatacagtagtttttatacttttgttctttggagtaccaatgttaggttttacaaaagtaatttgatgaggggaaggagggttgtgtatttattttactttctgatgtttgcttaaataatactgtgtacgtattcagcttgctgtaattctgtaattacgctattgcgtttggctaactcctttttggaaatgtctttttttttgtacaaggcatgtgttagtttttactaattgctctgaatgtgtatatttagatttctgaattgaaaaaaaatagcgtacaataagtagatttaaagtaattagaacactttattgatttttctgatgttttctgtatctaaaatttatcaccaccaggttgtgctaaaacagcaggaagtttttatattgtgagtgacagtacccattatttctcttaattttactaacatttactataagaatattctctcgctcttttctccactcacagccattctccctccttctcttcataacatcaagctgtcacagacaaatctgaaaatgttacaagcacagactatgttgtatgttttgaaattttagaacagtaatgttctttttaaaattgaacttctgcagagtaagaaaatgaatacatttattactttaaatttgtaaaattttccaaagtaaaaccatacaaagctagtgtcagtctctctcattgttcacaaataaaggacttttgttaattgattaaatcacttactatattcgatatgaaatatataaaacatacaaccattatctaatacatttcagaatgtttcactggttacaggagccagtaaataaagttgactctaaacaggaattttaaataaactaaacattttttcatcaccaag

SEQ ID NO: 192285 - DNA, 2035 bp, Homo sapiens
  Payload ID: 17973
  Gene Name: transcription factor AP-2 alpha (activating enhancer binding protein 2 alpha)
  Uniprot ID: P05549
  ENST ID: ENST00000319516
  CDS Start-End: 189-1490
tggcggagtgaattcctgggccagcgcgcatgcgtcggcaggtagcaacccagctctttatgaccaggtgagatgttggtgagcaggtaaaaaaggaggatttgcctaagcgattccagggagctggcccgaccgagccctccagcccatgcccggcggggaccagtcgccaggagcgcagagccgcgatgtccatacttgccaaaatgggggactggcaggaccgtcacgacggcaccagcaacgggacggcacggttgccccagctgggcactgtaggtcaatctccctacacgagcgccccgccgctgtcccacacccccaatgccgacttccagcccccatacttccccccaccctaccagcctatctacccccagtcgcaagatccttactcccacgtcaacgacccctacagcctgaaccccctgcacgcccagccgcagccgcagcacccaggctggcccggccagaggcagagccaggagtctgggctcctgcacacgcaccgggggctgcctcaccagctgtcgggcctggatcctcgcagggactacaggcggcacgaggacctcctgcacggcccacacgcgctcagctcaggactcggagacctctcgatccactccttacctcacgccatcgaggaggtcccgcatgtagaagacccgggtattaacatcccagatcaaactgtaattaagaaaggccccgtgtccctgtccaagtccaacagcaatgccgtctccgccatccctattaacaaggacaacctcttcggcggcgtggtgaaccccaacgaagtcttctgttcagttccgggtcgcctctcgctcctcagctccacctcgaagtacaaggtcacggtggcggaagtgcagcggcggctctcaccacccgagtgtctcaacgcgtcgctgctgggcggagtgctccggagggcgaagtctaaaaatggaggaagatctttaagagaaaaactggacaaaataggattaaatctgcctgcagggagacgtaaagctgccaacgttaccctgctcacatcactagtagagggagaagctgtccacctagccagggactttgggtacgtgtgcgaaaccgaatttcctgccaaagcagtagctgaatttctcaaccgacaacattccgatcccaatgagcaagtgacaagaaaaaacatgctcctggctacaaaacagatatgcaaagagttcaccgacctgctggctcaggaccgatctcccctggggaactcacggcccaaccccatcctggagcccggcatccagagctgcttgacccacttcaacctcatctcccacggcttcggcagccccgcggtgtgtgccgcggtcacggccctgcagaactatctcaccgaggccctcaaggccatggacaaaatgtacctcagcaacaaccccaacagccacacggacaacaacgccaaaagcagtgacaaagaggagaagcacagaaagtgaggctctcctcccgccccgcccctcccacgcctcaccagccccccgcgcgcccaccctccggcgggtgacagctccgggatcagcaacccttcctgctgctgctactgctgctgctgctgccgccgccgccgccgccgctgcccttgggtccccccgagtctccgggactgccctctcgactgtcagtggggcagcctctccgactctgcacccgcctcgacctccccacccgctcccacacccctgtgccctcatgtggagcctaagagaacagaacaggccgtgaagccagcagagaaaagttctgccaagtttgtgaacccttttttttttaaacaaaacaacaaatcaacaacagcaacaacaacaacaaaaattaaaaacttttttctaaaaaaaaagtgaaaataaaaaaaattatatgcgcttcatgggactgagtcaccaccttcccttacatacttcagttcagattgtagccatacttaaaaaaaaaaaaaaagccaaaagatgatgacaacatttttatcagtattgtgaataaa

SEQ ID NO: 192286 - DNA, 2576 bp, Homo sapiens
  Payload ID: 17973
  Gene Name: transcription factor AP-2 alpha (activating enhancer binding protein 2 alpha)
  Uniprot ID: P05549
  ENST ID: ENST00000379608
  CDS Start-End: 779-2074
cacgcacgcagacacattctccctctctgcgctctctccttcggtctccctctctgcctctttctctttcacttttgcatgccctgcaaccttttaaaatgttgccccttccctgtgattcgccagacgccgcgccgcggccccccgcgcgctcgcccgctccctctctcgctcgctttttgtctctcgcgctccctctccccactccgatttgctacactgagactcccgtcaatggactgcattgagagccggctccggcgcgagttgcctctccgcttcacgctcgatttccaggcattcttcccttattaagtattcgtgtaatattaatagtcatgaatatctgctattaggaggctccaggaacgctgcccagcgcggttattagaagctcaagcgaagccgccgctaagaaaagagggggagacacggattaaggaacacgcacgcacccacacactcacacatactttttcctttttccttttttggggtttttcatttttaaagaactttgaatcataaccagtcgcggcaggatagagaccgtgggttcgaccagctgaaggcgccgcgcgaatcggtggttcaagttcggatggatccgagccgggctcccgcgctccggggagcgtcggcgccgtgactggagtcctgggtggcgcggggctctcggcgccttttgtgtggggcgcgctcgggcggcggggcagccgggcgctccaggcttgcttgtttttttccaccctgactcgttaccccagactcttcgcagatgttagttcacagtttttcagccatggaccgtcacgacggcaccagcaacgggacggcacggttgccccagctgggcactgtaggtcaatctccctacacgagcgccccgccgctgtcccacacccccaatgccgacttccagcccccatacttccccccaccctaccagcctatctacccccagtcgcaagatccttactcccacgtcaacgacccctacagcctgaaccccctgcacgcccagccgcagccgcagcacccaggctggcccggccagaggcagagccaggagtctgggctcctgcacacgcaccgggggctgcctcaccagctgtcgggcctggatcctcgcagggactacaggcggcacgaggacctcctgcacggcccacacgcgctcagctcaggactcggagacctctcgatccactccttacctcacgccatcgaggaggtcccgcatgtagaagacccgggtattaacatcccagatcaaactgtaattaagaaaggccccgtgtccctgtccaagtccaacagcaatgccgtctccgccatccctattaacaaggacaacctcttcggcggcgtggtgaaccccaacgaagtcttctgttcagttccgggtcgcctctcgctcctcagctccacctcgaagtacaaggtcacggtggcggaagtgcagcggcggctctcaccacccgagtgtctcaacgcgtcgctgctgggcggagtgctccggagggcgaagtctaaaaatggaggaagatctttaagagaaaaactggacaaaataggattaaatctgcctgcagggagacgtaaagctgccaacgttaccctgctcacatcactagtagagggagaagctgtccacctagccagggactttgggtacgtgtgcgaaaccgaatttcctgccaaagcagtagctgaatttctcaaccgacaacattccgatcccaatgagcaagtgacaagaaaaaacatgctcctggctacaaaacagatatgcaaagagttcaccgacctgctggctcaggaccgatctcccctggggaactcacggcccaaccccatcctggagcccggcatccagagctgcttgacccacttcaacctcatctcccacggcttcggcagccccgcggtgtgtgccgcggtcacggccctgcagaactatctcaccgaggccctcaaggccatggacaaaatgtacctcagcaacaaccccaacagccacacggacaacaacgccaaaagcagtgacaaagaggagaagcacagaaagtgaggctctcctcccgccccgcccctcccacgcctcaccagccccccgcgcgcccaccctccggcgggtgacagctccgggatcagcaacccttcctgctgctgctactgctgctgctgctgccgccgccgccgccgccgctgcccttgggtccccccgagtctccgggactgccctctcgactgtcagtggggcagcctctccgactctgcacccgcctcgacctccccacccgctcccacacccctgtgccctcatgtggagcctaagagaacagaacaggccgtgaagccagcagagaaaagttctgccaagtttgtgaacccttttttttttaaacaaaacaacaaatcaacaacagcaacaacaacaacaaaaattaaaaacttttttctaaaaaaaaagtgaaaataaaaaaaattatatgcgcttcatgggactgagtcaccaccttcccttacatacttcagttcagattgtagccatacttaaaaaaaaaaaaaaa

SEQ ID NO: 192287 - DNA, 3317 bp, Homo sapiens
  Payload ID: 17973
  Gene Name: transcription factor AP-2 alpha (activating enhancer binding protein 2 alpha)
  ENST ID: ENST00000379613
  CDS Start-End: 258-1577
tccgagcgcacacgggagctctttcccttctctcctcctcctcgcccttctcctcgccctcctcctcctcctcgccctcctcttcctcctcctcctccttgccctcctcctctccctcctccttctcctcctccacctcctctccctcctcctcctcctcctgcgctcaccgccggcagccagcactttgcgctcacccagagagtagctccacttgggtgcgagaccgagaggggcatatccgttcacgccgatccatgaaaatgctttggaaattgacggataatatcaagtacgaggactgcgaggaccgtcacgacggcaccagcaacgggacggcacggttgccccagctgggcactgtaggtcaatctccctacacgagcgccccgccgctgtcccacacccccaatgccgacttccagcccccatacttccccccaccctaccagcctatctacccccagtcgcaagatccttactcccacgtcaacgacccctacagcctgaaccccctgcacgcccagccgcagccgcagcacccaggctggcccggccagaggcagagccaggagtctgggctcctgcacacgcaccgggggctgcctcaccagctgtcgggcctggatcctcgcagggactacaggcggcacgaggacctcctgcacggcccacacgcgctcagctcaggactcggagacctctcgatccactccttacctcacgccatcgaggaggtcccgcatgtagaagacccgggtattaacatcccagatcaaactgtaattaagaaaggccccgtgtccctgtccaagtccaacagcaatgccgtctccgccatccctattaacaaggacaacctcttcggcggcgtggtgaaccccaacgaagtcttctgttcagttccgggtcgcctctcgctcctcagctccacctcgaagtacaaggtcacggtggcggaagtgcagcggcggctctcaccacccgagtgtctcaacgcgtcgctgctgggcggagtgctccggagggcgaagtctaaaaatggaggaagatctttaagagaaaaactggacaaaataggattaaatctgcctgcagggagacgtaaagctgccaacgttaccctgctcacatcactagtagagggagaagctgtccacctagccagggactttgggtacgtgtgcgaaaccgaatttcctgccaaagcagtagctgaatttctcaaccgacaacattccgatcccaatgagcaagtgacaagaaaaaacatgctcctggctacaaaacagatatgcaaagagttcaccgacctgctggctcaggaccgatctcccctggggaactcacggcccaaccccatcctggagcccggcatccagagctgcttgacccacttcaacctcatctcccacggcttcggcagccccgcggtgtgtgccgcggtcacggccctgcagaactatctcaccgaggccctcaaggccatggacaaaatgtacctcagcaacaaccccaacagccacacggacaacaacgccaaaagcagtgacaaagaggagaagcacagaaagtgaggctctcctcccgccccgcccctcccacgcctcaccagccccccgcgcgcccaccctccggcgggtgacagctccgggatcagcaacccttcctgctgctgctactgctgctgctgctgccgccgccgccgccgccgctgcccttgggtccccccgagtctccgggactgccctctcgactgtcagtggggcagcctctccgactctgcacccgcctcgacctccccacccgctcccacacccctgtgccctcatgtggagcctaagagaacagaacaggccgtgaagccagcagagaaaagttctgccaagtttgtgaacccttttttttttaaacaaaacaacaaatcaacaacagcaacaacaacaacaaaaattaaaaacttttttctaaaaaaaaagtgaaaataaaaaaaattatatgcgcttcatgggactgagtcaccaccttcccttacatacttcagttcagattgtagccatacttaaaaaaaaaaaaaaagccaaaagatgatgacaacatttttatcagtattgtgaataaacttgaacacaaatacacgaagttccatgtcatgtcttcagttgtagaagtttttcctctttaaggtaaagcgaccaacttgaactttctctggcaacacgattcgcagttatataagggaatcagtgttcacgtctctgtatatatttatttatgtgtaatttaatgggaattgtaaatatggtgagtctgttttaagcctttttttttttatttatctgatcttgtttacctcttgtttagtgggttttgaatcttccctattagttcttcatgtggttcatggtactgatttagaaatccagtgtttgggggatttttttctctgggattcatgaatttagccctgttgtagcatgttaaaggtgacaaacagctggacaaatttttaaaaagtaaaataaaattttatctataattagtattattacatttagcttttcattgaaccgaaagaaaaaaagtgatattggaccctggaaagattttgaaacttgagtggtttgataacccttctatgtattgtagggagaaaaaaaaaagtttattttattccactgtcctcccttaaaagcatcatttgagcaataaatgaatattgtctttaaaccaagggttagggaattttcctctctctctctctctcctctctctttctgttcaaagaacttcaaacatttgggaccacctggtattctgtattttcactggccatattggaagcagttctagttgcattgtattgagttgtgctggcagtagtttccatgcctgtcaatgtatcatagtcctttgttgcccagataaataaatatttgatacgctttatgtcgatttttttttattcagtggctgtctttacccaggcgtatttttgttcttggcagtattttttattcagtatggttacagtaattgagtttaactctcccttggcaattgctccttgcaataagcagctgaacccattgtttccctcaagtataataaaaacttactttcaacttggagttcagagcagggtatcatttagatattccactgtgtctgtattcagacaaatgacacaataaaacccaatgtattcttttggataaaagattgtttgtactgctaaaggaatgacatactgtcttttccttactagaaacattaattttattattaaaaataaagttttattttatttatgttga

SEQ ID NO: 192288 - DNA, 987 bp, Homo sapiens
  Payload ID: 17973
  Gene Name: transcription factor AP-2 alpha (activating enhancer binding protein 2 alpha)
  ENST ID: ENST00000466073
  CDS Start-End: 1-987
atgctttggaaattgacggataatatcaagtacgaggactgcgaggaccgtcacgacggcaccagcaacgggacggcacggttgccccagctgggcactgtaggtcaatctccctacacgagcgccccgccgctgtcccacacccccaatgccgacttccagcccccatacttccccccaccctaccagcctatctacccccagtcgcaagatccttactcccacgtcaacgacccctacagcctgaaccccctgcacgcccagccgcagccgcagcacccaggctggcccggccagaggcagagccaggagtctgggctcctgcacacgcaccgggggctgcctcaccagctgtcgggcctggatcctcgcagggactacaggcggcacgaggacctcctgcacggcccacacgcgctcagctcaggactcggagacctctcgatccactccttacctcacgccatcgaggaggtcccgcatgtagaagacccgggtattaacatcccagatcaaactgtaattaagaaaggccccgtgtccctgtccaagtccaacagcaatgccgtctccgccatccctattaacaaggacaacctcttcggcggcgtggtgaaccccaacgaagtcttctgttcagttccgggtcgcctctcgctcctcagctccacctcgaagtacaaggtcacggtggcggaagtgcagcggcggctctcaccacccgagtgtctcaacgcgtcgctgctgggcggagtgctccggagggcgaagtctaaaaatggaggaagatctttaagagaaaaactggacaaaataggattaaatctgcctgcagggagacgtaaagctgccaacgttaccctgctcacatcactagtagaggacagatatgcaaagagttcaccgacctgctggctcaggaccgatctcccctggggaactcacggcccaaccccatcctggagcccggcatccagagctgcttga

SEQ ID NO: 192289 - DNA, 582 bp, Homo sapiens
  Payload ID: 17973
  Gene Name: transcription factor AP-2 alpha (activating enhancer binding protein 2 alpha)
  ENST ID: ENST00000461628
  CDS Start-End: 1-244
gtacaaggtcacggtggcggaagtgcagcggcggctctcaccacccgagtgtctcaacgcgtcgctgctgggcggagtgctccggagggcgaagtctaaaaatggaggaagatctttaagagaaaaactggacaaaataggattaaatctgcctgcagggagacgtaaagctgccaacgttaccctgctcacatcactagtagagggtgcagagatggcagcggttctgaggcaagagtactgaaatttgctttataatttacttgattatccaagttgtgcatttgaagaaacacatccatgtttccgtagtgcttagtgctatgggtgaaagaaatcttaaagtcaagcagagaagaaaaaaataaaacccacgcatacctcagaaaagcccaattcaactcctaacatcacccaaccaccccatcccagaagaatgaaaccatggagcacaacaggtaatatcagttttcacacctctgcatccccttttaggatgctccgggatatttttccttgtgaatttcagtgaacgattcttttctatattaaacttggtttactacctgagttgcacaggta

SEQ ID NO: 192290 - DNA, 617 bp, Homo sapiens
  Payload ID: 17973
  Gene Name: transcription factor AP-2 alpha (activating enhancer binding protein 2 alpha)
  ENST ID: ENST00000465858
  CDS Start-End: 99-617
ggggagcgcacggtgcccctgtccgaggaaagctcaagaggaggccgaggagaggaccagtgcagcgagcgggccggtcccgggcagggcgccgggtcatggaggagccgcgcagcagcgggcagccgagtcccgagtcccagactcggctgcgaagcggcggagcccgcggccagacagggccgggaagcgcctgccgcgccgagagccccacgagcgcccggacgcggtcccaagcagctcctacccgctacgcacgacccccgctgcatcccgaggaccgtcacgacggcaccagcaacgggacggcacggttgccccagctgggcactgtaggtcaatctccctacacgagcgccccgccgctgtcccacacccccaatgccgacttccagcccccatacttccccccaccctaccagcctatctacccccagtcgcaagatccttactcccacgtcaacgacccctacagcctgaaccccctgcacgcccagccgcagccgcagcacccaggctggcccggccagaggcagagccaggagtctgggctcctgcacacgcaccgggggctgcctcaccagctgtcgggcctggatcctcgcagggactacagg

SEQ ID NO: 192291 - DNA, 2071 bp, Homo sapiens
  Payload ID: 17973
  Gene Name: transcription factor AP-2 alpha (activating enhancer binding protein 2 alpha)
  Uniprot ID: P05549
  ENST ID: ENST00000482890
  CDS Start-End: 354-1667
gcagattaacacagctaaaagtcggttcccggtgatttattttgatgcacgcacgagacggtatctagacttgcaggcacacacacgtctgtttttaggctcaacttcagaagcgggtgtgcagttccataggagttctgtattcgtgtccacgttgcacccaggaaaccttagcctgaacaccaatttgaactgtcagttggccctagcttcacacaaacaggagaaaaattgtttaacccctggagctgtcaagtaacctcttcaggccagcactttgcgctcacccagagagtagctccacttgggtgcgagaccgagaggggcatatccgttcacgccgatccatgaaaatgctttggaaattgacggataatatcaagtacgaggactgcgaggaccgtcacgacggcaccagcaacgggacggcacggttgccccagctgggcactgtaggtcaatctccctacacgagcgccccgccgctgtcccacacccccaatgccgacttccagcccccatacttccccccaccctaccagcctatctacccccagtcgcaagatccttactcccacgtcaacgacccctacagcctgaaccccctgcacgcccagccgcagccgcagcacccaggctggcccggccagaggcagagccaggagtctgggctcctgcacacgcaccgggggctgcctcaccagctgtcgggcctggatcctcgcagggactacaggcggcacgaggacctcctgcacggcccacacgcgctcagctcaggactcggagacctctcgatccactccttacctcacgccatcgaggaggtcccgcatgtagaagacccgggtattaacatcccagatcaaactgtaattaagaaaggccccgtgtccctgtccaagtccaacagcaatgccgtctccgccatccctattaacaaggacaacctcttcggcggcgtggtgaaccccaacgaagtcttctgttcagttccgggtcgcctctcgctcctcagctccacctcgaagtacaaggtcacggtggcggaagtgcagcggcggctctcaccacccgagtgtctcaacgcgtcgctgctgggcggagtgctccggagggcgaagtctaaaaatggaggaagatctttaagagaaaaactggacaaaataggattaaatctgcctgcagggagacgtaaagctgccaacgttaccctgctcacatcactagtagagggagaagctgtccacctagccagggactttgggtacgtgtgcgaaaccgaatttcctgccaaagcagtagctgaatttctcaaccgacaacattccgatcccaatgagcaagtgacaagaaaaaacatgctcctggctacaaaacagatatgcaaagagttcaccgacctgctggctcaggaccgatctcccctggggaactcacggcccaaccccatcctggagcccggcatccagagctgcttgacccacttcaacctcatctcccacggcttcggcagccccgcggtgtgtgccgcggtcacggccctgcagaactatctcaccgaggccctcaaggccatggacaaaatgtacctcagcaacaaccccaacagccacacggacaacaacgccaaaagcagtgacaaagaggagaagcacagaaagtgaggctctcctcccgccccgcccctcccacgcctcaccagccccccgcgcgcccaccctccggcgggtgacagctccgggatcagcaacccttcctgctgctgctactgctgctgctgctgccgccgccgccgccgccgctgcccttgggtccccccgagtctccgggactgccctctcgactgtcagtggggcagcctctccgactctgcacccgcctcgacctccccacccgctcccacacccctgtgccctcatgtggagcctaagagaacagaacaggccgtgaagccagcagagaaaagttctgccaagtttgtgaacccttttttttttaaacaaaacaacaaatcaacaacagcaacaacaacaacaaaaattaaaaacttttttctaaaaaaaaagtg

SEQ ID NO: 192292 - DNA, 675 bp, Homo sapiens
  Payload ID: 17973
  Gene Name: transcription factor AP-2 alpha (activating enhancer binding protein 2 alpha)
  ENST ID: ENST00000475264
  CDS Start-End: 1-656
ggcccggccagaggcagagccaggagtctgggctcctgcacacgcaccgggggctgcctcaccagctgtcgggcctggatcctcgcagggactacaggcggcacgaggacctcctgcacggcccacacgcgctcagctcaggactcggagacctctcgatccactccttacctcacgccatcgaggaggtcccgcatgtagaagacccgggtattaacatcccagatcaaactgtaattaagaaaggccccgtgtccctgtccaagtccaacagcaatgccgtctccgccatccctattaacaaggacaacctcttcggcggcgtggtgaaccccaacgaagtcttctgttcagttccgggtcgcctctcgctcctcagctccacctcgaagtacaaggtcacggtggcggaagtgcagcggcggctctcaccacccgagtgtctcaacgcgtcgctgctgggcggagtgctccggagggcgaagtctaaaaatggaggaagatctttaagagaaaaactggacaaaataggattaaatctgcctgcagggagacgtaaagctgccaacgttaccctgctcacatcactagtagagggagaagtggtcatttttcctgataaatgcatccaccagatcctacagagaaggaaataaaatgcctgaaatgagaaaa

SEQ ID NO: 192293 - DNA, 1894 bp, Homo sapiens
  Payload ID: 17973
  Gene Name: transcription factor AP-2 alpha (activating enhancer binding protein 2 alpha)
  ENST ID: ENST00000488193
  CDS Start-End: 216-581
cgcccttctcctcgccctcctcctcctcctcgccctcctcttcctcctcctcctccttgccctcctcctctccctcctccttctcctcctccacctcctctccctcctcctcctcctcctgcgctcaccgccggcagccagcactttgcgctcacccagagagtagctccacttgggtgcgagaccgagaggggcatatccgttcacgccgatccatgaaaatgctttggaaattgacggataatatcaagtacgaggactgcgaggaccgtcacgacggcaccagcaacgggacggcacggttgccccagctgggcactcctgaaccccctgcacgcccagccgcagccgcagcacccaggctggcccggccagaggcagagccaggagtctgggctcctgcacacgcaccgggggctgcctcaccagctgtcgggcctggatcctcgcagggactacaggcggcacgaggacctcctgcacggcccacacgcgctcagctcaggactcggagacctctcgatccactccttacctcacgccatcgaggaggtcccgcatgtagaagacccgggtattaacatcccagatcaaactgtaattaagaaaggccccgtgtccctgtccaagtccaacagcaatgccgtctccgccatccctattaacaaggacaacctcttcggcggcgtggtgaaccccaacgaagtcttctgttcagttccgggtcgcctctcgctcctcagctccacctcgaagtacaaggtcacggtggcggaagtgcagcggcggctctcaccacccgagtgtctcaacgcgtcgctgctgggcggagtgctccggagggcgaagtctaaaaatggaggaagatctttaagagaaaaactggacaaaataggattaaatctgcctgcagggagacgtaaagctgccaacgttaccctgctcacatcactagtagagggagaagctgtccacctagccagggactttgggtacgtgtgcgaaaccgaatttcctgccaaagcagtagctgaatttctcaaccgacaacattccgatcccaatgagcaagtgacaagaaaaaacatgctcctggctacaaaacagatatgcaaagagttcaccgacctgctggctcaggaccgatctcccctggggaactcacggcccaaccccatcctggagcccggcatccagagctgcttgacccacttcaacctcatctcccacggcttcggcagccccgcggtgtgtgccgcggtcacggccctgcagaactatctcaccgaggccctcaaggccatggacaaaatgtacctcagcaacaaccccaacagccacacggacaacaacgccaaaagcagtgacaaagaggagaagcacagaaagtgaggctctcctcccgccccgcccctcccacgcctcaccagccccccgcgcgcccaccctccggcgggtgacagctccgggatcagcaacccttcctgctgctgctactgctgctgctgctgccgccgccgccgccgccgctgcccttgggtccccccgagtctccgggactgccctctcgactgtcagtggggcagcctctccgactctgcacccgcctcgacctccccacccgctcccacacccctgtgccctcatgtggagcctaagagaacagaacaggccgtgaagccagcagagaaaagttctgccaagtttgtgaacccttttttttttaaacaaaacaacaaatcaacaacagcaacaacaacaacaaaaattaaaaacttttttctaaaaaaaaagtgaaaataaaaaaaattatatgcgcttcatgggactgagtcaccaccttcccttacatacttcagttcagattgtagccatacttaaaaaaaaaaaaaaa

SEQ ID NO: 192294 - DNA, 417 bp, Homo sapiens
  Payload ID: 17973
  Gene Name: transcription factor AP-2 alpha (activating enhancer binding protein 2 alpha)
  ENST ID: ENST00000498450
  CDS Start-End: 10-417
cgccgatccatgaaaatgctttggaaattgacggataatatcaagtacgaggactgcgagcatgtagaagacccgggtattaacatcccagatcaaactgtaattaagaaaggccccgtgtccctgtccaagtccaacagcaatgccgtctccgccatccctattaacaaggacaacctcttcggcggcgtggtgaaccccaacgaagtcttctgttcagttccgggtcgcctctcgctcctcagctccacctcgaagtacaaggtcacggtggcggaagtgcagcggcggctctcaccacccgagtgtctcaacgcgtcgctgctgggcggagtgctccggagggcgaagtctaaaaatggaggaagatctttaagagaaaaactggacaaaataggattaaatctgcctgcaggg

SEQ ID NO: 192295 - DNA, 2739 bp, Homo sapiens
  Payload ID: 17973
  Gene Name: transcription factor AP-2 alpha (activating enhancer binding protein 2 alpha)
  ENST ID: ENST00000489805
  CDS Start-End: 580-921
ccccactccgatttgctacactgagactcccgtcaatggactgcattgagagccggctccggcgcgagttgcctctccgcttcacgctcgatttccaggcattcttcccttattaagtattcgtgtaatattaatagtcatgaatatctgctattaggaggctccaggaacgctgcccagcgcggttattagaagctcaagcgaagccgccgctaagaaaagagggggagacacggattaaggaacacgcacgcacccacacactcacacatactttttcctttttccttttttggggtttttcatttttaaagaactttgaatcataaccagtcgcggcaggatagagaccgtgggttcgaccagctgaaggcgccgcgcgaatcggtggttcaagttcggatggatccgagccgggctcccgcgctccggggagcgtcggcgccgtgactggagtcctgggtggcgcggggctctcggcgccttttgtgtggggcgcgctcgggcggcggggcagccgggcgctccaggcttgcttgtttttttccaccctgactcgttaccccagactcttcgcagatgttagttcacagtttttcagccatggaccgtcacgacggcaccagcaacgggacggcacggttgccccagctgggcactcctgaaccccctgcacgcccagccgcagccgcagcacccaggctggcccggccagaggcagagccaggagtctgggctcctgcacacgcaccgggggctgcctcaccagctgtcgggcctggatcctcgcagggactacaggcggcacgaggacctcctgcacggcccacacgcgctcagctcaggactcggagacctctcgatccactccttacctcacgccatcgaggaggtcccgcatgtagaagacccgggtattaacatcccagatcaaactgtaattaagaaaggccccgtgtccctgtccaagtccaacagcaatgccgtctccgccatccctattaacaaggacaacctcttcggcggcgtggtgaaccccaacgaagtcttctgttcagttccgggtcgcctctcgctcctcagctccacctcgaagtacaaggtcacggtggcggaagtgcagcggcggctctcaccacccgagtgtctcaacgcgtcgctgctgggcggagtgctccggagggcgaagtctaaaaatggaggaagatctttaagagaaaaactggacaaaataggattaaatctgcctgcagggagacgtaaagctgccaacgttaccctgctcacatcactagtagagggagaagctgtccacctagccagggactttgggtacgtgtgcgaaaccgaatttcctgccaaagcagtagctgaatttctcaaccgacaacattccgatcccaatgagcaagtgacaagaaaaaacatgctcctggctacaaaacagatatgcaaagagttcaccgacctgctggctcaggaccgatctcccctggggaactcacggcccaaccccatcctggagcccggcatccagagctgcttgacccacttcaacctcatctcccacggcttcggcagccccgcggtgtgtgccgcggtcacggccctgcagaactatctcaccgaggccctcaaggccatggacaaaatgtacctcagcaacaaccccaacagccacacggacaacaacgccaaaagcagtgacaaagaggagaagcacagaaagtgaggctctcctcccgccccgcccctcccacgcctcaccagccccccgcgcgcccaccctccggcgggtgacagctccgggatcagcaacccttcctgctgctgctactgctgctgctgctgccgccgccgccgccgccgctgcccttgggtccccccgagtctccgggactgccctctcgactgtcagtggggcagcctctccgactctgcacccgcctcgacctccccacccgctcccacacccctgtgccctcatgtggagcctaagagaacagaacaggccgtgaagccagcagagaaaagttctgccaagtttgtgaacccttttttttttaaacaaaacaacaaatcaacaacagcaacaacaacaacaaaaattaaaaacttttttctaaaaaaaaagtgaaaataaaaaaaattatatgcgcttcatgggactgagtcaccaccttcccttacatacttcagttcagattgtagccatacttaaaaaaaaaaaaaaagccaaaagatgatgacaacatttttatcagtattgtgaataaacttgaacacaaatacacgaagttccatgtcatgtcttcagttgtagaagtttttcctctttaaggtaaagcgaccaacttgaactttctctggcaacacgattcgcagttatataagggaatcagtgttcacgtctctgtatatatttatttatgtgtaatttaatgggaattgtaaatatggtgagtctgttttaagcctttttttttttatttatctgatcttgtttacctcttgtttagtgggttttgaatcttccctattagttcttcatgtggttcatggtactgatttagaaatccagtgtttgggggatttttttctctgggattcatgaatttagccctgttgtagcatgttaaaggtgacaaacagctggacaaatttttaaaaagtaaaataaaattttatctataattagtattattacatttagcttttcattgaaccgaaagaaaaaaa

SEQ ID NO: 192296 - DNA, 797 bp, Homo sapiens
  Payload ID: 17974
  Gene Name: transcription factor AP-2 beta (activating enhancer binding protein 2 beta)
  ENST ID: ENST00000344788
  CDS Start-End: 203-797
tttttctctttgctgaggcttacttgtccagcctattgtttgagacaacagatataagttgcgatgggagaggagcgtcggatttggtgtgtatcccccatttccaattatagatggatcattacagacagcggagtcctgagaagccagacatctgctcctcacatgaatgcactcacctcctagagaccaggctgccatcatgctctggaagcttgtggagaatgtcaagtacgaagatatctatgagatgttagtccacacctattcatccatggaccggcacgatggtgtcccgagccacagctcgcggctctcccagctgggctcggtgtcccaaggaccctactcgagcgccccgccgctgtcccacaccccgtcgtcggacttccagccgccctacttcccacccccctaccagccgctcccctaccaccagagccaggacccctactcccacgtcaacgacccctactccctgaacccactgcaccagccccagcaacatccctgggggcaacggcagcggcaagaagtgggttcggaagccggctctctcctgccccagcctcgggccgccttgccccagctctcgggccttgacccccggagggactaccactcggtccgccggccggacgtgctgctgcattcggcgcaccacggcctggacgcgggcatgggtgacagcctctcgctgcacggcctcggccatcccggaatggaagacgtccagtcagttgaagatgccaataacagcggcatgaatctattggaccagtctgtcattaaaaaag

SEQ ID NO: 192297 - DNA, 5773 bp, Homo sapiens
  Payload ID: 17974
  Gene Name: transcription factor AP-2 beta (activating enhancer binding protein 2 beta)
  Uniprot ID: Q92481
  ENST ID: ENST00000393655
  CDS Start-End: 170-1552
tttttctctttgctgaggcttacttgtccagcctattgtttgagacaacagatataagttgcgatgggagaggagcgtcggatttggtgtgtatcccccatttccaattatagatggatcattacagacagcggagtcctgagaagccagacatctgctcctcacatgaatgcactcacctcctagagaccaggctgccatcatgctctggaagcttgtggagaatgtcaagtacgaagatatctatgaggaccggcacgatggtgtcccgagccacagctcgcggctctcccagctgggctcggtgtcccaaggaccctactcgagcgccccgccgctgtcccacaccccgtcgtcggacttccagccgccctacttcccacccccctaccagccgctcccctaccaccagagccaggacccctactcccacgtcaacgacccctactccctgaacccactgcaccagccccagcaacatccctgggggcaacggcagcggcaagaagtgggttcggaagccggctctctcctgccccagcctcgggccgccttgccccagctctcgggccttgacccccggagggactaccactcggtccgccggccggacgtgctgctgcattcggcgcaccacggcctggacgcgggcatgggtgacagcctctcgctgcacggcctcggccatcccggaatggaagacgtccagtcagttgaagatgccaataacagcggcatgaatctattggaccagtctgtcattaaaaaagttccagttcctcccaaatcggtgacttctctaatgatgaataaagacggcttcctgggaggcatgtctgtcaacaccggcgaggtgttttgctccgtcccaggccgtttgtctctgctcagttcaacttcgaagtacaaagtaactgtgggagaagttcagagacggctgtcgccccctgaatgcctcaatgcatctctcctcggcggagtcctcagaagagccaaatcgaaaaatggggggagatctttgcgagaaaggctagaaaaaatcggtttgaatttacccgcgggcaggcgcaaagcagcaaatgtcacgttactcacctccctggtggaaggagaagctgttcacttagctagggattttgggtacatttgcgaaacggagtttcccgccaaagccgtctctgagtatttgaaccggcagcacacagacccgagtgacctgcactcccgaaagaatatgctgttggccaccaagcaactttgtaaagaatttacggatctactggcgcaggaccggacaccgatagggaacagccgacccagccccatcctggagccggggatccagagctgcctcacgcacttcagcctcatcacgcacggcttcggcgccccggccatttgcgccgcgctcacggccctgcagaactatctcaccgaggcgctcaaaggcatggacaagatgttcttgaacaacaccaccactaacaggcacacgtctggggaaggcccaggtagtaaaactggcgacaaggaggagaaacacaggaaatgaaaaatttttaaaaaaagaaggaaaaatgttttaaatacaaaaggaaaaacagacaaaaatttaattttagctttaaaatattggattggctttggaagaattatattaggtagaatacacatacaatcaaaattttaaaaaaaaaagctaaataacttaaaaaaaaactgaggcgtacaacggagcaacaatatcggttctcagtgtctatttcaagatacatttggagacaaccgtccggattttccacttcggttctttcgagtttagtaatactgataataaaagaaaaccatgatttccccttccctttggaaaataaacataagactaaacatgagaaaaacgctaacttattggaagaaaatcggagaaacgttggtgtcaatgctttgagagctggttgactgagacgcacgaactttttaattttaaatatatttttaggaaactctcgcagtccccgccctccatctcacctcacccgtctcccaaccacccttttccatgttaccctcccttcctcacattgttacgggaatcttctgggatgaaaatgagtgtggttggcccttttgcgttgtttcagtcctctcggtacctccccgcccagccctgcgatcttaactcaccgggcccggctccccggccgcttgcataattagggagggcgagggcggggcgggaggcctgtggagaccaggcggaggctgcaatttttggtgccggccggcagagcaggttctggcggctgaggaaaatccggaccaataagttgattcaaacatcatcagttcctttcagaaatgttactagctcccagccttgccagcatctgcatagagagaatctcacatttattatatttgtgtcatctactaattttatgaactatagtaaaaaaaaaaaaacacacacacacacaatatgaatacgttgattagtatgtaattccttcggaggggtatgtaccatttcattctcttctgttttccaaagctttgcccgcatggtttatgagcttcttcaaagaggacttgggcttcctacacaatctataaggtacagagaaaaaaaaatccgatccctttttaatcaaagcctgtgtgtcagaattctgcaggtgcacttctttaaagaagctcaaagggaataatttagaaagtggccaatatgatggaagcagctttgaatctacatgctaacattcctcaacactccaattccggtggaggtggcaggggagggggtctgcaaaatgaattttaagggaaaagagtaaggattcttagagccctatattctaatagtattgccctgcatttaaaattgatttgatttccctgggttctttggtgattgctgtttaagcaaggaaagaagcagctttacgagtggacgtggggaggagggcggcacaagcacccacatttctgtaacaattgctttcttacaagatgctttatgaatgaggcatttttccctcccagacgtgcacttgttttggcatataatggcaaaataatgcaaagtgaagggagatgtatttcagctttgatttttaccgtctggatacatcgggactattcccagtggataaagtttcatgcatttaatatttctcacttctggcagcccagctcctttcttgggctccatcttagcattatcatgaaataagatctggaatccattgtctgcacctccgcaaaagcagtgagaaattatcccgggataagggtgaatgagagaggtctctaaatatagtgttgatacactcacctatttaacaaagtagacgagatctttgcaataccccttaaagataacgacatagatgttgttctgcaggatttatagttaggacccactcaattctccaggactcccggttttgcccccctcccgctttgccttggtgggggtggggattgggggagtggggattgcgttggggttttaggaatctgctgagagctttgcccatttttattaaaagaggaaagggaagttaggaagctcgtctcaggtcaccaaaagggcccaagcaactgttagggccacactgcagcccatctccaacccctagcttcgtttagcacttctgatcttcatggcccagccctagaactgttgagaggaatgcaatggccaagagctagacgttacggagagtgtagtcactctcttttcccagctcagaggcctgcgccttcgtccgagagctcggccgatcgcattagatgtgttctgattgcacaaggccaggagagaccacactgaaaacgatcgtctcctttccttgcagggcaacgcgccccacgcgtgtgacgtgcgagagacgcgatggacgcgccttgctcttactgtgcaggtcctgagagcgtgtgggccacaggcgcccagtcgtgttgaggacatagaatcagccgctggaggggctgccgactgcgcgggcccttcccgctctcggtctcaccctaagggctaaggcgaccgagaaagccccattctccagtaggtaatggggcggcgcccggtgggctgcaggtggggagggctcccagcgccgccagcggccacccggggcgccggctcctggagggagagtggcctagaaatatccaaggaatccgaagcttcccctcctccacctctgccagtacggaaacaccccaccgtcacaatcctaaagcggggagatgggatgggaattgtcttacttggcaaggcagggtaccttcattgccagacgccctcatttgtgtgttcctccttgctccagcgagatagaaccttttgcgcccccaaccccgtttcgtggagtgagcccactaccccttctccctccctcacttctcctttcatgtaggacccccgcccccttgctttccttagccaggcccgctacatttatctgataattgagttattaaaagatttggtttccttgggcctataaatcaataaacagtaggattaacgcaatagtttgccttttaagtcaagggagacgtttaaggcaagcccctttgagctttgttttcaaaccaaacaggtgagttgcagctctccccccggcccctgcactcttcagacatttggtccctgcccactcctaaacgctcagtcccaaaacaaaatagcgaaagacaggaggagtcaggatgtggcagtgctgccttcacactttccacttcgcaagttcttttaaaggttccaaagatctccagaccattctctgccaaaccctgccgcctcctgcacgtattgcaggtctctggggagcaagaaatgtcctgtttgggtgaggattccgtcacctaaaaagatctttaacttctcccccaaagtgggaaggtaactttctcccccttttccccaccaccttcactcctacacccccaattaccttgcattttctttccttccttctggcctccacacccatagctttcctccatccccacttaaagaaccgaagaggcttttaaagacctggctgctttgttttccttggccaaggaagccactttctctcaagcaattatttcatatcctacgaaaactttggtcgaatggaaaactcgaaacctcgagcttatctacacactgttcctctgctacaatgctttcctagttaagagtgtttatagagaatttgtcatcacatctgatatcctgtacttgtaatacattatgtggaaaggaaataaccttaaaccgtctgatgttgcctcaagagcccaaacggcgtttccccacctttgacgatgtatgtgaaattactggcttaaaaaaaaaagtatcaatttttttttaacggaatgaacactatccttctttaaatgccaaaatcgactccacctttgagttggtctctaattctctaacattgtttttgccacacaatcaagaaatatcaatctattgactcttcacgagaagagctctggagggtattcatgttaagtttgtatatatttatttatgcttaatttaatgggaatgtgtaaatatggcgagcaagtagtttgggattatttatctgtgaatctatacctctgtgaatgggtggttaaaaaacctcttgaccctagatagaatcctatctgaatttttctgttctttataaacaagctgttatggtaatgggtagaaattggtttattgtccagtgttaatctgatttacataaataaaaagattgttgtgttttca

SEQ ID NO: 192298 - DNA, 1711 bp, Homo sapiens
  Payload ID: 17975
  Gene Name: transcription factor AP-2 delta (activating enhancer binding protein 2 delta)
  Uniprot ID: Q7Z6R9
  ENST ID: ENST00000008391
  CDS Start-End: 229-1587
agggagctgcttttgtgcagagggaaaattttgttcctacaggtttttaagtgggtacgaggcaaggagctatctgatccgggcaaaaccattacaatttagatatctacctatagaacattttttttttcctttaaaaattggaaaatacaagaagtttggatttttttttcccgattctttttttggagggggaaattgcatcgtaagctttcggagaaacccaacatgtcaactacctttccgggactagtccacgatgccgagatacgtcacgacggatcaaacagctaccgtttgatgcagcttggctgtctggagtcagtagccaattccactgtcgcctattcctcctcctctcctttaacttactccaccaccggcaccgagtttgcgtccccctacttctccactaaccaccagtacaccccgctccaccaccagtccttccattacgagtttcagcacagccacccggccgtcacccccgacgcctactctctgaactctctccaccactcgcaacagtactaccagcagatccaccacggggagcccaccgactttattaacctgcacaatgcgcgggcgctcaagtcgtcctgcctggacgagcagaggcgggagctgggctgcctcgatgcctaccgccgccatgacctgtccctcatgagccatggctctcagtatggaatgcacccagatcaaagactcctgccagggcccagcctggggctggccgccgcgggagcagacgacttgcagggctctgtggaggcccagtgtgggcttgttctcaatggccaaggtggagtgataagaagaggtggcacctgtgtggtcaaccccacagacttattttgctctgtccctggccgtttgtcccttcttagttctacttccaaatacaaggtgaccattgctgaggtaaagaggcgcctctccccacctgagtgcctcaatgcttcactcttgggaggcattttgagaagagcaaaatcaaagaatgggggccgctgcctgagagagaaattggataggcttggcttaaacttaccagcaggaagacggaaagcagctaatgtcaccctccttacttccttggttgaaggggaggctttgcacttggctcgggattttggctacacttgtgaaacagagtttccagccaaagcagtaggagaacatcttgccagacaacatatggaacagaaagaacagacagcaagaaaaaagatgatcctggcgaccaaacaaatctgtaaagaattccaagacctcttgagccaagatagatcaccactgggatcctccagacccactccaattctagaccttgacatccagagacatttaacacatttcagtttgatcactcatggctttgggactccggcaatatgtgcagctctaagcactttccaaacagttctcagtgaaatgctgaactacttggaaaaacacactactcacaagaacggcggagcggcggattctggccaaggacatgccaactcggagaaagctcccctgcggaaaacttcagaggctgccgtgaaagagggcaaaacagaaaagacagactagctacatcaaacagaatctatttccagagagtcttgctgctgatattttttctaatatatatatcattgagggtgactaatcttcagtggaccaaatctctacccttccccaaccctccataaaa

SEQ ID NO: 192299 - DNA, 2189 bp, Homo sapiens
  Payload ID: 17976
  Gene Name: transcription factor AP-2 epsilon (activating enhancer binding protein 2 epsilon)
  Uniprot ID: Q6VUC0
  ENST ID: ENST00000373235
  CDS Start-End: 209-1537
gtgcccgtccgtcctgcctccatggacccgcccgggaacggccaccgctgaggaccccacgcccactaggatcccggctgggtcgcacccagctaccgcaccgtgacctccgcgggctgtgccggctcccggcgcctctgcccgcagcgctcgccgtcgggctagggctccgccgccgccacgcctcgcgcccggcactcaccgccccatgctggtgcacacctactccgccatggagcgccccgacgggctgggagcagctgccggcggggcccgcctgtcgtctctgccccaggcggcctacgggccggcgcccccgctctgccacacgccggccgccacagctgccgccgaattccagccgccctacttcccgccgccctacccgcagccaccgctgccctacggtcaggcgcccgacgccgccgcagcctttccccacctggcaggggacccatatggcggcctggcgcccctggcgcagccgcagcctcctcaggccgcctgggccgcgccccgcgcagccgcccgcgcccacgaggagcctcccggcctgctggcaccgcccgcccgcgccctgggccttgacccgcgccgtgactatgccactgccgtgccccggctcctgcacggcctggccgacggcgcgcacggcctggcagacgcacctctcggccttccggggctggcggcggcccccggtctggaggacctgcaggcaatggacgagccgggaatgagcctcctagaccagtccgtgatcaagaaagtgcccatcccctccaaagccagcagcctctcagccctctccttggccaaagacagcctggtgggcggcatcacaaatcctggtgaggtcttctgctccgtgcccggccggctttcactgctcagctcaacgtccaagtacaaggtgacggtgggggaggtgcagcggcgactctcgcctcccgagtgcctcaacgcctccctcctggggggtgtcctccgcagggccaagtccaaaaatgggggccggtgtttgcgggaacggttagagaagattgggctcaacctgccagctggccgtcgcaaggccgccaatgtgacgctgctgacttcgctagtggaaggagaggccgtgcacctggcccgagacttcggttacgtctgtgagacggagttcccagccaaggcagctgccgagtacctgtgccgacagcacgctgacccgggggagctgcacagccgcaagagcatgctgctggctgccaagcagatctgcaaggagtttgcagacttgatggctcaggaccgctcaccgctgggcaacagccgcccagcactcatcctggagcccggagtacagagctgcttgacacactttagcctcatcacccatggcttcggtgggcctgccatctgtgctgccctcactgccttccagaactatttgctggagtcactcaaggggctggacaagatgtttctaagcagtgtgggcagtgggcatggtgaaaccaaggcttcggagaaggatgccaagcatcggaaataactgcttctcccaccccatccctaaggggctcccaggccctgaaatagggacttagctcttgggggtgggcctggaaggactgaaaggtgggattagagtcaggccagaaagagaacattcatccagagatcccagagttggggatctggcttggagtaagggagggtggcctctctgtggtggtgtgttggtaagttaagggcccaggtatttgtctcatgtgtgcaattttctgacctttgatggttgagaagggtttggacagaaaattgacatgaaaagatctggctcatggggcagagccctttccattagcgtggctgggtggccgtgggtgcttctagaggccaaagcctttgtgtttttcactggtggcaggaggaaaattgataaatcagaggtgctactgaggagttggtgcccctcattccagaatctcctacccccagaaaaggggtgctggaaggaggccccagtggactctttgtacccttcctactctcagagagaagtgggcaggaggggtcctcaaggaacaaagaagataaagcacaaatcgcagaacttgaatccaggctgctgctcatcatagtcctgttgctgtctgtcctatttatttatgtatgttgtaattaaatttgaaattttaaaa

SEQ ID NO: 192300 - DNA, 2866 bp, Homo sapiens
  Payload ID: 17977
  Gene Name: transcription factor AP-2 gamma (activating enhancer binding protein 2 gamma)
  Uniprot ID: Q92754
  ENST ID: ENST00000201031
  CDS Start-End: 244-1596
cgccaggacacactgttcgggcgcggctttccccgtccgcggagcggtcttgacactcgcggcggcagcatctacgctcgcagagccgccgatgcgtgtccagtgacccggacagcaaggcccgcgcgcggcgggggcggcggcagacgcctggtcaccgtgaccccgattttggatttaccgcttgggggctggggggatcctggatttaactggcgactgttttgggggacgccggacgccatgttgtggaaaataaccgataatgtcaagtacgaagaggactgcgaggatcgccacgacgggagcagcaatgggaatccgcgggtcccccacctctcctccgccgggcagcacctctacagccccgcgccacccctctcccacactggagtcgccgaatatcagccgccaccctactttccccctccctaccagcagctggcctactcccagtcggccgacccctactcgcatctgggggaagcgtacgccgccgccatcaaccccctgcaccagccggcgcccacaggcagccagcagcaggcctggcccggccgccagagccaggagggagcggggctgccctcgcaccacgggcgcccggccggcctactgccccacctctccgggctggaggcgggcgcggtgagcgcccgcagggatgcctaccgccgctccgacctgctgctgccccacgcacacgccctggatgccgcgggcctggccgagaacctggggctccacgacatgcctcaccagatggacgaggtgcagaatgtcgacgaccagcacctgttgctgcacgatcagacagtcattcgcaaaggtcccatttccatgaccaagaaccctctgaacctcccctgtcagaaggagctggtgggggccgtaatgaaccccactgaggtcttctgctcagtccctggaagattgtcgctcctcagctctacgtctaaatacaaagtgacagtggctgaagtacagaggcgactgtccccacctgaatgcttaaatgcctcgttactgggaggtgttctcagaagagccaaatcgaaaaatggaggccggtccttgcgggagaagttggacaagattgggttgaatcttccggccgggaggcggaaagccgctcatgtgactctcctgacatccttagtagaaggtgaagctgttcatttggctagggactttgcctatgtctgtgaagccgaatttcctagtaaaccagtggcagaatatttaaccagacctcatcttggaggacgaaatgagatggcagctaggaagaacatgctattggcggcccagcaactgtgtaaagaattcacagaacttctcagccaagaccggacaccccatgggaccagcaggctcgccccagtcttggagacgaacatacagaactgcttgtctcatttcagcctgattacccacgggtttggcagccaggccatctgtgccgcggtgtctgccctgcagaactacatcaaagaagccctgattgtcatagacaaatcctacatgaaccctggagaccagagtccagctgattctaacaaaaccctggagaaaatggagaaacacaggaaataaaattggaacgaagaaaggttaggagagtagggaaggaacaggactgcaaaaatccttctccaccgcacagactgggaacccctcctggcctgggggaagagtttgttacctaccttactatttaaagagccttcactggttctgcatcacccgcccctggacttcttagttgtttctctagcgctgagctatctcctaactttggacctattatcagaaggtgacaagtactggctctttattcattaagctttttttttttgaaccccattctttccttctctgaaagtggtgctataagttttagaatcttttaaatacattccctgggccaacagacccacacacttagccattgaaatgtcaaattgatgtgccctagatcaacagatcaacaataccttttttttcagtgttaaggtaatggttggtttttgtgtccgctaaatatttaccttgaaaaaaagaaaagtgtgtatctagcttcttcagagatcaagtcctctggtaggaggcaaaggttctatctgcttagcaactagttaataagtggtatctgacacactctaaaccccgtgttcaaacgggggccttctggttttaggaaacttgtagaaacgaagcctgctgattgatttttttctcctttttttttttttttttttttaactttgaaagttaactcttcaaatgggagactctttgaaatgacatgttcctttaaggtactgaagctttatttgcatatttatttcagatgtttcgagtaaacttgaaaagggtaggcacgaagcaatttgttgctgcttgtcacccccaagtccccgtggaggttctgtattttaagaaacagtgcgttgagtgtacagattttatttatgcgtaatttaatggggtctgtaaatactggtgcacttcttacgacttttttgagacatgggatccaattttaatattaacttttaatggtgatggggtaatctataacacatcataaggttttattcatatatatacagggtattaagaattaagaggatgctgggctctgttcttggcttggaagattctatttaattgaaactctctgttcagaaagcaataactttgtctcgttcctgttgggctgaaccctaaggtgagtgtgcagtacagtgtgtgtgggtgaaatggagatttggaattgaactctctgcctgtaaatgttccccaaataattgttgtgtgtatgatacgtgtataataaaagtattcttgttagaatctgaaa

SEQ ID NO: 192301 - DNA, 482 bp, Homo sapiens
  Payload ID: 17977
  Gene Name: transcription factor AP-2 gamma (activating enhancer binding protein 2 gamma)
  ENST ID: ENST00000416606
  CDS Start-End: 128-482
cgagctcaggggcgccgggagcgcggagctcgggctacggactcgcgggagttcactgcgcctccgggccctggagggctgcccctgcccgcaggcccgggcgcttccgccaggaggcgacagcgccatgttcctccaggatcgccacgacgggagcagcaatgggaatccgcgggtcccccacctctcctccgccgggcagcacctctacagccccgcgccacccctctcccacactggagtcgccgaatatcagccgccaccctactttccccctccctaccagcagctggcctactcccagtcggccgacccctactcgcatctgggggaagcgtacgccgccgccatcaaccccctgcaccagccggcgcccacaggcagccagcagcaggcctggcccggccgccagagccaggagggagcggggctgccctcgcaccacgggcgcccggccggcctactgccccacctctccgggc

SEQ ID NO: 192302 - DNA, 2215 bp, Homo sapiens
  Payload ID: 17978
  Gene Name: transcription factor AP-4 (activating enhancer binding protein 4)
  Uniprot ID: Q01664
  ENST ID: ENST00000204517
  CDS Start-End: 330-1346
aaggaggccgggggagtgctgagttttcaccagctgtttcccgccttgaaacagacatctgatcagctgcaaacacacacacacacacacacacacacacacacacacacacacacacacatacacacgcccggggaggcaggccggagagacctccctcccgcccctcccgcccgcctccctcccctcgccgccgccgccgccgccagcatctgggaccggccgattctgcacctccgtccggcgctgccctttgattcggatttccatcttgcattctccggctgatcgcgggacctggctcgtgcagaggaggggggccgatcgctatggagtatttcatggtgcccactcagaaggtgccctctttgcaacatttcaggaaaacagagaaagaagtgataggagggctctgtagccttgccaacattccactaacccccgagactcagcgggaccaggagcggcggattcggcgggagatcgccaacagcaacgagcggagacgcatgcagagcatcaacgcgggattccagtccctcaagaccctcatcccccacacagacggagagaagctcagcaaggcagccattctccagcagacagccgagtacatcttctccctggagcaggagaagaccaggctcttgcagcagaacacacagctcaagcgcttcatccaggagctgagcggctcgtcccccaagcgacggcgggcagaggacaaggacgaaggcataggctccccggacatctgggaggacgagaaggcggaggacctgcggcgggagatgattgagctgcggcagcagctggacaaggagcgctcggtgcgcatgatgctggaggagcaggtgcgctcgctggaggcccacatgtacccggaaaagctcaaggtgattgcgcagcaggtgcagctgcagcagcagcaggaacaggtgaggctgctgcaccaggagaagctggagcgggaacagcagcagctgcggacccagcttctgccccctccggcccccacccaccaccccacggtgatcgtgccagcaccgcctcctcctccctcccaccacatcaatgtcgtcaccatgggcccctcctcggtcatcaactctgtttccacatcccggcaaaatctggacaccatcgtgcaggcaatccagcacatcgagggcacccaggaaaagcaggagctggaggaggagcagcggcgagctgtcatcgtgaagcctgtccgcagctgcccggaggcccccacctctgacaccgcctccgactccgaggcctcagacagtgacgccatggaccagagccgggaggagccgtcgggggacggggagcttccctgactacccccccagccctcctctcccttctgggggctggagggagccggggcagccacagggagagacatgggcgaatgagtgagaaatttttacaaaattacgatgtcatttgggtctcttttatgacctctttttcaatactgtaaatcgacctttgaacgaagccactcaacccgaggtcccggggctggggtgtcgcagagcgtgtgggagcatcggcaccccagggcggggcctcggccccgggggctggaggaagctgacacggagatgcctggcctctctctgccaaaaagcattttttcctttaaatatgttttttaagaacagggaaaattaaacaaaaccccaggttatttcttccctgcccagagccagcctgggattgtcagccttcaatcccctttccttcctctttttgggttttcttctttctcctttaagcacttacatggttgggggtaagactaggctggggcattctgggggcccggaggtctccgttgcttcttggttggggtttgctgctgctgtgcccccctcccccttccccatctcggcactagaattcgccactctcccaccccccagcccccacctctgcctccaggtctcatcttccaccccaaaaatgtctgtctctctctttttgttttgtttgttgttggttttttatttctttttggtttgctttctgtttttgttttgtttttcttttttttctttcttttttttttttttttacaattttgaggtcttcgtgttcaaggagaagctattatattttgttaagaaagtggggagaaaaaaaccaagaggccaccgtgcctttgtaaagaaacaaaataaagtttgtactttgtttttta

SEQ ID NO: 192303 - DNA, 507 bp, Homo sapiens
  Payload ID: 17978
  Gene Name: transcription factor AP-4 (activating enhancer binding protein 4)
  ENST ID: ENST00000572393
  CDS Start-End: 163-507
tggccactgctcctgcaagggtcagcagcgctccccacagcatggtgggagcctcgcttctccggcgcaggccttgccaacattccactaacccccgagactcagcgggaccaggagcggcggattcggcgggagatcgccaacagcaacgagcggagacgcatgcagagcatcaacgcgggattccagtccctcaagaccctcatcccccacacagacggagagaagctcagcaaggcagccattctccagcagacagccgagtacatcttctccctggagcaggagaagaccaggctcttgcagcagaacacacagctcaagcgcttcatccaggagctgagcggctcgtcccccaagcgacggcgggcagaggacaaggacgaaggcataggctccccggacatctgggaggacgagaaggcggaggacctgcggcgggagatgattgagctgcggcagcagctggacaaggagcgctcggtgcgcatgatgctggaggagcag

SEQ ID NO: 192304 - DNA, 785 bp, Homo sapiens
  Payload ID: 17978
  Gene Name: transcription factor AP-4 (activating enhancer binding protein 4)
  ENST ID: ENST00000573476
  CDS Start-End: 86-589
cgctgccctttgattcggatttccatcttgcattctccggctgatcgcgggacctggctcgtgcagaggaggggggccgatcgctatggagtatttcatggtgcccactcagaaggtgccctctttgcaacatttcaggaaaacagagaaagaagtgataggagggctctgtagacggaggaaaccgaggcttggtgttgcacagctaccttgccaacattccactaacccccgagactcagcgggaccaggagcggcggattcggcgggagatcgccaacagcaacgagcggagacgcatgcagagcatcaacgcgggattccagtccctcaagaccctcatcccccacacagacggagagaagctcagcaaggcagccattctccagcagacagccgagtacatcttctccctggagcaggagaagaccaggctcttgcagcagaacacacagctcaagcgcttcatccaggagctgagcggctcgtcccccaagcgacggcgggcagaggacaaggacgaaggcataggctccccggacatctgggaggacgagaaggcggaggacctgcggcgggagatgattgagctgcggcagcagctggacaaggagcgctcggtgcgcatgatgctggaggagcaggtgcgctcgctggaggcccacatgtacccggaaaagctcaaggtgattgcgcagcaggtgcagctgcagcagcagcaggaacaggtgaggctgctgcaccaggagaagctggagcgggaacagcagcagctgcggacccag

SEQ ID NO: 192305 - DNA, 595 bp, Homo sapiens
  Payload ID: 17978
  Gene Name: transcription factor AP-4 (activating enhancer binding protein 4)
  ENST ID: ENST00000574639
  CDS Start-End: 149-283
ctcccctcgccgccgccgccgccgccagcatctgggaccggccgattctgcacctccgtccggcgctgccctttgattcggatttccatcttgcattctccggctgatcgcgggacctggctcgtgcagaggaggggggccgatcgctatggagtatttcatggtgcccactcagaaggtgccctctttgcaacatttcaggaaaacagagaaagaagtgataggagggctctgtaggtgcgctcgctggaggcccacatgtacccggaaaagctcaaggtgattgcgcagcaggtgcagctgcagcagcagcaggaacaggtgaggctgctgcaccaggagaagctggagcgggaacagcagcagctgcggacccagcttctgccccctccggcccccacccaccaccccacggtgatcgtgccagcaccgcctcctcctccctcccaccacatcaatgtcgtcaccatgggcccctcctcggtcatcaactctgtttccacatcccggcaaaatctggacaccatcgtgcaggcaatccagcacatcgagggcacccaggaaaagcaggagctggaggaggagcagcggcgag

SEQ ID NO: 192306 - DNA, 1424 bp, Homo sapiens
  Payload ID: 17979
  Gene Name: transcription factor B1, mitochondrial
  Uniprot ID: Q8WVM0
  ENST ID: ENST00000367166
  CDS Start-End: 57-1097
ggagcggcggtgaaggtcctgggtgaggtagggttggatggtgcttgccgcgtatcatggctgcctccggaaaactcagcacttgccgtctccctccgttgcccacgattcgagaaatcattaagttgttaagactgcaagcagcgaagcagctatcacagaatttcctcctggacttgaggctgacagataagattgtaaggaaagctggcaatctgacaaatgcttatgtttacgaagtgggccctgggccagggggaatcacaagatctattcttaatgccgacgtcgctgaacttctggtggttgaaaaggacactcgatttattcctggattacagatgctttctgatgcagcacctgggaaactgagaattgttcatggagatgtcttgacatttaaggtagaaaaggctttttcagaaagtcttaaaagaccctgggaagatgatcctccaaatgtacatattattggaaatctgccttttagtgtttcaactccactgattatcaagtggcttgaaaatatttcctgtagagatggaccttttgtttatggcagaactcagatgactttgacttttcaaaaggaagtggcagagagacttgcagccaatacaggaagcaaacagcgtagtcgcctctctgttatggctcagtacctctgcaatgttcgacacatctttacgattccaggacaagcttttgtccccaaaccagaggtggacgtgggcgtggtgcacttcactcccttgatacagcccaagatagagcagccattcaagctggtggaaaaagtggttcagaatgtatttcagttccgaaggaaatactgccatcgagggctcagaatgttattccctgaagcgcagcgcttggaaagcacgggcaggctgttagagttggcagacatagaccctactcttcggccccgccagctctccatctcacactttaagagcctctgtgatgtatacagaaaaatgtgtgatgaagacccacaactctttgcatataatttcagagaagaactcaagcgaagaaaaagcaaaaatgaagaaaaagaagaggatgacgcagagaattacagactctagctgctgcctgggggcgagcagcctaccagatgtcgatttgcactacgtggagcttcttatataggtactcttttgtctttacagaatgacgatacaaatgccaatgaccagatgtgacttattttccttttactatacagcttggcagagaaaataaatatcatcaaataagatacagtacaagctttcttttaatatatactgtatagatagttatgacatgtttagtataaacagcatctattacaatctatcttacaaaaatgaagtatctgcacattttgcccctaaaccacattaaaataacttaaatatgctttaaataaa

SEQ ID NO: 192307 - DNA, 1848 bp, Homo sapiens
  Payload ID: 17980
  Gene Name: transcription factor B2, mitochondrial
  Uniprot ID: Q9H5Q4
  ENST ID: ENST00000366514
  CDS Start-End: 187-1377
gaggcggaagcggaagtgagggagaaaagcaggaaggctccgctgttcgcatgcgcaggctctagtgtttacttccgcttgacctggcccggacgccagaaaatgttccacgtgggataccctgcgtggggttcactgtagtagctgcactaggtgattcttggagcgggcctgagagacaaggacatgtggatcccagtggtcgggcttcctcggcggctgaggctctccgccttggcgggcgctggtcgcttttgcattttagggtctgaagcggcgacgcgaaagcatttgccggcgaggaaccactgtgggctctctgactcctctccgcagctgtggcccgaaccggatttcaggaatccgccaaggaaggcgtctaaggccagcttagactttaagcgttacgtaaccgatcggagattggctgagaccctggcgcaaatctatttgggaaaaccaagtagacctccacacctactgctggagtgcaatccaggtcctggaatcctgactcaggcattacttgaagctggtgccaaagtggttgcgctcgaaagtgacaaaacttttattccacatttggagtccttaggaaaaaatctggatggaaaactacgagtgattcactgtgacttctttaaactagatcctagaagtggtggagtaataaaaccacctgctatgtcttctcgagggctctttaagaatttgggaatagaagcagttccttggacagcagacatccctttaaaagtagttggaatgttcccaagtagaggtgagaaaagggcactttggaaactcgcatatgacttgtattcctgtacttctatatataaatttggacgaatagaagtaaatatgtttattggtgaaaaagaattccagaaactaatggcagatcccggaaatccagacttgtatcatgtattaagtgttatctggcaattagcttgtgagattaaggttctgcacatggagccttggtcatcatttgatatatacacccggaaagggccgctggaaaacccaaagcgtagggaattattagaccaattacaacaaaagctgtatcttattcaaatgattcctcgtcaaaatttatttaccaagaacttaacacctatgaactataatatattttttcacttgttaaagcactgttttgggaggcgcagcgccactgtaatagaccacttacgttcattgactccacttgatgcgagagatatattgatgcaaataggaaaacaggaggatgagaaagtagttaacatgcaccctcaagacttcaaaacactttttgaaactatagagcgttccaaagattgtgcttataaatggctgtatgatgaaaccctggaagataggtagcaactagactgtcgtttttggtggagcggttcatttatttggaaactatgacatgaaaaccaaatttgaaaactcacatcctttcagcagaaggtaactgttcttgtcttgcacaagccaggcagatcatttctcctaagctgatatcattggcttattggatgaaacagtgtctgctattttattcacaattgaataaaatgaaaacttcaattaattgtggatttgatcagattgaattcgttttgtttcagattcctatttaaatatttcacttgtactgttgctgatttttgcatcttcttgaagagcaagagtctgtacattattaagcttagaaagtaagcaaaactgatttactggtttgcctttcagtttgttgaaatgtattgtcaagtactgtacaatgaaattgtttaaattttaatatgatttaagctttttagaaattaaaatattttaaataagaag

SEQ ID NO: 192308 - DNA, 3415 bp, Homo sapiens
  Payload ID: 17981
  Gene Name: transcription factor binding to IGHM enhancer 3
  Uniprot ID: P19532
  ENST ID: ENST00000315869
  CDS Start-End: 261-1988
gggaggagggggaagaagacgagggggaggagggcggtcgtccggggttaggttgagggggggcgtcggtccgttctgggcgggggatgactcacagcccatcccatctccccgacgccgcccgcccgcgcagtgctagctccatggcttagcggaggaggcggcggtggcgagctggggggaggggggactcttattttgttagggggaccgggccgaggcccgaccggcctggcagggctcgcccggggccgggcgtcatgtctcatgcggccgaaccagctcgggatggcgtagaggccagcgcggagggccctcgagccgtgttcgtgctgttggaggagcgcaggccggccgactcggctcagctgctcagcctgaactctttgcttccggaatccgggattgttgctgacatagaattagaaaacgtccttgatcctgacagcttctacgagctcaaaagccaacccttaccccttcgctcaagcctcccaatatcactgcaggccacaccagccaccccagctacactctctgcatcgtcttctgcagggggctccaggacccctgccatgtcgtcatcttcttcatcgagggtcttgctgcggcagcagctaatgcgggcccaggcgcaggagcaggagaggcgtgagcgtcgggaacaggccgccgcggctcccttccccagtcctgcacctgcctctcctgccatctctgtggttggcgtctctgctgggggccacacattgagccgtccaccccctgctcaggtgcccagggaggtgctcaaggtgcagacccatctggagaacccaacgcgctaccacctgcagcaggcgcgccggcagcaggtgaaacagtacctgtccaccacactcgggcccaagctggcttcccaggccctcaccccaccgccggggcccgcaagtgcccagccactgcctgcccctgaggctgcccacactaccggccccacaggcagtgcgcccaacagccccatggcgctgctcaccatcgggtccagctcagagaaggagattgatgatgtcattgatgagatcatcagcctggagtccagttacaatgatgaaatgctcagctatctgcccggaggcaccacaggactgcagctccccagcacgctgcctgtgtcagggaatctgcttgatgtgtacagtagtcaaggcgtggccacaccagccatcactgtcagcaactcctgcccagctgagctgcccaacatcaaacgggagatctctgagaccgaggcaaaggcccttttgaaggaacggcagaagaaagacaatcacaacctaattgagcgtcgcaggcgattcaacattaacgacaggatcaaggaactgggcactctcatccctaagtccagtgacccggagatgcgctggaacaagggcaccatcctgaaggcctctgtggattatatccgcaagctgcagaaggagcagcagcgctccaaagacctggagagccggcagcgatccctggagcaggccaaccgcagcctgcagctccgaattcaggaactagaactgcaggcccagatccatggcctgccagtacctcccactccagggctgctttccttggccacgacttcggcttctgacagcctcaagccagagcagctggacattgaggaggagggcaggccaggcgcagcaacgttccatgtaggggggggacctgcccagaatgctccccatcagcagccccctgcaccgccctcagatgcccttctggacctgcactttcccagcgaccacctgggggacctgggagaccccttccacctggggctggaggacattctgatggaggaggaggagggggtggtgggaggactgtcggggggtgccctgtccccactgcgggctgcctccgatcccctgctctcttcagtgtcccctgctgtctccaaggccagcagccgccgcagcagcttcagcatggaagaggagtcctgatcaggcctcacccctcccctgggactttcccacccaggaaaggaggaccagtcaggatgaggccccgccttttcccccaccctcccatgagactgccctgcccaggtatcctgggggaagaggagatgtgatcaggccccacccctgtaatcaggcaaggaggaggagtcagatgaggccctgcaccttccccaaaggaaccgcccagtgcaggtatttcagaaggagaaggctggagaaggacatgagatcagggcctgccccctggggatcacagcctcacccctgcccctgtgggactcatccttgcccaggtgagggaaggagacaggatgaggtctcgaccctgtcccctagggactgtcctagccaggtctcctgggaaagggagatgtcaggatgttgctccatcctttgtcttggaaccaccagtctagtccgtcctggcacagaagaggagtcaagtaatggaggtcccagccctgggggtttaagctctgccccttccccatgaaccctgccctgctctgcccaggcaaggaacagaagtgaggatgagacccagccccttcccctgggaactctcctggccttctaggaatggaggagccaggccccaccccttccctataggaacagcccagcacaggtatttcaggtgtgaaagaatcagtaggaccaggccaccgctagtgcttgtggagatcacagccccacccttgtccctcagcaacatcccatctaagcattccacactgcagggaggagtggtacttaagctcccctgccttaacctgggaccaacctgacctaacctaggagggctctgagccaaccttgctcttggggaaggggacagattatgaaatttcatggatgaattttccagacctatatctggagtgagaggcccccacccttgggcagagtcctgccttcttccttgaggggcagtttgggaaggtgatgggtattagtgggggactgagttcaggttaccagaaccagtacctcagtattctttttcaacatgtagggcaagaggatgaaggaaggggctatcctgggacctccccagcccaggaaaaactggaagccttcccccagcaaggcagaagcttggaggagggttgtaaaagcatattgtaccccctcatttgtttatctgatttttttattgctccgcatactgagaatctaggccaccccaacctctgttccccacccagttcttcatttggaggaatcaccccatttcagagttatcaagagacactcccccctccattcccacccctcatacctacacccaaggttgtcagctttggattgctggggccaggccccatggagggtatactgaggggtctataggtttgtgattaaaataataaaagctaggcgtgtttgatgcgcttttaactttg

SEQ ID NO: 192309 - DNA, 3279 bp, Homo sapiens
  Payload ID: 17981
  Gene Name: transcription factor binding to IGHM enhancer 3
  Uniprot ID: P19532
  ENST ID: ENST00000493583
  CDS Start-End: 185-514
tgggcgggggatgactcacagcccatcccatctccccgacgccgcccgcccgcgcagtgctagctccatggcttagcggaggaggcggcggtggcgagctggggggaggggggactcttattttgttagggggaccgggccgaggcccgaccggcctggcagggctcgcccggggccgggcgtcatgtctcatgcggccgaaccagctcgggatggcgtagaggccagcgcggagggccctcgagccgtgttcgtgctgttggaggagcgcaggccggccgactcggctcagctgctcagcctgaactctttgcttccggaatccgggattgttgctgacatagaattagaaaacgtccttgatcctgacagcttctacgagctcaaaagccaacccttaccccttcgctcaagggggctccaggacccctgccatgtcgtcatcttcttcatcgagggtcttgctgcggcagcagctaatgcgggcccaggcgcaggagcaggagaggcgtgagcgtcgggaacaggccgccgcggctcccttccccagtcctgcacctgcctctcctgccatctctgtggttggcgtctctgctgggggccacacattgagccgtccaccccctgctcaggtgcccagggaggtgctcaaggtgcagacccatctggagaacccaacgcgctaccacctgcagcaggcgcgccggcagcaggtgaaacagtacctgtccaccacactcgggcccaagctggcttcccaggccctcaccccaccgccggggcccgcaagtgcccagccactgcctgcccctgaggctgcccacactaccggccccacaggcagtgcgcccaacagccccatggcgctgctcaccatcgggtccagctcagagaaggagattgatgatgtcattgatgagatcatcagcctggagtccagttacaatgatgaaatgctcagctatctgcccggaggcaccacaggactgcagctccccagcacgctgcctgtgtcagggaatctgcttgatgtgtacagtagtcaaggcgtggccacaccagccatcactgtcagcaactcctgcccagctgagctgcccaacatcaaacgggagatctctgagaccgaggcaaaggcccttttgaaggaacggcagaagaaagacaatcacaacctaattgagcgtcgcaggcgattcaacattaacgacaggatcaaggaactgggcactctcatccctaagtccagtgacccggagatgcgctggaacaagggcaccatcctgaaggcctctgtggattatatccgcaagctgcagaaggagcagcagcgctccaaagacctggagagccggcagcgatccctggagcaggccaaccgcagcctgcagctccgaattcaggaactagaactgcaggcccagatccatggcctgccagtacctcccactccagggctgctttccttggccacgacttcggcttctgacagcctcaagccagagcagctggacattgaggaggagggcaggccaggcgcagcaacgttccatgtaggggggggacctgcccagaatgctccccatcagcagccccctgcaccgccctcagatgcccttctggacctgcactttcccagcgaccacctgggggacctgggagaccccttccacctggggctggaggacattctgatggaggaggaggagggggtggtgggaggactgtcggggggtgccctgtccccactgcgggctgcctccgatcccctgctctcttcagtgtcccctgctgtctccaaggccagcagccgccgcagcagcttcagcatggaagaggagtcctgatcaggcctcacccctcccctgggactttcccacccaggaaaggaggaccagtcaggatgaggccccgccttttcccccaccctcccatgagactgccctgcccaggtatcctgggggaagaggagatgtgatcaggccccacccctgtaatcaggcaaggaggaggagtcagatgaggccctgcaccttccccaaaggaaccgcccagtgcaggtatttcagaaggagaaggctggagaaggacatgagatcagggcctgccccctggggatcacagcctcacccctgcccctgtgggactcatccttgcccaggtgagggaaggagacaggatgaggtctcgaccctgtcccctagggactgtcctagccaggtctcctgggaaagggagatgtcaggatgttgctccatcctttgtcttggaaccaccagtctagtccgtcctggcacagaagaggagtcaagtaatggaggtcccagccctgggggtttaagctctgccccttccccatgaaccctgccctgctctgcccaggcaaggaacagaagtgaggatgagacccagccccttcccctgggaactctcctggccttctaggaatggaggagccaggccccaccccttccctataggaacagcccagcacaggtatttcaggtgtgaaagaatcagtaggaccaggccaccgctagtgcttgtggagatcacagccccacccttgtccctcagcaacatcccatctaagcattccacactgcagggaggagtggtacttaagctcccctgccttaacctgggaccaacctgacctaacctaggagggctctgagccaaccttgctcttggggaaggggacagattatgaaatttcatggatgaattttccagacctatatctggagtgagaggcccccacccttgggcagagtcctgccttcttccttgaggggcagtttgggaaggtgatgggtattagtgggggactgagttcaggttaccagaaccagtacctcagtattctttttcaacatgtagggcaagaggatgaaggaaggggctatcctgggacctccccagcccaggaaaaactggaagccttcccccagcaaggcagaagcttggaggagggttgtaaaagcatattgtaccccctcatttgtttatctgatttttttattgctccgcatactgagaatctaggccaccccaacctctgttccccacccagttcttcatttggaggaatcaccccatttcagagttatcaagagacactcccccctccattcccacccctcatacctacacccaaggttgtcagctttggattgctggggccaggccccatggagggtatactgaggggtctataggtttgtgattaaaataataaaagctaggcgtgtttgatgcgcttttaactttggcaaa

SEQ ID NO: 192310 - DNA, 3546 bp, Homo sapiens
  Payload ID: 17982
  Gene Name: transcription factor CP2
  Uniprot ID: Q12800
  ENST ID: ENST00000257915
  CDS Start-End: 460-1968
gagagagcgagacctgggagggagggggcctccagcagaaaggggcgggggaaaaggtgcaaaagcagcgtgggagcgccgggctggcttcctgcggctgctgctggtctgactgggaagcagcaagccaccactacgaactctcaagaggagtgggagtgcgggagtccagagctgcctctgggaagtctgcagtagttgagcaaaggggtcctcacgttcctgagagctgggcaggggggattttggaacctggggcagccaagaacgagcagccaagggtacgggagattagttgtgcacagagcagtgctggtcgggcttgggggtggctggtgggcactgcgtgggaaaccttggtttgtagttttcttggtttgcgttactcctgttgggtagaattaccctccgcgcctttgtacaagacacggtgtctcctggggcaaggaaggagccaggatggcctgggctctgaagctgcctctggccgacgaagtgattgaatccgggttggtgcaggactttgatgctagcctgtccgggatcggccaggaactgggtgctggtgcctatagcatgagtgatgtccttgcattgcccatttttaagcaagaagagtcgagtttgcctcctgataatgagaataaaatcctgccttttcaatatgtgctttgtgctgctacctctccagcagtgaaactccatgatgaaaccctaacgtatctcaatcaaggacagtcttatgaaattcgaatgctagacaataggaaacttggagaacttccagaaattaatggcaaattggtgaagagtatattccgtgtggtgttccatgacagaaggcttcagtacactgagcatcagcagctagagggctggaggtggaaccgacctggagacagaattcttgacatagatatcccgatgtctgtgggtataatcgatcctagggctaatccaactcaactaaatacagtggagttcctgtgggaccctgcaaagaggacatctgtgtttattcaggtgcactgtattagcacagagttcactatgaggaaacatggtggagaaaagggggtgccattccgagtacaaatagataccttcaaggagaatgaaaacggggaatatactgagcacttacactcggccagctgccagatcaaagttttcaagcccaaaggtgcagacagaaagcaaaaaacggatagggaaaaaatggagaaacgaacacctcatgaaaaggagaaatatcagccttcctatgagacaaccatactcacagagtgttctccatggcccgagatcacgtatgtcaataactccccatcacctggcttcaacagttcccatagcagtttttctcttggggaaggaaatggttcaccaaaccaccagccagagccaccccctccagtcacagataacctcttaccaacaaccacacctcaggaagctcagcagtggttgcatcgaaatcgtttttctacattcacaaggcttttcacaaacttctcaggggcagatttattgaaattaactagagatgatgtgatccaaatctgtggccctgcagatggaatcagactttttaatgcattaaaaggccggatggtgcgtccaaggttaaccatttatgtttgtcaggaatcactgcagttgagggagcagcaacaacagcagcagcaacagcagcagaagcatgaggatggagactcaaatggtactttcttcgtttaccatgctatctatctagaagaactaacagctgttgaattgacagaaaaaattgctcagcttttcagcatttccccttgccagatcagccagatttacaagcaggggccaacaggaattcatgtgctcatcagtgatgagatgatacagaactttcaggaagaagcatgttttattctggacacaatgaaagcagaaaccaatgatagctatcatatcatactgaagtaggagtgcggcgtttcgtgcccagtggctgctccttccttcacctctgaaaacggccctcttgaagggggatatgaatggagatttgaaggtctgcaagaacctgactcgtctgactgtgtgtggaggagtccaggccatggaggcagaatcctggccctctgtgttggcccaagctcttgtggtacacacagattactgcccaatatgcagttctgcagctgttttagttaaatttctggaccttgttgttgttaaatatcagtagaaactctacataatttagagtgtatgtagggcataatgatgatgggaattgtgtgatgtttaacaggaagatcttaaattttgtgatatggagccctgtaatttttttcttatataaaaatgggtatctatattcataagactaggtcttcaatctctttgtactggtctcaaatgtactggtatctctgctttttgccacagtttgtccctgaaaactttatcagtgaggagaaatacagaattttccttttggttcccctgtaataccacaactaatagtattttcagctaacatttattgaccaggcagtgtgataaattttttgaatgaccatcttgtttaaccccctaatcacactatctgaagtaggtgctatagtgacccccaaccgaagatgaggaaatggagacacacagtggctaagtagcttgctaggtgccaggagctggcaggcagtgatgctgaaatccaaaccaggcaatctggccctccttattcaccctctcataccaccagtgctacccattataacctgtgttcacttcgcttattactgtggcccttctggtgactacaacataacactgagtatgaactgaggaattaaccactgaaagagacaaagcacacctaaataatgatgaacaaatcaagacctacaagaaatgaacacatagatgctttttaagtgtcattagttatcggaatcaaagaatttgaggtggtgacaactggggattatctgtaactccccaaatttactgttcttgaatgacattctcaaactatttattaatgagttagtctcatccctgctttctgtttcctctctctgcatcttctcttggcataggaagttattttactcatgctatgttttttaatagaagctttacaaaaaaagatgcattcccttcctgttcacactcttaccatgtttttgttcttccttaagaatgattgtgtgtgtgtgtgtgtgtgtgtgtaagtgtgtaagtgtaacatcatgggttttctttcttcacttgtaaagttttatctagaaatacttttacaggttatgttgaggtacacaaagataatgttctaagattgtgtattggatttggatttgtgtgtgtgtgtgtgtgtgtgtgtgtttaaagcatttgataaggtttaaatgttttttatacagagatttttgttcattaaactcaatctgcatcatggtctaatttctcttggtttgaaacaaattgaaaactttgaaaccaaaaaattaagtcaatgacttgtttaaaactgacctgagcaacttgttatattac

SEQ ID NO: 192311 - DNA, 1862 bp, Homo sapiens
  Payload ID: 17982
  Gene Name: transcription factor CP2
  Uniprot ID: Q12800
  ENST ID: ENST00000548115
  CDS Start-End: 491-1843
gactgaccggaagcgaggcctggaggggaaagagagagcgagacctgggagggagggggcctccagcagaaaggggcgggggaaaaggtgcaaaagcagcgtgggagcgccgggctggcttcctgcggctgctgctggtctgactgggaagcagcaagccaccactacgaactctcaagaggagtgggagtgcgggagtccagagctgcctctgggaagtctgcagtagttgagcaaaggggtcctcacgttcctgagagctgggcaggggggattttggaacctggggcagccaagaacgagcagccaagggtacgggagattagttgtgcacagagcagtgctggtcgggcttgggggtggctggtgggcactgcgtgggaaaccttggtttgtagttttcttggtttgcgttactcctgttgggtagaattaccctccgcgcctttgtacaagacacggtgtctcctggggcaaggaaggagccaggatggcctgggctctgaagctgcctctggccgacgaagtgattgaatccgggttggtgcaggactttgatgctagcctgtccgggatcggccaggaactgggtgctggtgcctatagcatgagtgatgtccttgcattgcccatttttaagcaagaagagtcgagtttgcctcctgataatgagaataaaatcctgccttttcaatatgtgctttgtgctgctacctctccagcagtgaaactccatgatgaaaccctaacgtatctcaatcaaggacagtcttatgaaattcgaatgctagacaataggaaacttggagaacttccagaaattaatggcaaattggtgaagagtatattccgtgtggtgttccatgacagaaggcttcagtacactgagcatcagcagctagagggctggaggtggaaccgacctggagacagaattcttgacatagatatcccgatgtctgtgggtataatcgatcctagggctaatccaactcaactaaatacagtggagttcctgtgggaccctgcaaagaggacatctgtgtttattcagcccaaaggtgcagacagaaagcaaaaaacggatagggaaaaaatggagaaacgaacacctcatgaaaaggagaaatatcagccttcctatgagacaaccatactcacagagtgttctccatggcccgagatcacgtatgtcaataactccccatcacctggcttcaacagttcccatagcagtttttctcttggggaaggaaatggttcaccaaaccaccagccagagccaccccctccagtcacagataacctcttaccaacaaccacacctcaggaagctcagcagtggttgcatcgaaatcgtttttctacattcacaaggcttttcacaaacttctcaggggcagatttattgaaattaactagagatgatgtgatccaaatctgtggccctgcagatggaatcagactttttaatgcattaaaaggccggatggtgcgtccaaggttaaccatttatgtttgtcaggaatcactgcagttgagggagcagcaacaacagcagcagcaacagcagcagaagcatgaggatggagactcaaatggtactttcttcgtttaccatgctatctatctagaagaactaacagctgttgaattgacagaaaaaattgctcagcttttcagcatttccccttgccagatcagccagatttacaagcaggggccaacaggaattcatgtgctcatcagtgatgagatgatacagaactttcaggaagaagcatgttttattctggacacaatgaaagaaaccaatgatagctatcatatcatactgaagtaggagtgcggcgtttcgtgcc

SEQ ID NO: 192312 - DNA, 1508 bp, Homo sapiens
  Payload ID: 17982
  Gene Name: transcription factor CP2
  ENST ID: ENST00000548108
  CDS Start-End: 366-1508
ttcctgcggctgctgctggtctgactgggaagcagcaagccaccactacgaactctcaagaggagtgggagtgcgggagtccagagctgcctctgggaagtctgcagtagttgagcaaaggggtcctcacgttcctgagagctgggcaggggggattttggaacctggggcagccaagaacgagcagccaaggtgatgtccttgcattgcccatttttaagcaagaagagtcgagtttgcctcctgataatgagaataaaatcctgccttttcaatatgtgctttgtgctgctacctctccagcagtgaaactccatgatgaaaccctaacgtatctcaatcaaggacagtcttatgaaattcgaatgctagacaataggaaacttggagaacttccagaaattaatggcaaattggtgaagagtatattccgtgtggtgttccatgacagaaggcttcagtacactgagcatcagcagctagagggctggaggtggaaccgacctggagacagaattcttgacatagatatcccgatgtctgtgggtataatcgatcctagggctaatccaactcaactaaatacagtggagttcctgtgggaccctgcaaagaggacatctgtgtttattcaggtgcactgtattagcacagagttcactatgaggaaacatggtggagaaaagggggtgccattccgagtacaaatagataccttcaaggagaatgaaaacggggaatatactgagcacttacactcggccagctgccagatcaaagttttcaagcccaaaggtgcagacagaaagcaaaaaacggatagggaaaaaatggagaaacgaacacctcatgaaaaggagaaatatcagccttcctatgagacaaccatactcacagagtgttctccatggcccgagatcacgtatgtcaataactccccatcacctggcttcaacagttcccatagcagtttttctcttggggaaggaaatggttcaccaaaccaccagccagagccaccccctccagtcacagataacctcttaccaacaaccacacctcaggaagctcagcagtggttgcatcgaaatcgtttttctacattcacaaggcttttcacaaacttctcaggggcagatttattgaaattaactagagatgatgtgatccaaatctgtggccctgcagatggaatcagactttttaatgcattaaaaggccggatggtgcgtccaaggttaaccatttatgtttgtcaggaatcactgcagttgagggagcagcaacaacagcagcagcaacagcagcagaagcatgaggatggagactcaaatggtactttcttcgtttaccatgctatctatctagaagaactaacagctgttgaattgacagaaaaaattgctcagcttttcagcatttccccttgccagatcagccagatttacaagcaggggccaacaggaattcatgtgctcatcagtgatgagatgatacagaactttcag

SEQ ID NO: 192313 - DNA, 1727 bp, Homo sapiens
  Payload ID: 17982
  Gene Name: transcription factor CP2
  ENST ID: ENST00000549867
  CDS Start-End: 95-1369
ttcgccgggcaggcgaggaaagaggacgccatgattggttggcgctggggcggcggacggtggaagggcctggcgagtctaggaaggagccaggatggcctgggctctgaagctgcctctggccgacgaagtgattgaatccgggttggtgcaggactttgatgctagcctgtccgggatcggccaggaactgggtgctggtgcctatagcatgagtgatgtccttgcattgcccatttttaagcaagaagagtcgagtttgcctcctgataatgagaataaaatcctgccttttcaatatgtgctttgtgctgctacctctccagcagtgaaactccatgatgaaaccctaacgtatctcaatcaaggacagtcttatgaaattcgaatgctagacaataggaaacttggagaacttccagaaattaatggcaaattggtgaagagtatattccgtgtggtgttccatgacagaaggcttcagtacactgagcatcagcagctagagggctggaggtggaaccgacctggagacagaattcttgacatagatatcccgatgtctgtgggtataatcgatcctagggctaatccaactcaactaaatacagtggagttcctgtgggaccctgcaaagaggacatctgtgtttattcaggtgcactgtattagcacagagttcactatgaggaaacatggtggagaaaagggggtgccattccgagtacaaatagataccttcaaggagaatgaaaacggggaatatactgagcacttacactcggccagctgccagatcaaagttttcaagcccaaaggtgcagacagaaagcaaaaaacggatagggaaaaaatggagaaacgaacacctcatgaaaaggagaaatatcagccttcctatgagacaaccatactcacagagtgttctccatggcccgagatcacgtatgtcaataactccccatcacctggcttcaacagttcccatagcagtttttctcttggggaagggatggtgcgtccaaggttaaccatttatgtttgtcaggaatcactgcagttgagggagcagcaacaacagcagcagcaacagcagcagaagcatgaggatggagactcaaatggtactttcttcgtttaccatgctatctatctagaagaactaacagctgttgaattgacagaaaaaattgctcagcttttcagcatttccccttgccagatcagccagatttacaagcaggggccaacaggaattcatgtgctcatcagtgatgagatgatacagaactttcaggaagaagcatgttttattctggacacaatgaaagcagaaaccaatgatagctatcatatcatactgaagtaggagtgcggcgtttcgtgcccagtggctgctccttccttcacctctgaaaacggccctcttgaagggggatatgaatggagatttgaaggtctgcaagaacctgactcgtctgactgtgtgtggaggagtccaggccatggaggcagaatcctggccctctgtgttggcccaagctcttgtggtacacacagattactgcccaatatgcagttctgcagctgttttagttaaatttctggaccttgttgttgttaaatatcagtagaaactctacataatttagagtgtatgtagggcataatgatgatgggaattgtgtgatgtttaacaggaagatcttaaattttgtgatatggag

SEQ ID NO: 192314 - DNA, 9292 bp, Homo sapiens
  Payload ID: 17983
  Gene Name: transcription factor CP2-like 1
  Uniprot ID: Q9NZI6
  ENST ID: ENST00000263707
  CDS Start-End: 99-1538
accgcgggttcggagcgcgaagccgccgctgggtcctcggcgcgccccgcgtctgcgcttgctgccgcgccccggtcggcgcgctgggagttccagccatgctcttctggcacacgcagcccgagcactacaaccagcacaactccggcagctacctgcgtgatgtgctcgctctgcccatcttcaagcaggaggaaccccagctgtcccccgagaacgaggcccgcctgccacccctgcaatatgtgttgtgtgctgccacgtccccagccgtgaagctgcatgaagagacgctgacctacctcaaccaaggtcagtcttatgaaatccgactactggagaatcggaagctgggagactttcaagatctgaacacaaaatatgtcaagagcatcatccgtgtggtcttccatgaccgccggctgcagtatacggagcaccagcagctggagggctggcggtggagtcggccaggggaccggatcctggacatcgatattccactgtctgttggtatcttggaccccagggccagcccgacccagctgaatgcagtcgagtttttgtgggaccctgcgaagagagcttctgcattcattcaggtacactgcatcagcacagaattcacccccaggaagcacgggggcgagaagggagtgccctttcgagtccagattgacacgtttaagcagaacgagaatggggagtacacggagcacctgcactcagccagctgccagatcaaggtgttcaagccgaagggagccgatcggaaacagaagactgaccgggagaagatggagaaaagaactgcccaagagaaggagaaataccagccgtcctatgaaaccaccatcctcacagagtgctctccatggcccgacgtggcctaccaggtgaacagcgccccgtccccaagctacaatggttctccaaacagctttggcctcggcgaaggcaacgcctctccgacccacccggtggaggccctgcccgtgggcagtgaccacctgctcccatcagcttcgatccaggatgcccagcagtggcttcaccgcaacaggttctcgcagttctgccggctctttgccagcttctcaggtgctgacttgctgaagatgtcccgagatgatttggtccagatctgtggtcccgcagatgggatccggctcttcaacgccatcaaaggccggaatgtgaggccaaagatgaccatttatgtctgtcaggagctggagcagaatcgagtgcccctgcagcagaagcgggacggcagtggagacagcaacctgtctgtgtaccacgccatcttcctggaagagctgaccaccttggagctgattgagaagatcgccaacctgtacagcatctccccccagcacatccaccgagtctaccggcagggccccacgggcatccatgtggtggtgagcaacgagatggtgcagaacttccaagatgaatcctgttttgtcctcagcacaattaaagctgagagcaatgatggctaccacatcatcctgaaatgtggactctgagcagcagtggacctcatacctgtctccagctcccagccctgtggatccccgtggatgtagacattgccccactgtaagctgtggcctcaccaggcaagctgaggccaggagggaccctgcccagtctgtgaaagctacagagcaccaaccagcagaagcctgtggacaccaagtacggtgtacagaaagccagtggctcctttctcccttcctcttggcctccagattttgaatggttccttgttcttttctattggtccaaccctgacgttctaaaagggcaaacagtggagacgtctgctctgaaatccctcatcccttagttggaagctgattgggtatcttggtgctgcctgtattggtcccttctgaccactctcctgcctccagagaaagctctgcttcaccctggaagctggtacctttacctcctcctctgggagttggctgcatggccagcactgccgacttgatgggagcagtttgccctcattctcctgtttcaggtttgcttcccttctcagtgaccctggtgagcatccgcctttcctgttcttggatgaattgatgggagtggggctattctgtgccttctacctctttcttctctacgttgtttctaaggatctgctgctgcggaacccaaagatgtgctcctgtctctgcactggcgcattggcatggtagatgccacaatgtatgtgcacggcctttctcagagacattagttctgaggccctttgtggggaggttagggggatggtaatagaaaaagactattttatttcctggcaatcacgggtaaggaggattaggaatgagtattccattcctaggtgtcatcagatgaccttgaccaccacaataccaggccctcttggatggacttatagaaagttagagaagaccttgttgaaccgctgctaaacttgccacaggagcgatgtgttttctctgagtgcccctcacttacatgtttatctttgtttgtagaggctatgtttaggatattttgcctgcatcagaatgggtgcatcatctttcttaatggcctaactatcgggaaatttgagtgtcagtaactgtggtagactcagaaattcgtctttgtcttgcctctggttcctgggatccagtgatctctactggcccagggcttcagctcttggttaatttaggttcatggggaaccctctgaccacctgaatgggatgtcatagcttctaaatggagcttctgtggaatgaagtgctagactgaaggactaccagaataaaacagggtctacaatggggagaacttgttttatagatgaggaaaccaaggctcagaggggcaaagtcacctgcatggtagcacatagtgatagggtagcgatataaatttatcatataaaccaggacatctcggaataaaaggggctctgttagtcattatgttgggtaatagccgtggcattcctacagaacagagtgaggacaggctcctgattcctcttccttctttagaggagaagcggggagtgggttaactaacagctttattgagatgtcattcacatgccattcagtttacccattgctagtgtccaattgtattcacagaaccaccatcaattcacagaattacagtcaacgttggtacattttcatcacccccagtaaaaccccgtacccttggtctgtcactcctgctttcctaactcctgcagtccaaggcagccatgaatctactttctatgtaagattaacctactctggacatttcatatatctggaatcatgtgatatctcttttgtgactggcttcttccactgaatgttttctagggccgtccaagttgaggatgtatcagtacttcattcttttgtattgctgaataatacttcattgtatagatagaccacatttgtttattgattcatcagttgatggacatttgtgtgtttttactttttggctactctgaatgatgctgctatgaacatatttctacaagattttgtgtggacatatgttttcatttcttttagcaatatacataggagtggaattgctaggtcttacagtaactccgtgttttaactttttgagaaactgccagactgttttctatagcagctgtaccattttacattcccaccagcaatgtatccaggtttcaatttgtctacatcctcatcaacacttgctattatctgtctttttgcttttagcatcctaatgagtatgaaatgctatcttgtggttttgatttgcattcccctgatggcaactgatgctgagtgtcttttcctgtgcttacgggccatgcgtatttctttggagaaaggtctatccaggtcctttgcctatttttaattgagttgtctttttttttttaagttttctgttttcctaaccactagactaccagggatgagccttctttttattattgagttgggtgagctatttgtatattctagacgccagtcttttatcaggtatatgactggtaaaaatgttctccccttctgtggattgttttcagtttcttgttggtgtcctttgagacacaaaactttttaactttgatgatttccaagatacgtattttttttctattgtcacttgtgcttttggtgccatatctagaaaaccattgcctaatccaaggtcaagaagattaatgcctgtgttttcttctaagaactatacttttagttctcacaatggtctttgatccatttcgagtatatttttatatatgatgtgatgtaggggtccagcttcattcttttgcttgtggatctccacttgtcccactgctgattattgagaaaaatatcctttctccacggaattgtcttggcatccttgctaaaggcctctgcttcttactggatcttctttcctgggacatggtgtcgttgggaagcttaccttttttttttttttacttagtctgtgtttggttccaccagttttatgctgcctttctactctgttcttgctgtctccctctttacctgagtcaacggtactgagtcctatctctctctgatgttccccagtcttccttggtgcatgttctagctccacacactagtccttggaggaaggttgagaccaatgatttcctgttatgagtcatgaggaaactgaatcacctagaagtggaataatgtgctcagggtcaccatagcccattagtggaaggaccaggactagacctttagtcttctgaggtccagccccttaggctgtctgtcatcactgtacccaagtgatgtcactaccaaggccaaatgatggtgggctaaattttaattctcaaaagtgtaggaggctaatattgtcttctaagttccaaaagaagatgtaataaaagtctgttaccttaagtgtgctattagtagagtcttccatttttctggcatgcccctggcatctgctcttcttaccttctcgtggttgtagttaaagcttatagcttatgaaagaatagaaaataataaataccaaaaaaaagtacacatggtaatttggtaccaaaatatctcagctgcctaatttagcagctcatcccttccacaggggtcagatgagctaaagctccaggttttatttttcatttgattgacatacagaaaagccatagcccttcccacagctgtccagggtctttcctgtgagtccggaggtgctggcctattgagcaggacagctcttcccagggcattcccaccaacctgtggcttctgaactgtagcttctttttacagtgaaccccagagggaaataagacagacacatgtgctcaggccaccatcttgaactggaagcccaaagctgagttccttactcttaggtcgtcacggtttttgcggggtatctgcaaggttgagataaaccctttcctgtttaccaggttgtcctttctggatgaagggacagaggctgttgaatggaggaataataggtttgctggaggaggggcatggtatgcctgtggaaaggacaggatggggtggggaggtcgaggctttgacttggggtcctaaacaaaggtcaggtgttgccctagtgacctcttgcccagacagcccagagccccttacacagagctattaacctagggaaggctttaccagcagtggactggagccagccagggtcacaagtttccaagtccagcattgcttcaggggctggcctgagtaactgaagatctgaaaatcattaacaagtcgatgaaataaacggaaaagcctcttaggctgttgtcagtggagcagagggagaaagtccctaggcgctcagagggggtgagaaagcagtggatgattgggcgggggtgggggattagatgttgacactgcctggggtgtaggaagaggaacagagaacccagagtcagggtcctagatcccagaccctcgctcagtatgagtctctttgcctctctgggtctctatctcctcctcttacaaatacaggcttggtgatctctgaagatggcaccaacctgccatgaaatgaatctgaggggttttcccatttttccctccatcaaaatcgtacaaaaagctggacgtggtggcccatgcctctaatcctagcattttgggaggccgaggtgggagaatcacttgacgccaagagttcgagaccagcctgggcatcgtagtgagactccatctctgtctttttgaaaataaaaaatctttgaaaattgcacaacaggcaggagacctttacgtgtgcccatcctggttgtacacagtgccaccagtgctcctgcagtgcaaggcggcatgcttcttgacatgggtcagattgtgtccatcgtgtctttgggaatcagccctagctcctaactgggctgactacttcctccgcaaacttatgggggctcccagatattccttgccagccaggggccagacacagtgcaggcacagtctgtgtcattggtgcacatgtgcgtgtttacatgtgtacctgggttccttcccttgcccatgaatttgccatgagcacagccagaagcagcctcagcttggcaaggtgtggagatgactgctgttcccttcgcatttggggaaaacaggctccctcggtagctcgatgatcctcttttgatcttgtgtgacctcctggagagtggatgaagctggtggccttagcttttctagacagtgtaagtggcactgggcaaggcccccagagcagggcaaggtctctagagcgggtctcccacatgactggcttcacacaggcacttccgctcgggttgcatgctctgtgtcatcttaccggtccagggttgcaggtaggaaatgtttgtaccctcttctgattgccacctccttcccatcgccccttagggacagggcttgagggccagtgaggcgctggtcaggcaccccaggcctccttgggacctgcccaggggcaccctgagagctcctgaaacccccacttagcttccagacctttctgcaaaagctcctcctggctttcctccctcccccaatctatgggtcacagctaacagatctgagggcaactgctgtgctagtggccagggctgcacctgccatccccggctctgccactttagggccttctagaggcagtgtccttaggaagtagctctgaggcatgggttttctgctcctgtgcagggcagctgatgggataaggtggggaaggacggtcagtgcttgggccccagctggccagcctggcgatggggaaaccaaaccatgtcccccagcgaagggccagagtgggaacctgtcctcatgcccttcgtcctgaggagccctgaggtgggcagcaggggccaggggaagttttcaggccttcatcaaagagaacaacatcctcagctccgcacccctcatcctgtatcagcacttaccggtgtgtgactgcccttgtcagctagcatacggtgggcccacctggcccactggctgtttatgccactgatttatgatagggaatattatctttgaacccaatgaagtgttttctcccccatcacaaaaaaaaaaattcttatttttagtagacatgtatttaccaaaaatatgtactcaattattgtattttggattttatcaatttaaaaattgtggaaatttgtttgctcttacgccaacataatattgattttgcctcttggctctgaaagcccaaaatatttaccgtctagcccgttacagaaaaagtctgctgactactgagccagacctccattacctccatccctgttggattatttaaagaaagcctcagacagtaagggcttttttaaaagaataaaatgacttggtttgcgcttggaagcaggggaagcattcagatgagcggtttctgcattaaccctgcctatcacgcatctcgtgtcctgtgtggctggcgagccccccttggaaggttctggtgcttcagctggctcctgcagagtccaccccgcctcgtggtgggaatgcagagccctttgctttccttcttgccgcctgcttcctgttcctggggacccgctgggcctttggtctgcatcccctggccaggtccctcagggttgatgcgtggagaaggactttgagcagtggtgggcagcagtggcctcctggccagctcacactcttgtcctgggaggggcagcctgatctcacctccacctagtaccttggggactgaggaccttttggcttctctggagcctgcaagcctcttcccatgtgtccagctgctcttcctgctacaaaggggactgctcacagtggcctcagcttggtggttttgaggggccgccccccggccctccataagggtatcctgggcctgagaattctgcatctgccattggaggatggacagcctcaaatggaaggagtcccacgggagatgggtccgaggtccggctgtggccatccagccccctgtggcttgtccagcctctgtgcacccctggtgtcttcactccaggggcagacagcagccactgcagttcctttcttcgtgagtaacagtagtgatagcagctggggctaacaggctaggctttgtgttctgcgcatttggtcagcttctcactcgatcctccctaaagcaatggggaggcccccactagcccagttttcaggaagtcaactgggaggttagatgggggccagggtcccacagctactgatggcccgagccaggttgagcttcctggtgtccagtccggatcccacttgcagatctcatgctctcagataggtgggacaagttcttttgtcacagtgctggctctgtcctgaggcctcattgctggctgggtgtgctctgctgggaaaagctttgcggggcttgcttggttaaccacagaagagaaggggactgtttggggtgcctctctgcagcctccccgtgctgggtggaagcacggttactgtgttctctaatgttcatgtatttaaaatgatttctttctaaagatgtaacctccacacctttctccagattgggtgactcttttctaaaggtggtgggagtatctgtcggggtggtgtggcccttggatgggtcaggtgggtgtgagaggtcctggggaggtgggcgttgagctcaaagttgtcctactgccatgtttttgtacctgaaataaagcatattttgcacttgttactgtaccatagtgcggacgagaagtctgtatgtgggatctgtgcttgggttagaatgcaaataaaactcacatttgtaagaaa

SEQ ID NO: 192315 - DNA, 1680 bp, Homo sapiens
  Payload ID: 17984
  Gene Name: transcription factor Dp family, member 3
  Uniprot ID: Q5H9I0
  ENST ID: ENST00000310125
  CDS Start-End: 90-1307
cacggcagccctacactcggcctggaagaattgtttttcttctctggaaaggtgaacatttatagcatttatttcccaaatctgttaacatggcaaaatatgtcagtctcactgaagctaacgaagaactcaaggtcttaatggacgagaaccagaccagccgccccgtggccgttcacacctccaccgtgaacccgctcgggaagcagctcttgccgaaaacctttggacagtccagtgtcaacattgaccagcaagtggtaattggtatgcctcagagaccagcagcatcaaacatccctgtggtaggaagcccaaacccacccagcactcactttgcctctcagaaccagcattcctactcctcacctccttgggccgggcagcacaacaggaaaggagagaagaatggcatgggcctgtgccgtctttccatgaaggtctgggagacggtgcagaggaaagggaccacttcctgccaggaagtggtgggcgagctggtcgccaagttcagagctgccagcaaccacgcctcaccaaacgagtcagcttatgacgtgaaaaacataaaacggcgcacctacgatgccttaaacgtgctgatggccatgaatatcatctccagggagaaaaagaagatcaagtggattggtctgaccaccaactcggctcagaactgtcagaacttacgggtggaaagacagaagagacttgaaagaataaagcagaaacagtctgaacttcaacaacttattctacagcaaattgctttcaagaacctggtgctgagaaaccagtatgtggaggagcaggtcagccagcggccgctgcccaactcagtcatccacgtgcccttcatcatcatcagcagtagcaagaagaccgtcatcaactgcagcatctccgacgacaaatcagaatatctgtttaagtttaacagctcctttgaaatccacgatgacacagaagtgctgatgtggatgggcatgacttttgggctagagtccgggagctgctctgccgaagaccttaaaatggccagaaatttggtcccaaaggctctggagccgtacgtgacagaaatggctcagggaacttttggaggtgtgttcacgacggcaggttccaggtctaatggcacgtggctttctgccagtgacctgaccaacattgcgattgggatgctggccacaagctccggtggatctcagtacagtggctccagggtggagaccccagcagtcgaggaggaagaggaggaggacaacaacgatgacgacctcagtgagaatgacgaggatgactgacgtcctctcgccttaagattcagcttcaggaaaacatttagggaaaagaaactttttttttttttttaatgtgaggttttctgtttcttttttgcctactcccaagaagatattggtaagctatagaatttagatatgcacctctgataagcaaggattgtttcccgtatgattaagacgtgctgttgatgtgtgttttgataccagtgtgctgacacagaatctttatttactttttaggattttgtgttttcattttctatttttctttaaatgcagagttcattgttgccccttaacagtttttcctgagtttactgaagaaattgtacttcatccacatccatgaaaataaaatgctctccttttgtgc

SEQ ID NO: 192316 - DNA, 2648 bp, Homo sapiens
  Payload ID: 17985
  Gene Name: transcription factor Dp-1
  Uniprot ID: Q14186
  ENST ID: ENST00000375370
  CDS Start-End: 213-1445
cgtcccggcgccactcggcccagggcagggaccccgccacggccgggaccgcccggcccggccccagcccgcgcctctccgcgccgccccgcgctccgcaccgcgccctctccgcgtccccgcccgcgcggccggaccgggcagccagaaaaatcatttttcttctctgggaaggtgaacatttgtagcattgatttcccggatctggtaacatggcaaaagatgccggtctaattgaagccaacggagaactcaaggtcttcatagaccagaaccttagtcccgggaaaggcgtggtgtccctcgtggccgttcacccctccaccgtcaacccgctcgggaagcagctcttgccaaaaacctttggacagtccaatgtcaacattgcccagcaagtggtaattggtacgcctcagagaccggcagcgtcaaacaccctggtggtaggaagcccacacacccccagcactcactttgcctctcagaaccagccttccgactcctcaccttggtctgccgggaagcgcaacaggaaaggagagaagaatggcaagggcctacggcatttctccatgaaggtctgcgagaaggtgcagaggaaagggaccacttcctacaacgaagtggcagacgagctggttgcggagttcagtgctgccgacaaccacatcttaccaaacgagtcagcttatgaccagaaaaacataagacggcgcgtctacgatgccttaaacgtgctaatggccatgaacatcatctccaaggagaagaaggagatcaagtggattggtctgcccaccaactcggctcaggaatgtcagaacttagaggtggaaagacagaggagacttgaaagaataaaacagaaacagtctcaacttcaagaacttattctacagcaaattgccttcaagaacctggtgcagagaaaccggcatgcggagcagcaggccagccggccaccgccacccaactcagtcatccacctgcccttcatcatcgtcaacaccagcaagaagacggtcatcgactgcagcatctccaatgacaaatttgagtatctgtttaattttgacaacacatttgaaatccacgatgacatagaagtgctgaagcggatgggcatggcttgcgggctggagtcggggagctgctctgccgaagaccttaaaatggccagaagtctggtccccaaggctctggagccatacgtgacagaaatggctcagggaactgttggaggcgtgttcatcacgacggcaggttccacgtctaacggcacaaggttctctgccagtgacctgaccaacggtgcagatgggatgctggccacaagctccaatgggtctcagtacagcggctccagggtggagactccggtgtcctacgtcggggaggacgacgaggaggacgatgacttcaacgagaatgacgaggacgactgacgtcctccccacttcagattcggcttcaggaaaacgtttagcgaaaagaaactttttttttaatgtgggttttctgtttccttttggcctactcccaagaagatattggtaagctattgaatttagatatgcacctctgataagcaaggattgtttcccgtaggattaggacgtgctgtggatgtgtgttttgataccagtgtgctgatgcagagcgtttatttacttgttaggattttgtgttttcatttgctatttttctttaagtgcagagttcatttttgcccctgaaaagtttttgctgagtttgctgaagaaattgtatttcaaccacatccatgaaaataaaacacctcctgttgtggatggtgagcccctgatgccgcttatttgccgtgagtttggacggcacccctgctggcggatagcaagactctgtggagtttgttcagtggtacggtgtccaagcaaacagcagaatgcaactttctaaacagccccaagcaaacagcagaattcaactttttaaacaataaacaccatcaaccttattgactttattgtcccttaaattatattgactgttgtgattccatcaagtttgtacactcttttctctccctgttttgcagcaacaaattgcgaagtgcttttgtttgtttgttttcgtttggttaaagcttattgccatgctggtgcggctatggagactgtctggaaggcttggaatggtttattgcttatggtaaaatttgcctgatttcttacaggcagcgtttggaaaccttttattatatagttgtttacatacttataagtctatcatttaaagacatgtactgaaacaaatgtatttgtttcataagcatcttcctgtaatctattataaaattgaaattaaatatagagaatgttttaacaattttttaactcaaaatttgtcaatcatttttaatagttctttttttataaaaagaaaaaggaatttaaggacaggcagtagtctcttttaaaatttattcacaaaacccattaactgcacagttgctattagctgcctgttctaaaacgatagtctttttattgaaacacaaataaacttttctgtaatattttatggtatataaagagactttaattgtttgacttgtttaacttggcactgttagtttttattaataaaacgcgcatgggcattttaaa

SEQ ID NO: 192317 - DNA, 866 bp, Homo sapiens
  Payload ID: 17985
  Gene Name: transcription factor Dp-1
  ENST ID: ENST00000408980
  CDS Start-End: 160-866
gtcagagttaccggtcagccgggcgggcgccgccggggtctggggtggacgccgcgagcctgcacgttgcgccgggaccccggggctgtgcccagaaaaatcatttttcttctctgggaaggtgaacatttgtagcattgatttcccggatctggtaacatggcaaaagatgccggtctaattgaagccaacggagaactcaaggtcttcatagaccagaaccttagtcccgggaaaggcgtggtgtccctcgtggccgttcacccctccaccgtcaacccgctcgggaagcagctcttgccaaaaacctttggacagtccaatgtcaacattgcccagcaagtggtaattggtacgcctcagagaccggcagcgtcaaacaccctggtggtaggaagcccacacacccccagcactcactttgcctctcagaaccagccttccgactcctcaccttggtctgccgggaagcgcaacaggaaaggagagaagaatggcaagggcctacggcatttctccatgaaggtctgcgagaaggtgcagaggaaagggaccacttcctacaacgaagtggcagacgagctggttgcggagttcagtgctgccgacaaccacatcttaccaaacgagtcagcttatgaccagaaaaacataagacggcgcgtctacgatgccttaaacgtgctaatggccatgaacatcatctccaaggagaagaaggagatcaagtggattggtctgcccaccaactcggctcaggaatgtcagaacttagaggtggaaagacagaggagacttgaaagaataaaacagaaacagtctcaacttcaagaacttattctacagcaaattgccttcaagaacct

SEQ ID NO: 192318 - DNA, 792 bp, Homo sapiens
  Payload ID: 17985
  Gene Name: transcription factor Dp-1
  ENST ID: ENST00000453989
  CDS Start-End: 317-792
aggtgggtggtggggcacccccctgcagcggcgggagggaggcgctgcgccctggctcctggggctcggccccaccctcggccgctgggcgggccgtcggggacctgggggtagtggtggtgaccctgcgggcccgcgggccacttttccgcagggggcatttccgtctggcgaggcgactgaaaatcctgagtgtgggagtcggtttggccagctccgctctcaggatggagggtgcctttgggaaggaagaaaaatcatttttcttctctgggaaggtgaacatttgtagcattgatttcccggatctggtaacatggcaaaagatgccggtctaattgaagccaacggagaactcaaggtcttcatagaccagaaccttagtcccgggaaaggcgtggtgtccctcgtggccgttcacccctccaccgtcaacccgctcgggaagcagctcttgccaaaaacctttggacagtccaatgtcaacattgcccagcaagtggtaattggtacgcctcagagaccggcagcgtcaaacaccctggtggtaggaagcccacacacccccagcactcactttgcctctcagaaccagccttccgactcctcaccttggtctgccgggaagcgcaacaggaaaggagagaagaatggcaagggcctacggcatttctccatgaaggtctgcgagaaggtgcagaggaaagggaccacttcctacaacgaagtggcagacgagctggttgcggagttcagtgctgccgacaaccacatcttaccaaacgagtcagt

SEQ ID NO: 192319 - DNA, 1571 bp, Homo sapiens
  Payload ID: 17985
  Gene Name: transcription factor Dp-1
  ENST ID: ENST00000544902
  CDS Start-End: 220-579
gtgcggaggcggcccgaggcctagtgacaggcgcgcggcgcggaccccggaagcccacctgtcagagttaccggtcagccgggcgggcgccgccggggtctggggtggacgccgcgagcctgcacgttgcgccgggaccccggggctgtgcccagaaaaatcatttttcttctctgggaaggtgaacatttgtagcattgatttcccggatctggtaacatggcaaaagatgccggtctaattgaagccaacggagaactcaaggtcttcatagaccagaaccttagtcccgggaaaggcgtggtgtccctcgtggccgttcacccctccaccgtcaacccgctcgggaagcagctcttgccaaaaacctttggacagtccaatgtcaacattgcccagcaagtggaagcgcaacaggaaaggagagaagaatggcaagggcctacggcatttctccatgaaggtctgcgagaaggtgcagaggaaagggaccacttcctacaacgaagtggcagacgagctggttgcggagttcagtgctgccgacaaccacatcttaccaaacgagtcagcttatgaccagaaaaacataagacggcgcgtctacgatgccttaaacgtgctaatggccatgaacatcatctccaaggagaagaaggagatcaagtggattggtctgcccaccaactcggctcaggaatgtcagaacttagaggtggaaagacagaggagacttgaaagaataaaacagaaacagtctcaacttcaagaacttattctacagcaaattgccttcaagaacctggtgcagagaaaccggcatgcggagcagcaggccagccggccaccgccacccaactcagtcatccacctgcccttcatcatcgtcaacaccagcaagaagacggtcatcgactgcagcatctccaatgacaaatttgagtatctgtttaattttgacaacacatttgaaatccacgatgacatagaagtgctgaagcggatgggcatggcttgcgggctggagtcggggagctgctctgccgaagaccttaaaatggccagaagtctggtccccaaggctctggagccatacgtgacagagaagacaggcttatgtgactgcacagcgggatgtcctgctccgtggcgcagtgtggaaaatactggacaagcgaaggatatccggaagcttctacagccgtctgtcctgtggaactgcgcgtcattttgttggttgcctgtgcgtcttgtgttgtttctgtttcatgaccattcgcttattttctttcccttttcagaaatggctcagggaactgttggaggcgtgttcatcacgacggcaggttccacgtctaacggcacaaggttctctgccagtgacctgaccaacggtgcagatgggatgctggccacaagctccaatgggtctcagtacagcggctccagggtggagactccggtgtcctacgtcggggaggacgacgaggaggacgatgacttcaacgagaatgacgaggacgactgacgtcctccccacttcagattcggcttcaggaaaacgtttagcg

SEQ ID NO: 192320 - DNA, 578 bp, Homo sapiens
  Payload ID: 17986
  Gene Name: transcription factor Dp-2 (E2F dimerization partner 2)
  ENST ID: ENST00000475734
  CDS Start-End: 441-578
aaagctcgcgcgggggaagcggggctgtagctgggcagggagagggcggacgaaatcggtagcgatctcggctgcggcgctgccgcagctgcccggcccgcggggcgcgccctgacccttcatctttgggcaggctcgagggcgcgcgcacggttggcgttctggggcctcaaactcctgggccttgaccgggcaggccgcgtctccccgggtgtgagtccaccgggacccggccgccgcctaagcgcgggcgccacagaagcggcggcgcccgaagacgcgctcctggctcggcccgacagcctcgcttggccgccagttcttctgcagccgaaggcggcaacatttcatttgttgcatttccagtttccaataccaactcacctacaaagattttaccaaaaaccttaggaccaataaatgtgaatgttggaccccaaatgattataagcacaccacagagactaaccagttcaggaagtgttctgattgggagtccatatacccctgcaccagcaatggttactcagacacacatagcagaagctactggctgggtccctggtgatagaaaacgg

SEQ ID NO: 192321 - DNA, 878 bp, Homo sapiens
  Payload ID: 17986
  Gene Name: transcription factor Dp-2 (E2F dimerization partner 2)
  ENST ID: ENST00000497579
  CDS Start-End: 218-878
gaaactcgtggtgcttttgctctgctttcaagatgcattaagtctcctgctttgtgactgctttggagccagcagatactctgatatgtataattcaaattatgcaggtttcacgagcaacatttcatttgttgcatttccagtttccaataccaactcacctacaaagattttaccaaaaaccttaggaccaataaatgtgaatgttggaccccaaatgattataagcacaccacagagactaaccagttcaggaagtgttctgattgggagtccatatacccctgcaccagcaatggttactcagacacacatagcagaagctactggctgggtccctggtgatagaaaacgggctagaaaatttatagactctgatttttcagaaagtaaacgaagcaaaaaaggagataaaaatgggaaaggcttgagacacttttcaatgaaagtgtgtgagaaagttcaacgaaaaggtacaacatcgtacaatgaagtcgctgatgagctggtgtcagagttcaccaattcaaataaccatttggctgctgattcggcttatgatcagaagaacattaggcgaagagtttatgatgctttaaatgtgctaatggcaatgaacataatttcaaaggaaaaaaaagaaatcaagtggattggcctgcctaccaattctgctcaggaatgtcagaatctggagatagagaagcagaggcggatagaacggataaagcagaagcgggcccagctgcaagaacttctcctacagcaaatcgctttcaaaaacctggtacagagaaatcgacaaaatgagcagcaaaaccagggcccgccggctctgaactctaccattcagctgccattcataatcatcaatacaa

SEQ ID NO: 192322 - DNA, 1469 bp, Homo sapiens
  Payload ID: 17986
  Gene Name: transcription factor Dp-2 (E2F dimerization partner 2)
  ENST ID: ENST00000487734
  CDS Start-End: 9-221
agtttgacatgacggcaaaaaatgttggtttgacttccacaaatgcagaagtaagaggatttatagatcagaatctcagtccaacaaaaggcaacatttcatttgttgcatttccagtttccaataccaactcacctacaaagattttaccaaaaaccttaggaccaataaatgtgaatgttggaccccaaatggatgcaaccagaaggcatcatctttgaagcagagaataaaccctcaccaggcactgaatctgccggcactttcattttggacctctcagcaacctccagaacaattataagcacaccacagagactaaccagttcaggaagtgttctgattgggagtccatatacccctgcaccagcaatggttactcagacacacatagcagaagctactggctgggtccctggtgatagaaaacgggctagaaaatttatagactctgatttttcagaaagtaaacgaagcaaaaaaggagataaaaatgggaaaggcttgagacacttttcaatgaaagtgtgtgagaaagttcaacgaaaaggtacaacatcgtacaatgaagtcgctgatgagctggtgtcagagttcaccaattcaaataaccatttggctgctgattcggcttatgatcagaagaacattaggcgaagagtttatgatgctttaaatgtgctaatggcaatgaacataatttcaaaggaaaaaaaagaaatcaagtggattggcctgcctaccaattctgctcaggaatgtcagaatctggagatagagaagcagaggcggatagaacggataaagcagaagcgggcccagctgcaagaacttctcctacagcaaatcgctttcaaaaacctggtacagagaaatcgacaaaatgagcagcaaaaccagggcccgccggctctgaactctaccattcagctgccattcataatcatcaatacaagcagaaaaacagtcatagattgcagcatctccagtgacaagtttgagtatcttttcaattttgacaacacctttgagatccatgatgacatagaagtactaaagcggatgggaatgtcgtttggcctggagtcaggcaaatgctctctggaggatctgaaacttgcgaaatccctggtgccaaaggctttagaaggttatatcacagatatctccacaggaccttcttggttaaatcagggactacttctgaactctacccaatcagtttcaaatttagacctgaccactggtgccaccttaccccagtcaagtgtaaaccaagggttatgcttggatgcagaagtggccttagcaactgggcagttcctggccccaaacagtcaccagtccagcagtgcggcctctcactgctccgagtcccgaggcgagaccccctgttcgttcaatgatgaagatgaggaagatgatgaggaggattcctcctccccagaataaagacaagagaaagccta

SEQ ID NO: 192323 - DNA, 1201 bp, Homo sapiens
  Payload ID: 17986
  Gene Name: transcription factor Dp-2 (E2F dimerization partner 2)
  Uniprot ID: Q14188
  ENST ID: ENST00000479040
  CDS Start-End: 27-1184
caataaatgtgaatgttggaccccaaatgattataagcacaccacagagactaaccagttcaggaagtgttctgattgggagtccatatacccctgcaccagcaatggttactcagacacacatagcagaagctactggctgggtccctggtgatagaaaacgggctagaaaatttatagactctgatttttcagaaagtaaacgaagcaaaaaaggagataaaaatgggaaaggcttgagacacttttcaatgaaagtgtgtgagaaagttcaacgaaaaggtacaacatcgtacaatgaagtcgctgatgagctggtgtcagagttcaccaattcaaataaccatttggctgctgattcggcttatgatcagaagaacattaggcgaagagtttatgatgctttaaatgtgctaatggcaatgaacataatttcaaaggaaaaaaaagaaatcaagtggattggcctgcctaccaattctgctcaggaatgtcagaatctggagatagagaagcagaggcggatagaacggataaagcagaagcgggcccagctgcaagaacttctcctacagcaaatcgctttcaaaaacctggtacagagaaatcgacaaaatgagcagcaaaaccagggcccgccggctctgaactctaccattcagctgccattcataatcatcaatacaagcagaaaaacagtcatagattgcagcatctccagtgacaagtttgagtatcttttcaattttgacaacacctttgagatccatgatgacatagaagtactaaagcggatgggaatgtcgtttggcctggagtcaggcaaatgctctctggaggatctgaaacttgcgaaatccctggtgccaaaggctttagaaggttatatcacagatatctccacaggaccttcttggttaaatcagggactacttctgaactctacccaatcagtttcaaatttagacctgaccactggtgccaccttaccccagtcaagtgtaaaccaagggttatgcttggatgcagaagtggccttagcaactgggcagttcctggccccaaacagtcaccagtccagcagtgcggcctctcactgctccgagtcccgaggcgagaccccctgttcgttcaatgatgaagatgaggaagatgatgaggaggattcctcctccccagaataaagacaagagaaagccta

SEQ ID NO: 192324 - DNA, 865 bp, Homo sapiens
  Payload ID: 17986
  Gene Name: transcription factor Dp-2 (E2F dimerization partner 2)
  ENST ID: ENST00000467667
  CDS Start-End: 121-865
gcatgcttccttagaccaggcaacatttcatttgttgcatttccagtttccaataccaactcacctacaaagattttaccaaaaaccttaggaccaataaatgtgaatgttggaccccaaatgattataagcacaccacagagactaaccagttcaggaagtgttctgattgggagtccatatacccctgcaccagcaatggttactcagacacacatagcagaagctactggctgggtccctggtgatagaaaacgggctagaaaatttatagactctgatttttcagaaagtaaacgaagcaaaaaaggagataaaaatgggaaaggcttgagacacttttcaatgaaagtgtgtgagaaagttcaacgaaaaggtacaacatcgtacaatgaagtcgctgatgagctggtgtcagagttcaccaattcaaataaccatttggctgctgattcgcaggcttatgatcagaagaacattaggcgaagagtttatgatgctttaaatgtgctaatggcaatgaacataatttcaaaggaaaaaaaagaaatcaagtggattggcctgcctaccaattctgctcaggaatgtcagaatctggagatagagaagcagaggcggatagaacggataaagcagaagcgggcccagctgcaagaacttctcctacagcaaatcgctttcaaaaacctggtacagagaaatcgacaaaatgagcagcaaaaccagggcccgccggctctgaactctaccattcagctgccattcataatcatcaatacaagcagaaaaacagtcatagattgcagcatctccagtgacaagtttgagtatcttttcaattttgacaacacctttgagatcc

SEQ ID NO: 192325 - DNA, 746 bp, Homo sapiens
  Payload ID: 17986
  Gene Name: transcription factor Dp-2 (E2F dimerization partner 2)
  ENST ID: ENST00000478006
  CDS Start-End: 129-746
agactgtagaatgttgttggtactgcagtgagaggcatgcttccttagaccagattataagcacaccacagagactaaccagttcaggaagtgttctgattgggagtccatatacccctgcaccagcaatggttactcagacacacatagcagaagctactggctgggtccctggtgatagaaaacgggctagaaaatttatagactctgatttttcagaaagtaaacgaagcaaaaaaggagataaaaatgggaaaggcttgagacacttttcaatgaaagtgtgtgagaaagttcaacgaaaaggtacaacatcgtacaatgaagtcgctgatgagctggtgtcagagttcaccaattcaaataaccatttggctgctgattcgcaggcttatgatcagaagaacattaggcgaagagtttatgatgctttaaatgtgctaatggcaatgaacataatttcaaaggaaaaaaaagaaatcaagtggattggcctgcctaccaattctgctcaggaatgtcagaatctggagatagagaagcagaggcggatagaacggataaagcagaagcgggcccagctgcaagaacttctcctacagcaaatcgctttcaaaaacctggtacagagaaatcgacaaaatgagcagcaaaaccagggcccgccggctctgaactctaccattcagctgccattcataatcatcaatacaagcagaaaaacagtcatagattgcagcatctcc

SEQ ID NO: 192326 - DNA, 1853 bp, Homo sapiens
  Payload ID: 17986
  Gene Name: transcription factor Dp-2 (E2F dimerization partner 2)
  Uniprot ID: Q14188
  ENST ID: ENST00000467072
  CDS Start-End: 661-1821
gctccgccgccaaagctcgcgcgggggaagcggggctgtagctgggcagggagagggcggacgaaatcggtagcgatctcggctgcggcgctgccgcagctgcccggcccgcggggcgcgccctgacccttcatctttgggcaggctcgagggcgcgcgcacggttggcgttctggggcctcaaactcctgggccttgaccgggcaggccgcgtctccccgggtgtgagtccaccgggacccggccgccgcctaagcgcgggcgccacagaagcggcggcgcccgaagacgcgctcctggctcggcccgacagcctcgcttggccgccagttcttctgcagccgaaggcggttgttcttttaaagaattattgaagacgaaggtttttttctttttatttttttaatggctttacagaatcttaaatagaatacagtttgacatgacggcaaaaaatgttggtttgacttccacaaatgcagaagtaagaggatttatagatcagaatctcagtccaacaaaaggtaaatacctagaagtggaattgctgggtcatatggcaacatttcatttgttgcatttccagtttccaataccaactcacctacaaagattttaccaaaaaccttaggaccaataaatgtgaatgttggaccccaaatgattataagcacaccacagagactaaccagttcaggaagtgttctgattgggagtccatatacccctgcaccagcaatggttactcagacacacatagcagaagctactggctgggtccctggtgatagaaaacgggctagaaaatttatagactctgatttttcagaaagtaaacgaagcaaaaaaggagataaaaatgggaaaggcttgagacacttttcaatgaaagtgtgtgagaaagttcaacgaaaaggtacaacatcgtacaatgaagtcgctgatgagctggtgtcagagttcaccaattcaaataaccatttggctgctgattcgcaggcttatgatcagaagaacattaggcgaagagtttatgatgctttaaatgtgctaatggcaatgaacataatttcaaaggaaaaaaaagaaatcaagtggattggcctgcctaccaattctgctcaggaatgtcagaatctggagatagagaagcagaggcggatagaacggataaagcagaagcgggcccagctgcaagaacttctcctacagcaaatcgctttcaaaaacctggtacagagaaatcgacaaaatgagcagcaaaaccagggcccgccggctctgaactctaccattcagctgccattcataatcatcaatacaagcagaaaaacagtcatagattgcagcatctccagtgacaagtttgagtatcttttcaattttgacaacacctttgagatccatgatgacatagaagtactaaagcggatgggaatgtcgtttggcctggagtcaggcaaatgctctctggaggatctgaaacttgcgaaatccctggtgccaaaggctttagaaggttatatcacagatatctccacaggaccttcttggttaaatcagggactacttctgaactctacccaatcagtttcaaatttagacctgaccactggtgccaccttaccccagtcaagtgtaaaccaagggttatgcttggatgcagaagtggccttagcaactgggcagttcctggccccaaacagtcaccagtccagcagtgcggcctctcactgctccgagtcccgaggcgagaccccctgttcgttcaatgatgaagatgaggaagatgatgaggaggattcctcctccccagaataaagacaagagaaagcctacgtttcaatatgtga

SEQ ID NO: 192327 - DNA, 1403 bp, Homo sapiens
  Payload ID: 17986
  Gene Name: transcription factor Dp-2 (E2F dimerization partner 2)
  Uniprot ID: Q14188
  ENST ID: ENST00000477292
  CDS Start-End: 101-1033
gtagaatgttgttggtactgcagtgagaggcatgcttccttagaccagtaaacgaagcaaaaaaggagataaaaatgggaaaggcttgagacacttttcaatgaaagtgtgtgagaaagttcaacgaaaaggtacaacatcgtacaatgaagtcgctgatgagctggtgtcagagttcaccaattcaaataaccatttggctgctgattcggcttatgatcagaagaacattaggcgaagagtttatgatgctttaaatgtgctaatggcaatgaacataatttcaaaggaaaaaaaagaaatcaagtggattggcctgcctaccaattctgctcaggaatgtcagaatctggagatagagaagcagaggcggatagaacggataaagcagaagcgggcccagctgcaagaacttctcctacagcaaatcgctttcaaaaacctggtacagagaaatcgacaaaatgagcagcaaaaccagggcccgccggctctgaactctaccattcagctgccattcataatcatcaatacaagcagaaaaacagtcatagattgcagcatctccagtgacaagtttgagtatcttttcaattttgacaacacctttgagatccatgatgacatagaagtactaaagcggatgggaatgtcgtttggcctggagtcaggcaaatgctctctggaggatctgaaacttgcgaaatccctggtgccaaaggctttagaaggttatatcacagatatctccacaggaccttcttggttaaatcagggactacttctgaactctacccaatcagtttcaaatttagacctgaccactggtgccaccttaccccagtcaagtgtaaaccaagggttatgcttggatgcagaagtggccttagcaactgggcagttcctggccccaaacagtcaccagtccagcagtgcggcctctcactgctccgagtcccgaggcgagaccccctgttcgttcaatgatgaagatgaggaagatgatgaggaggattcctcctccccagaataaagacaagagaaagcctacgtttcaatatgtgatgctcatgtgtgtttgtagtgtgagctcttgtttttgaaatgattgcttcagtctttgcctttgtttgcactgtgtgttcagtgaaaactagagaaacacaataagcaaatcacatgaaggctgagatgattgagatgaaagttaacatagtgtgaatgaaagtctggccaacagagcagtagatgatataacaaagaaagcatgctttctgaggagatagtggggataatccctgaagagttggcagtgtgagtgcaactcatttatcttctgtgaggtgggatttttgtgttcctcacacccatgtaattattcttagaattgagattgctacacg

SEQ ID NO: 192328 - DNA, 1442 bp, Homo sapiens
  Payload ID: 17986
  Gene Name: transcription factor Dp-2 (E2F dimerization partner 2)
  Uniprot ID: Q14188
  ENST ID: ENST00000495310
  CDS Start-End: 156-1205
actgaatggtaacaaagactgtagaatgttgttggtactgcagtgagaggcatgcttccttagaccaggcaacatttcatttgttgcatttccagtttccaataccaactcacctacaaagattttaccaaaaaccttaggaccaataaatgtgaatgttggaccccaaatgtgatagaaaacgggctagaaaatttatagactctgatttttcagaaagtaaacgaagcaaaaaaggagataaaaatgggaaaggcttgagacacttttcaatgaaagtgtgtgagaaagttcaacgaaaaggtacaacatcgtacaatgaagtcgctgatgagctggtgtcagagttcaccaattcaaataaccatttggctgctgattcggcttatgatcagaagaacattaggcgaagagtttatgatgctttaaatgtgctaatggcaatgaacataatttcaaaggaaaaaaaagaaatcaagtggattggcctgcctaccaattctgctcaggaatgtcagaatctggagatagagaagcagaggcggatagaacggataaagcagaagcgggcccagctgcaagaacttctcctacagcaaatcgctttcaaaaacctggtacagagaaatcgacaaaatgagcagcaaaaccagggcccgccggctctgaactctaccattcagctgccattcataatcatcaatacaagcagaaaaacagtcatagattgcagcatctccagtgacaagtttgagtatcttttcaattttgacaacacctttgagatccatgatgacatagaagtactaaagcggatgggaatgtcgtttggcctggagtcaggcaaatgctctctggaggatctgaaacttgcgaaatccctggtgccaaaggctttagaaggttatatcacagatatctccacaggaccttcttggttaaatcagggactacttctgaactctacccaatcagtttcaaatttagacctgaccactggtgccaccttaccccagtcaagtgtaaaccaagggttatgcttggatgcagaagtggccttagcaactgggcagttcctggccccaaacagtcaccagtccagcagtgcggcctctcactgctccgagtcccgaggcgagaccccctgttcgttcaatgatgaagatgaggaagatgatgaggaggattcctcctccccagaataaagacaagagaaagcctacgtttcaatatgtgatgctcatgtgtgtttgtagtgtgagctcttgtttttgaaatgattgcttcagtctttgcctttgtttgcactgtgtgttcagtgaaaactagagaaacacaataagcaaatcacatgaaggctgagatgattgagatgaaagttaacatagtgtgaatgaaagtctggccaacagagcagtagatgatataacaaagaaagcatg

SEQ ID NO: 192329 - DNA, 379 bp, Homo sapiens
  Payload ID: 17986
  Gene Name: transcription factor Dp-2 (E2F dimerization partner 2)
  ENST ID: ENST00000474279
  CDS Start-End: 1-343
agattgcagcatctccagtgacaagtttgagtatcttttcaattttgacaacacctttgagatccatgatgacatagaagtactaaagcggatgggaatgtcgtttggcctggagtcaggcaaatgctctctggaggatctgaaacttgcgaaatccctggtgccaaaggctttagaaggttatatcacagatatctccacaggaccttcttggttaaatcagggactacttctgaactctacccaatcagtttcaaatttagacctgaccactggtgccaccttaccccagtcaaggtacgtatttttttcagggttagaaaggcaaaccccagagccctgactgtctgtgtaggggtgagccggggtcatgttactg

SEQ ID NO: 192330 - DNA, 571 bp, Homo sapiens
  Payload ID: 17986
  Gene Name: transcription factor Dp-2 (E2F dimerization partner 2)
  ENST ID: ENST00000467634
  CDS Start-End: 315-571
ttctggcttttaaaaaaactgtgttgtttctgtaataaaatctgggaatgtgtagtcccagctactcgggaggctgaggcaggagaatcgcttgaatccgggaggcggaggttgcagtgagccaagatcgtgccacttcactccagcctggtgacagagagagactacatctcaaaaaaaaaaaaaaaagaaaagaaaaaaattctgggaaccccatgactggttgttcttttaaagaattattgaagacgaaggtttttttctttttatttttttaatggctttacagaatcttaaatagaatacagtttgacatgacggcaaaaaatgttggtttgacttccacaaatgcagaagtaagaggatttatagatcagaatctcagtccaacaaaaggcaacatttcatttgttgcatttccagtttccaataccaactcacctacaaagattttaccaaaaaccttaggaccaataaatgtgaatgttggaccccaaatgattataagcacaccacagagactaaccagttcaggaagtgttctgattgggagtccatatacccctgcacc

SEQ ID NO: 192331 - DNA, 416 bp, Homo sapiens
  Payload ID: 17986
  Gene Name: transcription factor Dp-2 (E2F dimerization partner 2)
  ENST ID: ENST00000488107
  CDS Start-End: 149-416
ctgtaatcccagcactttggggggccaaggtgggcggatcacctgaggcaacatttcatttgttgcatttccagtttccaataccaactcacctacaaagattttaccaaaaaccttaggaccaataaatgtgaatgttggaccccaaatgattataagcacaccacagagactaaccagttcaggaagtgttctgattgggagtccatatacccctgcaccagcaatggttactcagacacacatagcagaagctactggctgggtccctggtgatagaaaacgggctagaaaatttatagactctgatttttcagaaagtaaacgaagcaaaaaaggagataaaaatgggaaaggcttgagacacttttcaatgaaagtgtgtgagaaagttcaacgaaaaggtacaacatcgt

SEQ ID NO: 192332 - DNA, 2360 bp, Homo sapiens
  Payload ID: 17986
  Gene Name: transcription factor Dp-2 (E2F dimerization partner 2)
  Uniprot ID: Q14188
  ENST ID: ENST00000486111
  CDS Start-End: 189-1349
gacacagtctcaagtttccactgaatggtaacaaagactgtagaatgttgttggtactgcagtgagaggcatgcttccttagaccaggcaacatttcatttgttgcatttccagtttccaataccaactcacctacaaagattttaccaaaaaccttaggaccaataaatgtgaatgttggaccccaaatgattataagcacaccacagagactaaccagttcaggaagtgttctgattgggagtccatatacccctgcaccagcaatggttactcagacacacatagcagaagctactggctgggtccctggtgatagaaaacgggctagaaaatttatagactctgatttttcagaaagtaaacgaagcaaaaaaggagataaaaatgggaaaggcttgagacacttttcaatgaaagtgtgtgagaaagttcaacgaaaaggtacaacatcgtacaatgaagtcgctgatgagctggtgtcagagttcaccaattcaaataaccatttggctgctgattcgcaggcttatgatcagaagaacattaggcgaagagtttatgatgctttaaatgtgctaatggcaatgaacataatttcaaaggaaaaaaaagaaatcaagtggattggcctgcctaccaattctgctcaggaatgtcagaatctggagatagagaagcagaggcggatagaacggataaagcagaagcgggcccagctgcaagaacttctcctacagcaaatcgctttcaaaaacctggtacagagaaatcgacaaaatgagcagcaaaaccagggcccgccggctctgaactctaccattcagctgccattcataatcatcaatacaagcagaaaaacagtcatagattgcagcatctccagtgacaagtttgagtatcttttcaattttgacaacacctttgagatccatgatgacatagaagtactaaagcggatgggaatgtcgtttggcctggagtcaggcaaatgctctctggaggatctgaaacttgcgaaatccctggtgccaaaggctttagaaggttatatcacagatatctccacaggaccttcttggttaaatcagggactacttctgaactctacccaatcagtttcaaatttagacctgaccactggtgccaccttaccccagtcaagtgtaaaccaagggttatgcttggatgcagaagtggccttagcaactgggcagttcctggccccaaacagtcaccagtccagcagtgcggcctctcactgctccgagtcccgaggcgagaccccctgttcgttcaatgatgaagatgaggaagatgatgaggaggattcctcctccccagaataaagacaagagaaagcctacgtttcaatatgtgatgctcatgtgtgtttgtagtgtgagctcttgtttttgaaatgattgcttcagtctttgcctttgtttgcactgtgtgttcagtgaaaactagagaaacacaataagcaaatcacatgaaggctgagatgattgagatgaaagttaacatagtgtgaatgaaagtctggccaacagagcagtagatgatataacaaagaaagcatgctttctgaggagatagtggggataatccctgaagagttggcagtgtgagtgcaactcatttatcttctgtgaggtgggatttttgtgttcctcacacccatgtaattattcttagaattgagattgctacacggagcagtccttgacgatcgtgtttctgacgtttctcttccttgcctggactgcctttgacaaggcagaaatgaacatgaaaagtccccaggagaggggagctgtgtagtgagggatactgagggcagtcctgtggctgaggggcacagattgaactgctgaactagttggaggtctagatgaggtgctttacgcatcagctgccttagacagcttctagaaaggagcgagcgctacttcttaagtacttaagtgacatttagataatttatagtaaaactgaaattattattagccaatgcattggtgcatagaatttactagggctacttctggaagccaaaatagaatagcatttccatgtgcattaaatactttgccagcactgcctttgccagcatcctaaatctggagttttacaaagaaggaaactgtatctttaggttaatcaaagctatgcatttcatatagctttttcatttaaaacaagacaaagaaacaaattcctatgaccaaattgcttgcctacagttccctgcagtaattgtatgatctcacccagtgtgcaatttgtgaaaatgaaccaaatgtcattacttttgtcttaaagaaaagtctatttcaagaatatgaacagcagtg

SEQ ID NO: 192333 - DNA, 9857 bp, Homo sapiens
  Payload ID: 17986
  Gene Name: transcription factor Dp-2 (E2F dimerization partner 2)
  Uniprot ID: Q14188
  ENST ID: ENST00000489671
  CDS Start-End: 432-1772
aaagctcgcgcgggggaagcggggctgtagctgggcagggagagggcggacgaaatcggtagcgatctcggctgcggcgctgccgcagctgcccggcccgcggggcgcgccctgacccttcatctttgggcaggctcgagggcgcgcgcacggttggcgttctggggcctcaaactcctgggccttgaccgggcaggccgcgtctccccgggtgtgagtccaccgggacccggccgccgcctaagcgcgggcgccacagaagcggcggcgcccgaagacgcgctcctggctcggcccgacagcctcgcttggccgccagttcttctgcagccgaaggcggttgttcttttaaagaattattgaagacgaaggtttttttctttttatttttttaatggctttacagaatcttaaatagaatacagtttgacatgacggcaaaaaatgttggtttgacttccacaaatgcagaagtaagaggatttatagatcagaatctcagtccaacaaaaggcaacatttcatttgttgcatttccagtttccaataccaactcacctacaaagattttaccaaaaaccttaggaccaataaatgtgaatgttggaccccaaatgattataagcacaccacagagactaaccagttcaggaagtgttctgattgggagtccatatacccctgcaccagcaatggttactcagacacacatagcagaagctactggctgggtccctggtgatagaaaacgggctagaaaatttatagactctgatttttcagaaagtaaacgaagcaaaaaaggagataaaaatgggaaaggcttgagacacttttcaatgaaagtgtgtgagaaagttcaacgaaaaggtacaacatcgtacaatgaagtcgctgatgagctggtgtcagagttcaccaattcaaataaccatttggctgctgattcggcttatgatcagaagaacattaggcgaagagtttatgatgctttaaatgtgctaatggcaatgaacataatttcaaaggaaaaaaaagaaatcaagtggattggcctgcctaccaattctgctcaggaatgtcagaatctggagatagagaagcagaggcggatagaacggataaagcagaagcgggcccagctgcaagaacttctcctacagcaaatcgctttcaaaaacctggtacagagaaatcgacaaaatgagcagcaaaaccagggcccgccggctctgaactctaccattcagctgccattcataatcatcaatacaagcagaaaaacagtcatagattgcagcatctccagtgacaagtttgagtatcttttcaattttgacaacacctttgagatccatgatgacatagaagtactaaagcggatgggaatgtcgtttggcctggagtcaggcaaatgctctctggaggatctgaaacttgcgaaatccctggtgccaaaggctttagaaggttatatcacagatatctccacaggaccttcttggttaaatcagggactacttctgaactctacccaatcagtttcaaatttagacctgaccactggtgccaccttaccccagtcaagtgtaaaccaagggttatgcttggatgcagaagtggccttagcaactgggcagttcctggccccaaacagtcaccagtccagcagtgcggcctctcactgctccgagtcccgaggcgagaccccctgttcgttcaatgatgaagatgaggaagatgatgaggaggattcctcctccccagaataaagacaagagaaagcctacgtttcaatatgtgatgctcatgtgtgtttgtagtgtgagctcttgtttttgaaatgattgcttcagtctttgcctttgtttgcactgtgtgttcagtgaaaactagagaaacacaataagcaaatcacatgaaggctgagatgattgagatgaaagttaacatagtgtgaatgaaagtctggccaacagagcagtagatgatataacaaagaaagcatgctttctgaggagatagtggggataatccctgaagagttggcagtgtgagtgcaactcatttatcttctgtgaggtgggatttttgtgttcctcacacccatgtaattattcttagaattgagattgctacacggagcagtccttgacgatcgtgtttctgacgtttctcttccttgcctggactgcctttgacaaggcagaaatgaacatgaaaagtccccaggagaggggagctgtgtagtgagggatactgagggcagtcctgtggctgaggggcacagattgaactgctgaactagttggaggtctagatgaggtgctttacgcatcagctgccttagacagcttctagaaaggagcgagcgctacttcttaagtacttaagtgacatttagataatttatagtaaaactgaaattattattagccaatgcattggtgcatagaatttactagggctacttctggaagccaaaatagaatagcatttccatgtgcattaaatactttgccagcactgcctttgccagcatcctaaatctggagttttacaaagaaggaaactgtatctttaggttaatcaaagctatgcatttcatatagctttttcatttaaaacaagacaaagaaacaaattcctatgaccaaattgcttgcctacagttccctgcagtaattgtatgatctcacccagtgtgcaatttgtgaaaatgaaccaaatgtcattacttttgtcttaaagaaaagtctatttcaagaatatgaacagcagtgtttccttgtacatgtcaccttttttcacattttcattaatcagaatgaccttattgagcctactcctggggtcaattgcatttcaaactaatccaatatttagtgtttcacagaaacactagaaaacgttgaacactcctactgcctggatatatggtagtgcagttatgttgtttatggctcaagatgtcattagaaatactgcagtggtgtattcacagctgctccttctctgaatgaaagagtgtagggacacctgccaccatggccagaccctgactgaatttcacattaaggctttggaaaggagcaaataataatgggagaattaactccaaaactttgacctgaatcatgtggatttgtcccaagattatgctagatgcaccaagcatggcccaaattggttcttttttaaatcccatgggggaagtgcaggctccttcctgtggtgcctctttatagcctcaccaccatgctaacactgagcatggtgaggaggaggaagctttggctagctaaacatgtttaataaggccataaaaactgagaaagaaaaacattcaactttagctgaagctcctttgatacaaaagtttcattctgtcagaaataagccatagtacagactcagagatagaggcagtttctagagaactcggtcttatcgtgggttctggagcacacctctcagaccagtcaggaacactggggaggtgacagcaggtccccaggggcctgcagggaatctttcagctgcacggattgggatttccctccaaaccaaactgtcctttaaggggcagcctcctcttttactaactccaccctttctcatctctgggacccagcagggacctggagaggccaacagccactgctacctttgtagtcttcaaaatattgaactgcaggtcccaagatgcatttcaggatttaagacaggtgcactaatgataaccattccttcaccaagtagcaacattcttgccagagttcttgggaaacctgtttttttctctactctccatctctgctgctctcatgctttaaattgataaaatatgggctcaaaaaaagaaagccgccaaagactcttatccttattggtgccccatcattggccaccccagccataggtgtgtgctgttggtgggaaatggtctccttcctcagcgttgtgtttgggttactggtgaggccagctcacagagtgacatcatggtcaccagtacatgtcgctggagtaaaatcttgcctttagaaactaggttgagctgttcagaaaggtcaattctcttctgtattccccctcaacatttatctgggtctaaagctcagcactgagtcacaatttcacacaagatcaaagtgaggcagtgttaggaaaccatgggctgggtgcagtgcctctcgcctgtaatcgtagcactttgggaggccgaggcgggcacattgcttgagctcaggagttcaagaccagcctgggcaacatgacaaaaccctgtctctacaaaaatacaaaaattagctgggtgtggtggggcatgcctgtagtcctggctactcaagaggctgaggtgggaggattgcttgagcgcaggaggcggaggttgtagagccaagatcacaccactgcactccagcctgggtgacagagcaagaccctgtctcaaaaaaaaaaaaaaaaaaaatggaagttgtggtcacaatgcccaggcttctttgttatagtggcacgctgggttacttgccacacacagatcactcctcccagggctgctggcacacactgattgtggggagttcaagaggccttttccccttgagggtgtggctgtccccctttcaggcgtgtggcgtcattcatggaggaagtgctggctctacttagcacacgcacagtggcactaggacctgcgtgcctggccctcagtgggtagggcggtgctgcctaggcacacagcagcgcttacgggccccaggtgcctactaggctgccttcctcttccccgctgtcagtctgtgtcctccacgtgcttatttcctgtggtgagagcagttgtggtgtttgtataccttgtgccttatgatcaaggtgggccttggaggagggcgggaaaggagcgaccaacatggcggtcctccacccctcagcgacacccaccgcccgagaaactacagacaatggccacaagtttggcgtccttcaatttaattctttaaagaagtgctgggaagaaaaagctatgtggtttctaccattttagcaggataaagaggataactccttccattagcaaattttacagttgttaacagtactctgccatatttgaaaaataatgccagagtcagtccttgaaaacaaggtagctcctatcagaattcaaatggaaattttttttttttttttttttttttttgagactgagtctcgctctgttgcccaggctggagtgcagtggtgatctcggctcactgcaagctccgcctcccgggttcacgccattctcctgcctcagctgggaccatgcctggctaattttttttgtatttttagtagagacggggtttcaccgtgttagccaggatggtctcgatctcctgaccttatgatccacccctctcggcctcccaaagtgctgggattacaggcgtgagccaccgcacccggcctcaaatggaaatatttcacagaggagtggttcagtttagccctgcaagacatctataacttgactgtttgctaaaccacaactctttttggctacttgggtcatagagacagcagagttgctccaagtataaatgtgacttaggctccctccagcacacagtgtgtatgttggagggagtgtggattagcagagaatgagaactacctcagctattcctgccataaccacactgagagaggggggcacggtggggagcctatttagcttttttttttttttgagacggagtcttgctctgtcgccaggctggagtgtagtggcgcaatcccggctcactgcaacctctgcctcccgggttcaagcgattctcctgcctcagcctcccaagtagctgggattataggcgcatgccgccacacccgactaattttttgtatttttagtagagtcagggtttcaccgtgttgcccaggctggtgtcgaactcctgacctcaggtgatctgcccacctcagcctcccgaagtgctgggattacaggtgtgagccaccgcacccggctctatttagctttttaaaaattatttcctttcaagggccctttaatatctatcaagctccctcccctaacaaaatgggctgtccctgcccaacaagtctgaaatagaccttaaaactgtgctgccttagtggtaagtaaggggtgggggttggacagtgaatcttaagatttcatccttcattcagtaagcatttgagtacctactgtgagcaggcattggggcggagcagcgagagccctgccgatgttgggttctcctcctattggggaaacttgatcacagatggaacacgtgcagattgattgatgagtgctgtggagaaagcagcagcgtagcgggaccgtttgggaaaggctactttggctgggggtggctgggaaaggcccctctgggaaagagacagttttactgagtcagatggtggaaagacagatgtctctatactttcttaacaagccactctgtcccataacatgcacttggaatctctcctaagttccagaggccccactgttccagtttcaagccttcattttggagtctgtttgggaacttttaagacttcaaagcaaagttagctaccagcaatttctgtaaaccaagagaagattgtcacaaagattcactactttccaactgaatctatgcagtagaaaaatcattagaaaatacaaaaattagccgggcgtggtggcacatgcctgtagtcccagctactcgggaggctgaggcaggagaatcacttgaacccaggaggcggaggttgcagtgagccaagatcccgccactgcactccagcccaggtgacagagcaggactctgtctcaaaaaaagaaaaaagaaagaaagaaaaatgattagaaattgagaactattttacgtgtttctaagttgttggctacatcaaagagatcatctgtattctgcatatgggctggctttggtgaagctgatgactggacttctaagaaccgttttcccaaatgggttcccatattcatgcacccaaagcaatggtccccaagcactgatgaaaactaatatgcatttcccaaagacccacactatgtatcaggagcctgcaccatgccatttgaatgaccctcagcaatgtgcctccctgccctcaaattcccagttgataacagtgtttgattaaatttccactcaagccaaacatggttactaagaagagaaaaacctgatgtttgcataatattttttttcccctcgagatggagtcttgctctgttgcccaggctggagtgcagtggcatgatctcagccactgcaacctctgcctcccgggttcaagcgattcttctgcctcagcctcccaagtagttgggattacagacatgtgccaccacgcctggctaatttttgtatttttagtagagacagggtttcaccatgttgaccacactggtcttgaacttctaaccatgtgatctgcctgcctcggcctcccaaagtgctgggattacaggcttgagccaccacgcccagcctaagattttatgattaaaaaaaattcaagctcaatacccacataaattataacgtttctcaggaagtagtcccttaaccaaaacgtctctgagaagtgatgcttaggtaatctctgggatccgattttcccacatgtctcactccacagtatgctaaagaagaaaaagtgagtgggcacaacactttgaccctctggctaagccctgggagtccctgacaggtccagaaacttctctgacacccattcaccagggtgctgagataggagaaagtgctcatttataatgtgtattctgtgcagctgttctcagacaagaccggatcttgtcatcttaccttttgctttacaaaaaaggcctgttgaagtcaatgctgtcttgccccttgctgtttcagcaggttagactttggtcttcactgcttatagctgcattggaggccaacgtagctgatgctcagggtcaggcctcgccccttcgccgcaggtctcaggatcggggataacatcgctcccaccctgctcatttagagatgggaaacaagcaagagcttgacttgcctcccatccctcagcctgtctgtggcagagcctgcaccaaaacccagagcttcttccctccgtgagggccacgctgtcaccacagtcctcccagatgggttttggattagcatcagtcctgtgtcaccaagtgccaaacagctgaggggtagaagtgggactcctttcccgagccccagcatgaggctgtggtgtcaggtttaggcctctctcaagtcagaaaaccccgggctgagacctccacagacaagggctccccatgctggccattggcaggggcccaagaagttcagtgaccaactggtccttccacaccacaccagctggtgctgcccatgtctgtcgaatcataacggaaaattccccagatcacgtttggatttaaaaactcatcccttgtcgtgcttcaatgcatgccatttgtcacttaccatacttcaccatggccgagcttcatgtcacatggcctggcgattgtgcttgttcacactggggccaggattttcatactaaaacgtcactgacaatggggctacttttctcctgaatagctcctctgggcttgttgcagttctagttttcccagtagttccatggcaggttcaacctctcagtgtcctgaaaaatggaaccacccactaaccatatgcactggctgcccaggtggctgcactccggggatcacgtttcagtactgagttccttcacgcacttggttcaccaccatcactcttgagttttggacaaaagaggtgggtatgccaggcacagtggctcacgcctgtgatcccagcactttgggaggccgaggcgggcggatcacctgaggtcgggagttcgaaaccagcctgaccaacatggagaaaccctgtctctactaaaaatataaaattagccgggtgtggtggcgcatgcctgtaatcccagctactcgggaggctgaggcaggagaatctcttgaacccaggaggcaaaagttgcaatgagctgagatcgtgccatttgcactccagcctgggcaacaagagcgaaattccatctcaaaaaaaaaaggtgggtaaagggccatgagcccaaaccactaggttgttcaccttttcatctgaaaatgctttactctgactatgtgctattgggttttatttccagaaaatatagttctccttttttctgcatgaaggatacatcgtggtgccacatgctttaagcaatttaaacaagagagataagaggaaaatgcaaccaccacatctgacttgcccaatgtagactttcctttattagattgaagtacacaacctaatatgatatattattttgtagtatctcagactttgtaaataaatgccattatttttatatggaaattttatagaagagctatttctgtatacgtaattactcctgattttctgaaattgcttctggtagataacagacaagtcctaagcagtgttccactaagggtggttccaggcctgcctgccgtggagttgactgggggaattttacagttttgcgatcctaggatgcgtcccagacgctcagtcagaagtgctggaggtggggcctgggaagctgtatttgtaatgaactctggtgttttttgtccattaaagtgtatctttgtccatcctataagattaaaggaaagaaaaagcatctcaaatgagtgtaagttgttcttgagaaaaaaatgtatcagacttttatgatttgaatgaaatgtattatagaaaaaaataaacactttaaaataa

SEQ ID NO: 192334 - DNA, 578 bp, Homo sapiens
  Payload ID: 17986
  Gene Name: transcription factor Dp-2 (E2F dimerization partner 2)
  ENST ID: ENST00000494358
  CDS Start-End: 497-578
gaaatcggtagcgatctcggctgcggcgctgccgcagctgcccggcccgcggggcgcgccctgacccttcatctttgggcaggctcgagggcgcgcgcacggttggcgttctggggcctcaaactcctgggccttgaccgggcaggccgcgtctccccgggtgtgagtccaccgggacccggccgccgcctaagcgcgggcgccacagaagcggcggcgcccgaagacgcgctcctggctcggcccgacagcctcgcttggccgccagttcttctgcagccgaaggcggttgttcttttaaagaattattgaagacgaaggtttttttctttttatttttttaatggctttacagaatcttaaatagaatacagtttgacatgacggcaaaaaatgcaacatttcatttgttgcatttccagtttccaataccaactcacctacaaagattttaccaaaaaccttaggaccaataaatgtgaatgttggaccccaaatgattataagcacaccacagagactaaccagttcaggaagtgttctgattgggagtccatatacccctgcaccagcaatgg

SEQ ID NO: 192335 - DNA, 9335 bp, Homo sapiens
  Payload ID: 17986
  Gene Name: transcription factor Dp-2 (E2F dimerization partner 2)
  Uniprot ID: Q14188
  ENST ID: ENST00000499676
  CDS Start-End: 1-1257
atgcaaccagaaggcatcatctttgaagcagagaataaaccctcaccaggcactgaatctgccggcactttcattttggacctctcagcaacctccagaacaattataagcacaccacagagactaaccagttcaggaagtgttctgattgggagtccatatacccctgcaccagcaatggttactcagacacacatagcagaagctactggctgggtccctggtgatagaaaacgggctagaaaatttatagactctgatttttcagaaagtaaacgaagcaaaaaaggagataaaaatgggaaaggcttgagacacttttcaatgaaagtgtgtgagaaagttcaacgaaaaggtacaacatcgtacaatgaagtcgctgatgagctggtgtcagagttcaccaattcaaataaccatttggctgctgattcggcttatgatcagaagaacattaggcgaagagtttatgatgctttaaatgtgctaatggcaatgaacataatttcaaaggaaaaaaaagaaatcaagtggattggcctgcctaccaattctgctcaggaatgtcagaatctggagatagagaagcagaggcggatagaacggataaagcagaagcgggcccagctgcaagaacttctcctacagcaaatcgctttcaaaaacctggtacagagaaatcgacaaaatgagcagcaaaaccagggcccgccggctctgaactctaccattcagctgccattcataatcatcaatacaagcagaaaaacagtcatagattgcagcatctccagtgacaagtttgagtatcttttcaattttgacaacacctttgagatccatgatgacatagaagtactaaagcggatgggaatgtcgtttggcctggagtcaggcaaatgctctctggaggatctgaaacttgcgaaatccctggtgccaaaggctttagaaggttatatcacagatatctccacaggaccttcttggttaaatcagggactacttctgaactctacccaatcagtttcaaatttagacctgaccactggtgccaccttaccccagtcaagtgtaaaccaagggttatgcttggatgcagaagtggccttagcaactgggcagttcctggccccaaacagtcaccagtccagcagtgcggcctctcactgctccgagtcccgaggcgagaccccctgttcgttcaatgatgaagatgaggaagatgatgaggaggattcctcctccccagaataaagacaagagaaagcctacgtttcaatatgtgatgctcatgtgtgtttgtagtgtgagctcttgtttttgaaatgattgcttcagtctttgcctttgtttgcactgtgtgttcagtgaaaactagagaaacacaataagcaaatcacatgaaggctgagatgattgagatgaaagttaacatagtgtgaatgaaagtctggccaacagagcagtagatgatataacaaagaaagcatgctttctgaggagatagtggggataatccctgaagagttggcagtgtgagtgcaactcatttatcttctgtgaggtgggatttttgtgttcctcacacccatgtaattattcttagaattgagattgctacacggagcagtccttgacgatcgtgtttctgacgtttctcttccttgcctggactgcctttgacaaggcagaaatgaacatgaaaagtccccaggagaggggagctgtgtagtgagggatactgagggcagtcctgtggctgaggggcacagattgaactgctgaactagttggaggtctagatgaggtgctttacgcatcagctgccttagacagcttctagaaaggagcgagcgctacttcttaagtacttaagtgacatttagataatttatagtaaaactgaaattattattagccaatgcattggtgcatagaatttactagggctacttctggaagccaaaatagaatagcatttccatgtgcattaaatactttgccagcactgcctttgccagcatcctaaatctggagttttacaaagaaggaaactgtatctttaggttaatcaaagctatgcatttcatatagctttttcatttaaaacaagacaaagaaacaaattcctatgaccaaattgcttgcctacagttccctgcagtaattgtatgatctcacccagtgtgcaatttgtgaaaatgaaccaaatgtcattacttttgtcttaaagaaaagtctatttcaagaatatgaacagcagtgtttccttgtacatgtcaccttttttcacattttcattaatcagaatgaccttattgagcctactcctggggtcaattgcatttcaaactaatccaatatttagtgtttcacagaaacactagaaaacgttgaacactcctactgcctggatatatggtagtgcagttatgttgtttatggctcaagatgtcattagaaatactgcagtggtgtattcacagctgctccttctctgaatgaaagagtgtagggacacctgccaccatggccagaccctgactgaatttcacattaaggctttggaaaggagcaaataataatgggagaattaactccaaaactttgacctgaatcatgtggatttgtcccaagattatgctagatgcaccaagcatggcccaaattggttcttttttaaatcccatgggggaagtgcaggctccttcctgtggtgcctctttatagcctcaccaccatgctaacactgagcatggtgaggaggaggaagctttggctagctaaacatgtttaataaggccataaaaactgagaaagaaaaacattcaactttagctgaagctcctttgatacaaaagtttcattctgtcagaaataagccatagtacagactcagagatagaggcagtttctagagaactcggtcttatcgtgggttctggagcacacctctcagaccagtcaggaacactggggaggtgacagcaggtccccaggggcctgcagggaatctttcagctgcacggattgggatttccctccaaaccaaactgtcctttaaggggcagcctcctcttttactaactccaccctttctcatctctgggacccagcagggacctggagaggccaacagccactgctacctttgtagtcttcaaaatattgaactgcaggtcccaagatgcatttcaggatttaagacaggtgcactaatgataaccattccttcaccaagtagcaacattcttgccagagttcttgggaaacctgtttttttctctactctccatctctgctgctctcatgctttaaattgataaaatatgggctcaaaaaaagaaagccgccaaagactcttatccttattggtgccccatcattggccaccccagccataggtgtgtgctgttggtgggaaatggtctccttcctcagcgttgtgtttgggttactggtgaggccagctcacagagtgacatcatggtcaccagtacatgtcgctggagtaaaatcttgcctttagaaactaggttgagctgttcagaaaggtcaattctcttctgtattccccctcaacatttatctgggtctaaagctcagcactgagtcacaatttcacacaagatcaaagtgaggcagtgttaggaaaccatgggctgggtgcagtgcctctcgcctgtaatcgtagcactttgggaggccgaggcgggcacattgcttgagctcaggagttcaagaccagcctgggcaacatgacaaaaccctgtctctacaaaaatacaaaaattagctgggtgtggtggggcatgcctgtagtcctggctactcaagaggctgaggtgggaggattgcttgagcgcaggaggcggaggttgtagagccaagatcacaccactgcactccagcctgggtgacagagcaagaccctgtctcaaaaaaaaaaaaaaaaaaaatggaagttgtggtcacaatgcccaggcttctttgttatagtggcacgctgggttacttgccacacacagatcactcctcccagggctgctggcacacactgattgtggggagttcaagaggccttttccccttgagggtgtggctgtccccctttcaggcgtgtggcgtcattcatggaggaagtgctggctctacttagcacacgcacagtggcactaggacctgcgtgcctggccctcagtgggtagggcggtgctgcctaggcacacagcagcgcttacgggccccaggtgcctactaggctgccttcctcttccccgctgtcagtctgtgtcctccacgtgcttatttcctgtggtgagagcagttgtggtgtttgtataccttgtgccttatgatcaaggtgggccttggaggagggcgggaaaggagcgaccaacatggcggtcctccacccctcagcgacacccaccgcccgagaaactacagacaatggccacaagtttggcgtccttcaatttaattctttaaagaagtgctgggaagaaaaagctatgtggtttctaccattttagcaggataaagaggataactccttccattagcaaattttacagttgttaacagtactctgccatatttgaaaaataatgccagagtcagtccttgaaaacaaggtagctcctatcagaattcaaatggaaattttttttttttttttttttttttttgagactgagtctcgctctgttgcccaggctggagtgcagtggtgatctcggctcactgcaagctccgcctcccgggttcacgccattctcctgcctcagctgggaccatgcctggctaattttttttgtatttttagtagagacggggtttcaccgtgttagccaggatggtctcgatctcctgaccttatgatccacccctctcggcctcccaaagtgctgggattacaggcgtgagccaccgcacccggcctcaaatggaaatatttcacagaggagtggttcagtttagccctgcaagacatctataacttgactgtttgctaaaccacaactctttttggctacttgggtcatagagacagcagagttgctccaagtataaatgtgacttaggctccctccagcacacagtgtgtatgttggagggagtgtggattagcagagaatgagaactacctcagctattcctgccataaccacactgagagaggggggcacggtggggagcctatttagcttttttttttttttgagacggagtcttgctctgtcgccaggctggagtgtagtggcgcaatcccggctcactgcaacctctgcctcccgggttcaagcgattctcctgcctcagcctcccaagtagctgggattataggcgcatgccgccacacccgactaattttttgtatttttagtagagtcagggtttcaccgtgttgcccaggctggtgtcgaactcctgacctcaggtgatctgcccacctcagcctcccgaagtgctgggattacaggtgtgagccaccgcacccggctctatttagctttttaaaaattatttcctttcaagggccctttaatatctatcaagctccctcccctaacaaaatgggctgtccctgcccaacaagtctgaaatagaccttaaaactgtgctgccttagtggtaagtaaggggtgggggttggacagtgaatcttaagatttcatccttcattcagtaagcatttgagtacctactgtgagcaggcattggggcggagcagcgagagccctgccgatgttgggttctcctcctattggggaaacttgatcacagatggaacacgtgcagattgattgatgagtgctgtggagaaagcagcagcgtagcgggaccgtttgggaaaggctactttggctgggggtggctgggaaaggcccctctgggaaagagacagttttactgagtcagatggtggaaagacagatgtctctatactttcttaacaagccactctgtcccataacatgcacttggaatctctcctaagttccagaggccccactgttccagtttcaagccttcattttggagtctgtttgggaacttttaagacttcaaagcaaagttagctaccagcaatttctgtaaaccaagagaagattgtcacaaagattcactactttccaactgaatctatgcagtagaaaaatcattagaaaatacaaaaattagccgggcgtggtggcacatgcctgtagtcccagctactcgggaggctgaggcaggagaatcacttgaacccaggaggcggaggttgcagtgagccaagatcccgccactgcactccagcccaggtgacagagcaggactctgtctcaaaaaaagaaaaaagaaagaaagaaaaatgattagaaattgagaactattttacgtgtttctaagttgttggctacatcaaagagatcatctgtattctgcatatgggctggctttggtgaagctgatgactggacttctaagaaccgttttcccaaatgggttcccatattcatgcacccaaagcaatggtccccaagcactgatgaaaactaatatgcatttcccaaagacccacactatgtatcaggagcctgcaccatgccatttgaatgaccctcagcaatgtgcctccctgccctcaaattcccagttgataacagtgtttgattaaatttccactcaagccaaacatggttactaagaagagaaaaacctgatgtttgcataatattttttttcccctcgagatggagtcttgctctgttgcccaggctggagtgcagtggcatgatctcagccactgcaacctctgcctcccgggttcaagcgattcttctgcctcagcctcccaagtagttgggattacagacatgtgccaccacgcctggctaatttttgtatttttagtagagacagggtttcaccatgttgaccacactggtcttgaacttctaaccatgtgatctgcctgcctcggcctcccaaagtgctgggattacaggcttgagccaccacgcccagcctaagattttatgattaaaaaaaattcaagctcaatacccacataaattataacgtttctcaggaagtagtcccttaaccaaaacgtctctgagaagtgatgcttaggtaatctctgggatccgattttcccacatgtctcactccacagtatgctaaagaagaaaaagtgagtgggcacaacactttgaccctctggctaagccctgggagtccctgacaggtccagaaacttctctgacacccattcaccagggtgctgagataggagaaagtgctcatttataatgtgtattctgtgcagctgttctcagacaagaccggatcttgtcatcttaccttttgctttacaaaaaaggcctgttgaagtcaatgctgtcttgccccttgctgtttcagcaggttagactttggtcttcactgcttatagctgcattggaggccaacgtagctgatgctcagggtcaggcctcgccccttcgccgcaggtctcaggatcggggataacatcgctcccaccctgctcatttagagatgggaaacaagcaagagcttgacttgcctcccatccctcagcctgtctgtggcagagcctgcaccaaaacccagagcttcttccctccgtgagggccacgctgtcaccacagtcctcccagatgggttttggattagcatcagtcctgtgtcaccaagtgccaaacagctgaggggtagaagtgggactcctttcccgagccccagcatgaggctgtggtgtcaggtttaggcctctctcaagtcagaaaaccccgggctgagacctccacagacaagggctccccatgctggccattggcaggggcccaagaagttcagtgaccaactggtccttccacaccacaccagctggtgctgcccatgtctgtcgaatcataacggaaaattccccagatcacgtttggatttaaaaactcatcccttgtcgtgcttcaatgcatgccatttgtcacttaccatacttcaccatggccgagcttcatgtcacatggcctggcgattgtgcttgttcacactggggccaggattttcatactaaaacgtcactgacaatggggctacttttctcctgaatagctcctctgggcttgttgcagttctagttttcccagtagttccatggcaggttcaacctctcagtgtcctgaaaaatggaaccacccactaaccatatgcactggctgcccaggtggctgcactccggggatcacgtttcagtactgagttccttcacgcacttggttcaccaccatcactcttgagttttggacaaaagaggtgggtatgccaggcacagtggctcacgcctgtgatcccagcactttgggaggccgaggcgggcggatcacctgaggtcgggagttcgaaaccagcctgaccaacatggagaaaccctgtctctactaaaaatataaaattagccgggtgtggtggcgcatgcctgtaatcccagctactcgggaggctgaggcaggagaatctcttgaacccaggaggcaaaagttgcaatgagctgagatcgtgccatttgcactccagcctgggcaacaagagcgaaattccatctcaaaaaaaaaaggtgggtaaagggccatgagcccaaaccactaggttgttcaccttttcatctgaaaatgctttactctgactatgtgctattgggttttatttccagaaaatatagttctccttttttctgcatgaaggatacatcgtggtgccacatgctttaagcaatttaaacaagagagataagaggaaaatgcaaccaccacatctgacttgcccaatgtagactttcctttattagattgaagtacacaacctaatatgatatattattttgtagtatctcagactttgtaaataaatgccattatttttatatggaaattttatagaagagctatttctgtatacgtaattactcctgattttctgaaattgcttctggtagataacagacaagtcctaagcagtgttccactaagggtggttccaggcctgcctgccgtggagttgactgggggaattttacagttttgcgatcctaggatgcgtcccagacgctcagtcagaagtgctggaggtggggcctgggaagctgtatttgtaatgaactctggtgttttttgtccattaaagtgtatctttgtccatcctataagattaaaggaaagaaaaagcatctcaaatgagtgtaagttgttcttgagaaaaaaatgtatcagacttttatgatttgaatgaaatgtattatagaaaaaaataaacacttt

SEQ ID NO: 192336 - DNA, 496 bp, Homo sapiens
  Payload ID: 17986
  Gene Name: transcription factor Dp-2 (E2F dimerization partner 2)
  ENST ID: ENST00000494656
  CDS Start-End: 1-202
tgatagaaaacgggctagaaaatttatagactctgatttttcagaaagggctgaaacttggagaactgatcccagggaaacaactgcctgcttcagctggtttaagaattttagtatgccccagaacaggttttcctcatactggcatttgtatttgtgggaagagagagagaccagactggctgcctgcttgtctgcttagcagcaaatacaacctgaagttaagcttgttgccagcatggcccactcacatccagagaagttgtggttagccctccacaagtgggggaaccttcttaggaaaacaagcgtgcatacaagaagctcatgtaaactctatatattgaaaacttgaatccaacattcgtgaacatgaaagaacaggacatttttggaaaactatgatgaaagaaaaggaacaagatgaataaacaaaagttatgacccaagaggatgtaagataaaaaagaacaataaaataaagttgtaattatca

SEQ ID NO: 192337 - DNA, 2354 bp, Homo sapiens
  Payload ID: 17987
  Gene Name: transcription factor EB
  Uniprot ID: P19484
  ENST ID: ENST00000230323
  CDS Start-End: 303-1733
ggccgggcgggcatgggccttcccggcccggagctgggagtcgaaggggcgggaggcgtgatggtgaactcgcaagaagtttgagggacgcgcgggccccgcgcccactccccctccaccggacacggctggggccggcgatgcctgagagggggtcggaggacgcagtgaacatatatgcatgtacagtgtggatcctcatctgagaggagggagatgaaaacacacccacctcacaggctgttgtgaggactaagggtgcggcagtgcctggtacatgggagccagcgccggcagccaccatggcgtcacgcatagggttgcgcatgcagctcatgcgggagcaggcgcagcaggaggagcagcgggagcgcatgcagcaacaggctgtcatgcattacatgcagcagcagcagcagcagcaacagcagcagctcggagggccgcccaccccggccatcaatacccccgtccacttccagtcgccaccacctgtgcctggggaggtgttgaaggtgcagtcctacctggagaatcccacatcctaccatctgcagcagtcgcagcatcagaaggtgcgggagtacctgtccgagacctatgggaacaagtttgctgcccacatcagcccagcccagggctctccgaaacccccaccagccgcctccccaggggtgcgagctggacacgtgctgtcctcctccgctggcaacagtgctcccaatagccccatggccatgctgcacattggctccaaccctgagagggagttggatgatgtcattgacaacattatgcgtctggacgatgtccttggctacatcaatcctgaaatgcagatgcccaacacgctacccctgtccagcagccacctgaatgtgtacagcagcgacccccaggtcacagcctccctggtgggcgtcaccagcagctcctgccctgcggacctgacccagaagcgagagctcacagatgctgagagcagggccctggccaaggagcggcagaagaaagacaatcacaacttaattgaaaggagacgaaggttcaacatcaatgaccgcatcaaggagttgggaatgctgatccccaaggccaatgacctggacgtgcgctggaacaagggcaccatcctcaaggcctctgtggattacatccggaggatgcagaaggacctgcaaaagtccagggagctggagaaccactctcgccgcctggagatgaccaacaagcagctctggctccgtatccaggagctggagatgcaggctcgagtgcacggcctccctaccacctccccgtccggcatgaacatggctgagctggcccagcaggtggtgaagcaggagctgcctagcgaagagggcccaggggaggccctgatgctgggggctgaggtccctgaccctgagccactgccagctctgcccccgcaagccccgctgcccctgcccacccagccaccatccccattccatcacctggacttcagccacagcctgagctttgggggcagggaggacgagggtcccccgggctaccccgaacccctggcgccggggcatggctccccattccccagcctgtccaagaaggatctggacctcatgctcctggacgactcactgctaccgctggcctctgatccacttctgtccaccatgtcccccgaggcctccaaggccagcagccgccggagcagcttcagcatggaggagggcgatgtgctgtgaccctggctgcccctgtgccagggaacaggggccggcctgggggctgggagggccaggggcacctccctcccacccttcaggctgcactgtgtgtgaagtagccacctgccctgcctccctcctccccgttggcccctgtttggacttagtgcctgtctggcagcctgtggggtcaggagaagcacccccagggcagccctcttgactggcgcagtgggaagaggccttcagcccctctcccggagatggaatcgcggggcagggaggggcagggtgttctagaggtgagaagagggcctggtggagattccctgtcttctgagcccgagcccctcattaccagtgaaggacatgcttgaggggttcgggaagctcctcatctgaggcaactggtcctgggggtgctcaggcctgcctttttgggactcagatggcaggaggtccaccccgcagcctggtcctcggctctcccacaggtgggcaccccccactttggtgctaatagctctccaccaggtggtgtgagcgcgggggctgccagaagcgggaggggtcactgccggaagagcagctgccctccgacccctcactttgtgcctttagtaaacactgtgctttgta

SEQ ID NO: 192338 - DNA, 2315 bp, Homo sapiens
  Payload ID: 17987
  Gene Name: transcription factor EB
  ENST ID: ENST00000343317
  CDS Start-End: 6-1694
ctgcaatgagtgaagaagacagaaccttcagttttggtccaggaaccaggaaacttggattcatgtctcagctgtcacccgcttgctcagtgaccttgggcaaatctcttcccctctcagggctcggtgtcttctcctctaaaatggatgcggtcccagtcattctggcctccccctgccagcccctgtgctttgaggaggacacgtgcctcatatacctgctgccccttctcatccacagggagccagcgccggcagccaccatggcgtcacgcatagggttgcgcatgcagctcatgcgggagcaggcgcagcaggaggagcagcgggagcgcatgcagcaacaggctgtcatgcattacatgcagcagcagcagcagcagcaacagcagcagctcggagggccgcccaccccggccatcaatacccccgtccacttccagtcgccaccacctgtgcctggggaggtgttgaaggtgcagtcctacctggagaatcccacatcctaccatctgcagcagtcgcagcatcagaaggtgcgggagtacctgtccgagacctatgggaacaagtttgctgcccacatcagcccagcccagggctctccgaaacccccaccagccgcctccccaggggtgcgagctggacacgtgctgtcctcctccgctggcaacagtgctcccaatagccccatggccatgctgcacattggctccaaccctgagagggagttggatgatgtcattgacaacattatgcgtctggacgatgtccttggctacatcaatcctgaaatgcagatgcccaacacgctacccctgtccagcagccacctgaatgtgtacagcagcgacccccaggtcacagcctccctggtgggcgtcaccagcagctcctgccctgcggacctgacccagaagcgagagctcacagatgctgagagcagggccctggccaaggagcggcagaagaaagacaatcacaacttaattgaaaggagacgaaggttcaacatcaatgaccgcatcaaggagttgggaatgctgatccccaaggccaatgacctggacgtgcgctggaacaagggcaccatcctcaaggcctctgtggattacatccggaggatgcagaaggacctgcaaaagtccagggagctggagaaccactctcgccgcctggagatgaccaacaagcagctctggctccgtatccaggagctggagatgcaggctcgagtgcacggcctccctaccacctccccgtccggcatgaacatggctgagctggcccagcaggtggtgaagcaggagctgcctagcgaagagggcccaggggaggccctgatgctgggggctgaggtccctgaccctgagccactgccagctctgcccccgcaagccccgctgcccctgcccacccagccaccatccccattccatcacctggacttcagccacagcctgagctttgggggcagggaggacgagggtcccccgggctaccccgaacccctggcgccggggcatggctccccattccccagcctgtccaagaaggatctggacctcatgctcctggacgactcactgctaccgctggcctctgatccacttctgtccaccatgtcccccgaggcctccaaggccagcagccgccggagcagcttcagcatggaggagggcgatgtgctgtgaccctggctgcccctgtgccagggaacaggggccggcctgggggctgggagggccaggggcacctccctcccacccttcaggctgcactgtgtgtgaagtagccacctgccctgcctccctcctccccgttggcccctgtttggacttagtgcctgtctggcagcctgtggggtcaggagaagcacccccagggcagccctcttgactggcgcagtgggaagaggccttcagcccctctcccggagatggaatcgcggggcagggaggggcagggtgttctagaggtgagaagagggcctggtggagattccctgtcttctgagcccgagcccctcattaccagtgaaggacatgcttgaggggttcgggaagctcctcatctgaggcaactggtcctgggggtgctcaggcctgcctttttgggactcagatggcaggaggtccaccccgcagcctggtcctcggctctcccacaggtgggcaccccccactttggtgctaatagctctccaccaggtggtgtgagcgcgggggctgccagaagcgggaggggtcactgccggaagagcagctgccctccgacccctcactttgtgcctttagtaaacactgtgctttgta

SEQ ID NO: 192339 - DNA, 2188 bp, Homo sapiens
  Payload ID: 17987
  Gene Name: transcription factor EB
  ENST ID: ENST00000358871
  CDS Start-End: 95-1567
gaggagaaagtagagaatgatgcctccgcaccctgtgaacttccaacaagggaaggtgacatgaaaggagctcagacaatttctgtccagcaacatgacagcaagctcaggctgggagccagcgccggcagccaccatggcgtcacgcatagggttgcgcatgcagctcatgcgggagcaggcgcagcaggaggagcagcgggagcgcatgcagcaacaggctgtcatgcattacatgcagcagcagcagcagcagcaacagcagcagctcggagggccgcccaccccggccatcaatacccccgtccacttccagtcgccaccacctgtgcctggggaggtgttgaaggtgcagtcctacctggagaatcccacatcctaccatctgcagcagtcgcagcatcagaaggtgcgggagtacctgtccgagacctatgggaacaagtttgctgcccacatcagcccagcccagggctctccgaaacccccaccagccgcctccccaggggtgcgagctggacacgtgctgtcctcctccgctggcaacagtgctcccaatagccccatggccatgctgcacattggctccaaccctgagagggagttggatgatgtcattgacaacattatgcgtctggacgatgtccttggctacatcaatcctgaaatgcagatgcccaacacgctacccctgtccagcagccacctgaatgtgtacagcagcgacccccaggtcacagcctccctggtgggcgtcaccagcagctcctgccctgcggacctgacccagaagcgagagctcacagatgctgagagcagggccctggccaaggagcggcagaagaaagacaatcacaacttaattgaaaggagacgaaggttcaacatcaatgaccgcatcaaggagttgggaatgctgatccccaaggccaatgacctggacgtgcgctggaacaagggcaccatcctcaaggcctctgtggattacatccggaggatgcagaaggacctgcaaaagtccagggagctggagaaccactctcgccgcctggagatgaccaacaagcagctctggctccgtatccaggagctggagatgcaggctcgagtgcacggcctccctaccacctccccgtccggcatgaacatggctgagctggcccagcaggtggtgaagcaggagctgcctagcgaagagggcccaggggaggccctgatgctgggggctgaggtccctgaccctgagccactgccagctctgcccccgcaagccccgctgcccctgcccacccagccaccatccccattccatcacctggacttcagccacagcctgagctttgggggcagggaggacgagggtcccccgggctaccccgaacccctggcgccggggcatggctccccattccccagcctgtccaagaaggatctggacctcatgctcctggacgactcactgctaccgctggcctctgatccacttctgtccaccatgtcccccgaggcctccaaggccagcagccgccggagcagcttcagcatggaggagggcgatgtgctgtgaccctggctgcccctgtgccagggaacaggggccggcctgggggctgggagggccaggggcacctccctcccacccttcaggctgcactgtgtgtgaagtagccacctgccctgcctccctcctccccgttggcccctgtttggacttagtgcctgtctggcagcctgtggggtcaggagaagcacccccagggcagccctcttgactggcgcagtgggaagaggccttcagcccctctcccggagatggaatcgcggggcagggaggggcagggtgttctagaggtgagaagagggcctggtggagattccctgtcttctgagcccgagcccctcattaccagtgaaggacatgcttgaggggttcgggaagctcctcatctgaggcaactggtcctgggggtgctcaggcctgcctttttgggactcagatggcaggaggtccaccccgcagcctggtcctcggctctcccacaggtgggcaccccccactttggtgctaatagctctccaccaggtggtgtgagcgcgggggctgccagaagcgggaggggtcactgccggaagagcagctgccctccgacccctcactttgtgcctttagtaaacactgtgctttgta

SEQ ID NO: 192340 - DNA, 2331 bp, Homo sapiens
  Payload ID: 17987
  Gene Name: transcription factor EB
  Uniprot ID: P19484
  ENST ID: ENST00000373033
  CDS Start-End: 282-1712
gtggagtgacagccggagcccgggcgccgggcgcggggctcggtgacagcggaggcggcggcccgggcgggacgcagggagcggccgcggcgccgacggcggcgggaagggcggacggggcgggcctccctggtggcacggggccggagcaggccgggagcaggtggcgggcacagcttgcgggccaggcacccgaacttgcgacaagttgccggagccgcggggcgcgggcggcggacagattgaccttcagagcgagggagccagcgccggcagccaccatggcgtcacgcatagggttgcgcatgcagctcatgcgggagcaggcgcagcaggaggagcagcgggagcgcatgcagcaacaggctgtcatgcattacatgcagcagcagcagcagcagcaacagcagcagctcggagggccgcccaccccggccatcaatacccccgtccacttccagtcgccaccacctgtgcctggggaggtgttgaaggtgcagtcctacctggagaatcccacatcctaccatctgcagcagtcgcagcatcagaaggtgcgggagtacctgtccgagacctatgggaacaagtttgctgcccacatcagcccagcccagggctctccgaaacccccaccagccgcctccccaggggtgcgagctggacacgtgctgtcctcctccgctggcaacagtgctcccaatagccccatggccatgctgcacattggctccaaccctgagagggagttggatgatgtcattgacaacattatgcgtctggacgatgtccttggctacatcaatcctgaaatgcagatgcccaacacgctacccctgtccagcagccacctgaatgtgtacagcagcgacccccaggtcacagcctccctggtgggcgtcaccagcagctcctgccctgcggacctgacccagaagcgagagctcacagatgctgagagcagggccctggccaaggagcggcagaagaaagacaatcacaacttaattgaaaggagacgaaggttcaacatcaatgaccgcatcaaggagttgggaatgctgatccccaaggccaatgacctggacgtgcgctggaacaagggcaccatcctcaaggcctctgtggattacatccggaggatgcagaaggacctgcaaaagtccagggagctggagaaccactctcgccgcctggagatgaccaacaagcagctctggctccgtatccaggagctggagatgcaggctcgagtgcacggcctccctaccacctccccgtccggcatgaacatggctgagctggcccagcaggtggtgaagcaggagctgcctagcgaagagggcccaggggaggccctgatgctgggggctgaggtccctgaccctgagccactgccagctctgcccccgcaagccccgctgcccctgcccacccagccaccatccccattccatcacctggacttcagccacagcctgagctttgggggcagggaggacgagggtcccccgggctaccccgaacccctggcgccggggcatggctccccattccccagcctgtccaagaaggatctggacctcatgctcctggacgactcactgctaccgctggcctctgatccacttctgtccaccatgtcccccgaggcctccaaggccagcagccgccggagcagcttcagcatggaggagggcgatgtgctgtgaccctggctgcccctgtgccagggaacaggggccggcctgggggctgggagggccaggggcacctccctcccacccttcaggctgcactgtgtgtgaagtagccacctgccctgcctccctcctccccgttggcccctgtttggacttagtgcctgtctggcagcctgtggggtcaggagaagcacccccagggcagccctcttgactggcgcagtgggaagaggccttcagcccctctcccggagatggaatcgcggggcagggaggggcagggtgttctagaggtgagaagagggcctggtggagattccctgtcttctgagcccgagcccctcattaccagtgaaggacatgcttgaggggttcgggaagctcctcatctgaggcaactggtcctgggggtgctcaggcctgcctttttgggactcagatggcaggaggtccaccccgcagcctggtcctcggctctcccacaggtgggcaccccccactttggtgctaatagctctccaccaggtggtgtgagcgcgggggctgccagaagcgggaggggtcactgccggaagagcagctgccctccgacccctcactttgtgcctttagtaaacactgtgctttg

SEQ ID NO: 192341 - DNA, 2595 bp, Homo sapiens
  Payload ID: 17987
  Gene Name: transcription factor EB
  ENST ID: ENST00000394283
  CDS Start-End: 1228-2034
agatgcggatgcgctcggttagaacgcagttcttggtgccacgactgggagacagtcctcaggccctcccctcagggagctcactgtccggggagggacagccagcaatagttcctggccggccaggagaggcagaggcagaggaagggaagggtcagctgccttgaggtccctgcctgctaacctgacggtatgctttcaccatgccggtgaccccagccccaggaccacgagcaactcgcctggctcccttctctccgtctgcctcctggccgcggggcccggagagctgggagccagagggtgtaaatgaagggcagagctgtttgggtgactccatgctctgcttctccccgagggaagccaatggtgcttaccatttacaaggcttgttacagctgcagggttattttgtcctcaactcagctctgggagacggagccaaatggggacccaggtatcttggttccgggtgccctggaaggagttcaggggatagggcaggggacaccctaggtgggcactgaatctagggagagccaactgggcttttacgggctaatggcctggtgactcacagtcagaggtgggcagggagtgggccagggcaggcaggagcccttccagggtcccacgtgcgctgtcacaggcctcctcagcctgtttctggaaagctgagaagtaggtggaaggggactcccacccctcaagtctggctgccctttgagggtctagctcttggccctgagccctcctggggctctgtttatgactgtaattgcatcattagccagagttaatagagttacttagcacctgcccccacagggagtagcccagccaccccctgggttctgtctcttccttttcaaagtcaactcggtttctgcaggcaacaggggtttccccaaccacagctgtcatgaaaaccaggttgggcctttgtcctggggatggagggcagtcagcacttggggcctggcttggggctgccctggagatgaccatggaaattgggttggcctcctctgatcggagggtgggagttcagggttcccagagctgccagaaatgttcacgtcccaggacgcagtgaacatatatgcatgtacagtgtggatcctcatctgagaggagggagatgaaaacacacccacctcacaggctgttgtgaggactaagggtgcggcagtgcctggtacatgggagccagcgccggcagccaccatggcgtcacgcatagggttgcgcatgcagctcatgcgggagcaggcgcagcaggaggagcagcgggagcgcatgcagcaacaggctgtcatgcattacatgcagcagcagcagcagcagcaacagcagcagctcggagggccgcccaccccggccatcaatacccccgtccacttccagtcgccaccacctgtgcctggggaggtgttgaaggtgcagtcctacctggagaatcccacatcctaccatctgcagcagtcgcagcatcagaaggtgcgggagtacctgtccgagacctatgggaacaagtttgctgcccacatcagcccagcccagggctctccgaaacccccaccagccgcctccccaggggtgcgagctggacacgtgctgtcctcctccgctggcaacagtgctcccaatagccccatggccatgctgcacattggctccaaccctgagagggagttggatgatgtcattgacaacattatgcgtctggacgatgtccttggctacatcaatcctgaaatgcagatgcccaacacgctacccctgtccagcagccacctgaatgtgtacagcagcgacccccaggtcacagcctccctggtgggcgtcaccagcagctcctgccctgcggacctgacccagaagcgagagctcacagatgctgagagcagggccctggccaaggagcggcagaagaaagacaatcacaacttaattgaaaggagacgaaggttcaacatcaatgaccgcatcaaggagttgggaatgctgatccccaaggccaatgacctgtgagcaggtttctgagggggagggtgatgggtctgggtgggcagcagctgacaagtattatctgccctcagccccatgctagttactaggatgggaggagaattccttctagaagttcatctatttgagaaaagatctctccctctcccaaatcaggaaagaatcaggaaagctcaagacagatgagtttctgtcctggaagtgaggctgaggtcaagggaggcttcttggaggagcagtcatgctgagaaagttttcttaaggccattgggctggcagacaagaggccgggctcacgcctataatcccagcactgtgggaagctgaggcaggcagatcacttgaggtcatgagttcaagaccagcctggccaacatggcgaaaccccatctctactaaaaatacaaaacttagctgggcacagtggtgtgtgcctacagtgccagctactagggaggctgagacaggagaattgattgaactcaggaggtggaggtagcagtgagccgagatctcgctactgcactgcattccagcctgggcaacagaacgagactccatctc

SEQ ID NO: 192342 - DNA, 1626 bp, Homo sapiens
  Payload ID: 17987
  Gene Name: transcription factor EB
  ENST ID: ENST00000406563
  CDS Start-End: 1-1005
cacttccagtcgccaccacctgtgcctggggaggtgttgaagttggatgatgtcattgacaacattatgcgtctggacgatgtccttggctacatcaatcctgaaatgcagatgcccaacacgctacccctgtccagcagccacctgaatgtgtacagcagcgacccccaggtcacagcctccctggtgggcgtcaccagcagctcctgccctgcggacctgacccagaagcgagagctcacagatgctgagagcagggccctggccaaggagcggcagaagaaagacaatcacaacttaattgaaaggagacgaaggttcaacatcaatgaccgcatcaaggagttgggaatgctgatccccaaggccaatgacctggacgtgcgctggaacaagggcaccatcctcaaggcctctgtggattacatccggaggatgcagaaggacctgcaaaagtccagggagctggagaaccactctcgccgcctggagatgaccaacaagcagctctggctccgtatccaggagctggagatgcaggctcgagtgcacggcctccctaccacctccccgtccggcatgaacatggctgagctggcccagcaggtggtgaagcaggagctgcctagcgaagagggcccaggggaggccctgatgctgggggctgaggtccctgaccctgagccactgccagctctgcccccgcaagccccgctgcccctgcccacccagccaccatccccattccatcacctggacttcagccacagcctgagctttgggggcagggaggacgagggtcccccgggctaccccgaacccctggcgccggggcatggctccccattccccagcctgtccaagaaggatctggacctcatgctcctggacgactcactgctaccgctggcctctgatccacttctgtccaccatgtcccccgaggcctccaaggccagcagccgccggagcagcttcagcatggaggagggcgatgtgctgtgaccctggctgcccctgtgccagggaacaggggccggcctgggggctgggagggccaggggcacctccctcccacccttcaggctgcactgtgtgtgaagtagccacctgccctgcctccctcctccccgttggcccctgtttggacttagtgcctgtctggcagcctgtggggtcaggagaagcacccccagggcagccctcttgactggcgcagtgggaagaggccttcagcccctctcccggagatggaatcgcggggcagggaggggcagggtgttctagaggtgagaagagggcctggtggagattccctgtcttctgagcccgagcccctcattaccagtgaaggacatgcttgaggggttcgggaagctcctcatctgaggcaactggtcctgggggtgctcaggcctgcctttttgggactcagatggcaggaggtccaccccgcagcctggtcctcggctctcccacaggtgggcaccccccactttggtgctaatagctctccaccaggtggtgtgagcgcgggggctgccagaagcgggaggggtcactgccggaagagcagctgccctccgacccctcactttgtgcctttagtaaacactgtgctttgta

SEQ ID NO: 192343 - DNA, 2162 bp, Homo sapiens
  Payload ID: 17987
  Gene Name: transcription factor EB
  Uniprot ID: P19484
  ENST ID: ENST00000403298
  CDS Start-End: 112-1542
gcttcacgcacggctgccccgagctgctccgggctgcgcgagcaggttcgcgccgcagccgcctggcgcgccccagccccgcgccccggggagccagcgccggcagccaccatggcgtcacgcatagggttgcgcatgcagctcatgcgggagcaggcgcagcaggaggagcagcgggagcgcatgcagcaacaggctgtcatgcattacatgcagcagcagcagcagcagcaacagcagcagctcggagggccgcccaccccggccatcaatacccccgtccacttccagtcgccaccacctgtgcctggggaggtgttgaaggtgcagtcctacctggagaatcccacatcctaccatctgcagcagtcgcagcatcagaaggtgcgggagtacctgtccgagacctatgggaacaagtttgctgcccacatcagcccagcccagggctctccgaaacccccaccagccgcctccccaggggtgcgagctggacacgtgctgtcctcctccgctggcaacagtgctcccaatagccccatggccatgctgcacattggctccaaccctgagagggagttggatgatgtcattgacaacattatgcgtctggacgatgtccttggctacatcaatcctgaaatgcagatgcccaacacgctacccctgtccagcagccacctgaatgtgtacagcagcgacccccaggtcacagcctccctggtgggcgtcaccagcagctcctgccctgcggacctgacccagaagcgagagctcacagatgctgagagcagggccctggccaaggagcggcagaagaaagacaatcacaacttaattgaaaggagacgaaggttcaacatcaatgaccgcatcaaggagttgggaatgctgatccccaaggccaatgacctggacgtgcgctggaacaagggcaccatcctcaaggcctctgtggattacatccggaggatgcagaaggacctgcaaaagtccagggagctggagaaccactctcgccgcctggagatgaccaacaagcagctctggctccgtatccaggagctggagatgcaggctcgagtgcacggcctccctaccacctccccgtccggcatgaacatggctgagctggcccagcaggtggtgaagcaggagctgcctagcgaagagggcccaggggaggccctgatgctgggggctgaggtccctgaccctgagccactgccagctctgcccccgcaagccccgctgcccctgcccacccagccaccatccccattccatcacctggacttcagccacagcctgagctttgggggcagggaggacgagggtcccccgggctaccccgaacccctggcgccggggcatggctccccattccccagcctgtccaagaaggatctggacctcatgctcctggacgactcactgctaccgctggcctctgatccacttctgtccaccatgtcccccgaggcctccaaggccagcagccgccggagcagcttcagcatggaggagggcgatgtgctgtgaccctggctgcccctgtgccagggaacaggggccggcctgggggctgggagggccaggggcacctccctcccacccttcaggctgcactgtgtgtgaagtagccacctgccctgcctccctcctccccgttggcccctgtttggacttagtgcctgtctggcagcctgtggggtcaggagaagcacccccagggcagccctcttgactggcgcagtgggaagaggccttcagcccctctcccggagatggaatcgcggggcagggaggggcagggtgttctagaggtgagaagagggcctggtggagattccctgtcttctgagcccgagcccctcattaccagtgaaggacatgcttgaggggttcgggaagctcctcatctgaggcaactggtcctgggggtgctcaggcctgcctttttgggactcagatggcaggaggtccaccccgcagcctggtcctcggctctcccacaggtgggcaccccccactttggtgctaatagctctccaccaggtggtgtgagcgcgggggctgccagaagcgggaggggtcactgccggaagagcagctgccctccgacccctcactttgtgcctttagtaaacactgtgctttgt

SEQ ID NO: 192344 - DNA, 365 bp, Homo sapiens
  Payload ID: 17987
  Gene Name: transcription factor EB
  ENST ID: ENST00000445214
  CDS Start-End: 153-365
ggtgtgagctgacgagagcttcaggcctgcttgggattctggccccatgatttagggtttctttggagcccatctgagcctggggggccctgtggtggtggaagaggtccagcctgcggtggtgaaagagggagccagcgccggcagccaccatggcgtcacgcatagggttgcgcatgcagctcatgcgggagcaggcgcagcaggaggagcagcgggagcgcatgcagcaacaggctgtcatgcattacatgcagcagcagcagcagcagcaacagcagcagctcggagggccgcccaccccggccatcaatacccccgtccacttccagtcgccaccacctgtgcctggggaggtgttgaag

SEQ ID NO: 192345 - DNA, 223 bp, Homo sapiens
  Payload ID: 17987
  Gene Name: transcription factor EB
  ENST ID: ENST00000445700
  CDS Start-End: 188-223
gcagttcttggtgccacgactgggagacagtcctcaggccctcccctcagggagctcactgtccggggagggacagccagcaatagttcctggccggccaggagaggcagaggcagaggaagggaagggtcagctgccttgaggtccctgcctgctaacctgacgggagccagcgccggcagccaccatggcgtcacgcatagggttgcgcatgcagctcatg

SEQ ID NO: 192346 - DNA, 377 bp, Homo sapiens
  Payload ID: 17987
  Gene Name: transcription factor EB
  ENST ID: ENST00000424495
  CDS Start-End: 141-377
ttgaggtccctgcctgctaacctgacgtgtggatcctcatctgagaggagggagatgaaaacacacccacctcacaggctgttgtgaggactaagggtgcggcagtgcctggtacatgggagccagcgccggcagccaccatggcgtcacgcatagggttgcgcatgcagctcatgcgggagcaggcgcagcaggaggagcagcgggagcgcatgcagcaacaggctgtcatgcattacatgcagcagcagcagcagcagcaacagcagcagctcggagggccgcccaccccggccatcaatacccccgtccacttccagtcgccaccacctgtgcctggggaggtgttgaaggtgcagtcctacctggagaatccc

SEQ ID NO: 192347 - DNA, 984 bp, Homo sapiens
  Payload ID: 17987
  Gene Name: transcription factor EB
  ENST ID: ENST00000419574
  CDS Start-End: 317-984
ggtgtgagctgacgagagcttcaggtgggagcctctcccggcagtgaatctgagggttgggagggatttccggacccagagggaagatattttggggccgagggcctttccagaacccatgaaatcacacaccctgctgcgaccagactgaccctccctagttgatggttcttttttggacatcctaggcctgcttgggattctggccccatgatttagggtttctttggagcccatctgagcctggggggccctgtggtggtggaagaggtccagcctgcggtggtgaaagagggagccagcgccggcagccaccatggcgtcacgcatagggttgcgcatgcagctcatgcgggagcaggcgcagcaggaggagcagcgggagcgcatgcagcaacaggctgtcatgcattacatgcagcagcagcagcagcagcaacagcagcagctcggagggccgcccaccccggccatcaatacccccgtccacttccagtcgccaccacctgtgcctggggaggtgttgaaggtgcagtcctacctggagaatcccacatcctaccatctgcagcagtcgcagcatcagaaggtgcgggagtacctgtccgagacctatgggaacaagtttgctgcccacatcagcccagcccagggctctccgaaacccccaccagccgcctccccaggggtgcgagctggacacgtgctgtcctcctccgctggcaacagtgctcccaatagccccatggccatgctgcacattggctccaaccctgagagggagttggatgatgtcattgacaacattatgcgtctggacgatgtccttggctacatcaatcctgaaatgcagatgcccaacacgctacccctgtccagcagccacctgaatgtgtacagcagcgacccccaggtcacagcctccctggtgggcgtcaccagcagctcctgccctgcggacctgacccagaagcgagagctcac

SEQ ID NO: 192348 - DNA, 1022 bp, Homo sapiens
  Payload ID: 17987
  Gene Name: transcription factor EB
  ENST ID: ENST00000416140
  CDS Start-End: 289-1022
tgttgggtaggctgcggtgtgggactgtgccgtcggggcgcagttccctctgtgctgtgagtaatcctcggccgcatttgcagctcccaggggattgtgcaacttcctctccagctgaggtgcagggggctgggtgagaaacagcagccgccggggaaatgaggaaactgagcccggccctggggctggggtgcggccctgggctccggcccctggaggagctgagcattccaggggcctccttccagggggctgccctctcgaagggagccagcgccggcagccaccatggcgtcacgcatagggttgcgcatgcagctcatgcgggagcaggcgcagcaggaggagcagcgggagcgcatgcagcaacaggctgtcatgcattacatgcagcagcagcagcagcagcaacagcagcagctcggagggccgcccaccccggccatcaatacccccgtccacttccagtcgccaccacctgtgcctggggaggtgttgaaggtgcagtcctacctggagaatcccacatcctaccatctgcagcagtcgcagcatcagaaggtgcgggagtacctgtccgagacctatgggaacaagtttgctgcccacatcagcccagcccagggctctccgaaacccccaccagccgcctccccaggggtgcgagctggacacgtgctgtcctcctccgctggcaacagtgctcccaatagccccatggccatgctgcacattggctccaaccctgagagggagttggatgatgtcattgacaacattatgcgtctggacgatgtccttggctacatcaatcctgaaatgcagatgcccaacacgctacccctgtccagcagccacctgaatgtgtacagcagcgacccccaggtcacagcctccctggtgggcgtcaccagcagctcctgccctgcggacctgacccagaagcgagagctcacagatgctgagagcagggccctggccaaggagcggcagaagaaagacaatcacaacttaattgaaag

SEQ ID NO: 192349 - DNA, 914 bp, Homo sapiens
  Payload ID: 17987
  Gene Name: transcription factor EB
  ENST ID: ENST00000419396
  CDS Start-End: 112-914
gcttcacgcacggctgccccgagctgctccgggctgcgcgagcaggttcgcgccgcagccgcctggcgcgccccagccccgcgccccggggagccagcgccggcagccaccatggcgtcacgcatagggttgcgcatgcagctcatgcgggagcaggcgcagcaggaggagcagcgggagcgcatgcagcaacaggctgtcatgcattacatgcagcagcagcagcagcagcaacagcagcagctcggagggccgcccaccccggccatcaatacccccgtccacttccagtcgccaccacctgtgcctggggaggtgttgaaggtgcagtcctacctggagaatcccacatcctaccatctgcagcagtcgcagcatcagaaggtgcgggagtacctgtccgagacctatgggaacaagtttgctgcccacatcagcccagcccagggctctccgaaacccccaccagccgcctccccaggggtgcgagctggacacgtgctgtcctcctccgctggcaacagtgctcccaatagccccatggccatgctgcacattggctccaaccctgagagggagttggatgatgtcattgacaacattatgcgtctggacgatgtccttggctacatcaatcctgaaatgcagatgcccaacacgctacccctgtccagcagccacctgaatgtgtacagcagcgacccccaggtcacagcctccctggtgggcgtcaccagcagctcctgccctgcggacctgacccagaagcgagagctcacagatgctgagagcagggccctggccaaggagcggcagaagaaagacaatcacaacttaattgaaaggagacgaaggttcaacatcaatgaccgcatcaaggagttgggaatgctgatccccaaggccaatgacct

SEQ ID NO: 192350 - DNA, 1996 bp, Homo sapiens
  Payload ID: 17987
  Gene Name: transcription factor EB
  Uniprot ID: P19484
  ENST ID: ENST00000420312
  CDS Start-End: 201-1376
cggccgcggcgccgacggcggcgggaagggcggacggggcgggcctccctggtggcacggggccggagcaggccgggagcaggtggcgggcacagcttgcgggccaggcacccgaacttgcgacaagttgccggagccgcggggcgcgggcggcggacagattgaccttcagagcgagggagccagcgccggcagccaccatggcgtcacgcatagggttgcgcatgcagctcatgcgggagcaggcgcagcaggaggagcagcgggagcgcatgcagcaacaggctgtcatgcattacatgcagcagcagcagcagcagcaacagcagcagctcggagggccgcccaccccggccatcaatacccccgtccacttccagtcgccaccacctgtgcctggggaggtgttgaagttggatgatgtcattgacaacattatgcgtctggacgatgtccttggctacatcaatcctgaaatgcagatgcccaacacgctacccctgtccagcagccacctgaatgtgtacagcagcgacccccaggtcacagcctccctggtgggcgtcaccagcagctcctgccctgcggacctgacccagaagcgagagctcacagatgctgagagcagggccctggccaaggagcggcagaagaaagacaatcacaacttaattgaaaggagacgaaggttcaacatcaatgaccgcatcaaggagttgggaatgctgatccccaaggccaatgacctggacgtgcgctggaacaagggcaccatcctcaaggcctctgtggattacatccggaggatgcagaaggacctgcaaaagtccagggagctggagaaccactctcgccgcctggagatgaccaacaagcagctctggctccgtatccaggagctggagatgcaggctcgagtgcacggcctccctaccacctccccgtccggcatgaacatggctgagctggcccagcaggtggtgaagcaggagctgcctagcgaagagggcccaggggaggccctgatgctgggggctgaggtccctgaccctgagccactgccagctctgcccccgcaagccccgctgcccctgcccacccagccaccatccccattccatcacctggacttcagccacagcctgagctttgggggcagggaggacgagggtcccccgggctaccccgaacccctggcgccggggcatggctccccattccccagcctgtccaagaaggatctggacctcatgctcctggacgactcactgctaccgctggcctctgatccacttctgtccaccatgtcccccgaggcctccaaggccagcagccgccggagcagcttcagcatggaggagggcgatgtgctgtgaccctggctgcccctgtgccagggaacaggggccggcctgggggctgggagggccaggggcacctccctcccacccttcaggctgcactgtgtgtgaagtagccacctgccctgcctccctcctccccgttggcccctgtttggacttagtgcctgtctggcagcctgtggggtcaggagaagcacccccagggcagccctcttgactggcgcagtgggaagaggccttcagcccctctcccggagatggaatcgcggggcagggaggggcagggtgttctagaggtgagaagagggcctggtggagattccctgtcttctgagcccgagcccctcattaccagtgaaggacatgcttgaggggttcgggaagctcctcatctgaggcaactggtcctgggggtgctcaggcctgcctttttgggactcagatggcaggaggtccaccccgcagcctggtcctcggctctcccacaggtgggcaccccccactttggtgctaatagctctccaccaggtggtgtgagcgcgggggctgccagaagcgggaggggtcactgccggaagagcagctgccctccgacccctcactttgtgcctttagtaaacactgtgctttgt

SEQ ID NO: 192351 - DNA, 281 bp, Homo sapiens
  Payload ID: 17987
  Gene Name: transcription factor EB
  ENST ID: ENST00000425401
  CDS Start-End: 184-281
ggccgggcgggcatgggccttcccggcccggagctgggagtcgaaggggcgggaggcgtgatggtgaactcgcaagaagtttgagggacgcgcgggccccgcgcccactccccctccaccggacacggctggggccggcgatgcctgagagggggtcggagggagccagcgccggcagccaccatggcgtcacgcatagggttgcgcatgcagctcatgcgggagcaggcgcagcaggaggagcagcgggagcgcatgcagcaacaggctgtcatgcatta

SEQ ID NO: 192352 - DNA, 168 bp, Homo sapiens
  Payload ID: 17987
  Gene Name: transcription factor EB
  ENST ID: ENST00000433032
  CDS Start-End: 133-168
agctccagccgtcgttctctcgcctgtctgttctggggacggttcagcgcggagcttctgcactcaacttgagcgcagtttttggcttagagctcgctggggaagtgcagggagccagcgccggcagccaccatggcgtcacgcatagggttgcgcatgcagctcatg

SEQ ID NO: 192353 - DNA, 6628 bp, Homo sapiens
  Payload ID: 17988
  Gene Name: transcription factor EC
  Uniprot ID: O14948
  ENST ID: ENST00000265440
  CDS Start-End: 182-1225
gtttactttggttgtcccttctggcatggtgcatatgttatgggaagagggattataatttggtgctgtttgtagagatgacaacactgataaaatccactcattgctggtcccagcacacctggaaagttctgcaaggcctcagctacagaaagcccagagacagaaagtaaactctttcatgacccttgatcatcagatcatcaatccaactcttaaatggtcacaacctgcagtgccaagtggtgggcctcttgtgcagcatgcacacacaactctggacagtgatgctggcctcacagaaaacccactcaccaagttactagctattgggaaagaagatgacaatgcacaatggcatatggaggacgttattgaggatataatcggtatggaatcaagttttaaagaggaaggagcagactctcctctgctaatgcaaagaacattatctggaagtattttggatgtgtatagcggtgaacaaggaatttcaccaattaacatggggcttacaagtgcttcttgtccaagtagtctaccaatgaaaagagaaattacagaaactgacactagagctttagcaaaagagagacaaaaaaaggacaaccacaacctcattgaaagaagaagaaggtataatattaattaccgaatcaaggagcttggcactcttattccaaagtctaatgatcctgatatgcgctggaacaaaggaaccattctaaaagcatcagtggagtacatcaagtggctacaaaaagaacaacagagagcccgagaattggaacacagacagaagaaattagagcaggctaacaggcgacttctacttcggattcaggaactagaaattcaggctcgtactcatggtctgccaaccctggcttcacttggcacggttgatttaggtgctcatgtcaccaaacagcagagccatcctgagcagaattcagtagactattgccaacaactgactgtgtctcaggggccaagccctgagctctgtgatcaagctatagccttttctgatcctttgtcatacttcacagatttatcatttagtgctgcattgaaagaggaacaaagattggatggcatgctattggatgacacaatctctccatttggaacagatcctctgctatctgccacttcccctgcagtttccaaagaaagcagtaggagaagtagctttagctcagatgatggtgatgaattataagaaataaacagacccaattcatcaactggaaagcaattctatgctggtgctatgcaattatgctctgtgtttcatatgttgctttggcttattttttttcttaaaggaatgtgttgttcatgaaaaactgatagaagcaacagaagaattcgcaggaagaaaaatcatagtgttaatgaattattgagggcgaaaaaaaggtgttttcttctttgactacggagtccaaatccacttaaattctgttttcctgaaaagaggtacagcataagaaatagctctttattgatgttttaaaagcagcaacttggtggtgtactactggaactaatgactgcaaagtgttaaacgactgaaatatacaaacagtctcttagttactcatttccatcttctcttcaactttcacatcagtcttccggaatcaagatcaacatatcaggtggtcattgcctttctccattgtctagtagacatgtctaaagttcaaactttataggataaataaatgtataatagattatctgtcacttgtggttgaaaggcaaatctacaataaatgtgagaattttccacaataaaatatggataacttataaaaacattggttactaaaattagatcctcattttattgtagttggttcaattacactaattctaaaagcatccatgcatatttatatctccagtctctgttcaggaaaaggaacatattgaatattttcctcaggaatatggaccagaattgtatcccttcacacaaacatacacatacacatatgcacatcattcaggtagtatatgttcttttgttttcttcatgcttctgactgcatcagaatcacattccaaattctcttttcttatgaagaagagatgtcagatcatcaattttagtaaataaaatataaaatgtccccctgcaaggacagttttcaggtacttaaaacttttcatcagtattggacagaaatcaattagttgttgatttggtttttctccaaatggataaaatattgaaaattgaattgccaattgacaaaataattattacaacaaactatttcttattattttcagttctgagaggaacgtaaggttctatttctataaacacttagagtgtcctatgatctttggttgcactgttagcatttattataagcacttataactatgatgcttcatttagatttttatctcttgcgcttgttttaggttaggaaattaagttaccaagcacgttgctctgtgctggacctccaagagtgatcatccgatcaatgagtattcatggaggcatactcagaactgcagtgagtcctgagaaaatgtagaagagttgaaaaagatatggtcttactcctaaggtagttaatgagaatgcatgaaaaacaaaaacaaaagatagaagacatatagaataaaaaatctaagcataaactgtaaatacagaaggtcagagaaaatgaaaatgactgacaaactttatgggaacagcagaatttgacttctctttgaaaggcattaattgagtgaaagtgagggcatataaaggaataataccaaccaaatgataaaagtgagaataataggggaagtatctttataggactttaattagaaagatctggatgccctagaagatgtctgttggggagttctgaagcataagactgacaacaggttgtgaaggcccttagaaaactatggtgaaataatatagtattaatataatagaaacaaatctttttagtagcagggaggatgctaaaaactaaaatatatattactaatgagtgagatgtaatctttcatgaatattaagctttgggataaattttgaaaggatcttttagttgcttctcacatggaaaatatgtcactatgaaatgtgagaccctaatgctgataaaagtagaaaaatagtaaatcattatggtataataattatctcaggcttagcttgtatcatttgctcagaatttggagaattaaaataattttattgtttgacatggaaaaataattactaacttctgggtacagtcattaaagcctgatagataaattcatctgaaatatgccatgtgaaacagctattagatacatcttctcaataattttcaagacgatattacatacttttaattttataacaaaattccacttcattatctgagttgataatttgattaaatgttaaaaattatagataaggaatatattttggagttcatagaaaacacaccactttattagatagagactggcttcagttctcattttatctgctcttctcatttcttcatattttgagtagacttgcactgatgatgtcattactcagtcattattttctgttctgttaaggtacaactactgggccttgaaatctatccttcacaatcttggctgagataaggacttggcacaggatgatagagcctggacacaagagatctggagagggaactgctatttgctgctacattcagattatgagatgtcagggaactgtaaaaagggtaatgaatttttaaagagagtaaagagttatgctgtgtcccggtcaactgaaatacattaaaaattaattagatggtagttcttaactttttaaggcagataccttgagaatctagtgagttatagaccctctccctagaaaagtatagaactgtttatatggacaataattcacatgcattcagagatcttagggatctcctgaatgttttcttggatcccaagtgaaaaattcctgaatcaggtctcttaggtgtgcggttaatgtcatgtataacaatggggggacccttacttatctaaatataattatcccaatcctaataatgatgaggttgcataggaaagtaatagtgtaccaaactttagattattcactaaaaaagttgttcatttatgaagtagtcgtttatcaaacatgtcctccccactcagcaaactatgccttctatttattatatatgggtcagtttcactataattactgagtgttataaacatctgaccataacattttgaaatgatgcaaataaatttccaaacaaaaatagtgtgaatttaaaagcaaattatttgagtatctaagaaacaagatagacttctagaaaaatttgactctctagaatatttcttgcagaaatgagatttttcataatagtaaaagaggcatatgtttatcaaacaatgctgtcacaaaaagcatcaactgtaatgggactattaatgcataattattgatttattcattcaattaatatacaattatcccttttcatttaaagatttaattcataattacaattataataaaacttcctttaaagtaagatacaataattttattgtttttcattcttttttcaacaaaatatcccatccaatcattttttatattattaaatattggctgctttttcttggattcacattaaacagccctttccaacttccaattgtcttaaaataatgatgacctcctgtgagtagatacagctctttacaatttttttctttagtgccttttcttcttgaatttttcctatatcaaatggagaatatatgtacagatggtattttctcagtttataggcatatcagtgaccatggctttctttatataggtttttaaaaaagccctaaataataaatagccagatgagctggggacattgagaaatagccttcctcttcctttttcaactcatttttttcccacctacatgactgtaaatcaaatatttaatagctcttacttaaaaaaacagatacaaagaatgtcttgatttggtgtgctcatttaccataatgtcatgaggggaattagatttcacaactttaaaaggaatatatttttattttattttgaaaaactgagtcatataggaattttcttatacttcaaggcatcatggaaacacttttttcctgtttggatattgtggaatttaaacgttcaaataaataaatggcataactaagtgttccaaatttttttacaatgtctttgaccctattcaaacactttaggtatttactgaccgtctgatgtgtaagatgtggaataaaactggaatcaattaattatttcactgtgttatcagcgcaagatcaaccatctgggtttcttaaagacacccgaaggattgaattttgtttcagtattgataatggcatagtctctatgtgctacatggaattacatcatttatccctccagtgccctatatgttgataagtatgtcagtttgacttagtatacatatatacagagatttcattacatttacctaataaatacaaaatacatttcgagtgttactgatctcctatgttacatgagcctcctgtaatcattgtgcattgatgttccaatgttttattgtttgtatgaattttaatttgaaaacaaggaaacaatccaaaagcagaaaaaatagcttttcttaaaattttcagtgctacattttccctctgaggtccatagagatttgaatgtataggagattatccgaaaacagctattttgattaaaaaatatatctcccaggattcaaccaacttaatgatgaagtactattgtctactgctttatacataaaagggaactttttatctgcttgtaaagggatttttatgtgtatttctgcataatcagatgacttctattgtgttttctactgatgaaattctctgtaaaatgtctttttcttacattatccaacaggcataaagaataacagtaaagacttttgtgtttgtaatactacctcttttatccctgcactactgttttattgcaaaaattctatattgtcactgtattttttccatagaatataaattttgttcttgtgctaaagctggtagtttatgtagcagacaaaatatacaaataaaagaagagactgattttgctgaaagaattatatataatcaagaagttacatattgttctttaaatatgatactgaattttaaaagcaaacgaaattcaagaatcttatctaacagcatagcagttgcttatggcatacaaggctaaaattaattcagctatttaatcttaataattattatgtagttaaaaatctttgactttaatagtgttttacatatacaaatagctgaagtaacattcctataattttaatctgacattggttagatcaagaaaacattgttaataagactgtagaatttgtaattattgctatttttcatttttaataacaaagtaatgtgtcttattttctaagaaaatggagaactttggtgtactttaatacatacaaaaatctttgtaaaaataccttaaaatgtaccaatattttctttgcatatattaaatgaaagactataattatgaaatgtt

SEQ ID NO: 192354 - DNA, 6605 bp, Homo sapiens
  Payload ID: 17988
  Gene Name: transcription factor EC
  Uniprot ID: O14948
  ENST ID: ENST00000320239
  CDS Start-End: 254-1210
acttctcttttctctttcctcaactaactggattccaaccagcccaaagtattcattactcacggctagatcgtttactttggttgtcccttctggcatggtgcatatgttatgggaagagggattataatttggtgctgtttgtagagatgacaacactgataaaatccactcattgctggtcccagcacacctggaaagttctgcaaggcctcagctacagaaagcccagagacagaaagtaaactctttcatgacccttgatcatcagatcatcaatccaactcttaaatggtcacaacctgcagtgccaagtggtgggcctcttgtgcagcatgcacacacaactctggacagtgatgctggcctcacagaaaacccactcaccaagttactagctattgggaaagaagatgacaatgcacaatggcatttatctggaagtattttggatgtgtatagcggtgaacaaggaatttcaccaattaacatggggcttacaagtgcttcttgtccaagtagtctaccaatgaaaagagaaattacagaaactgacactagagctttagcaaaagagagacaaaaaaaggacaaccacaacctcattgaaagaagaagaaggtataatattaattaccgaatcaaggagcttggcactcttattccaaagtctaatgatcctgatatgcgctggaacaaaggaaccattctaaaagcatcagtggagtacatcaagtggctacaaaaagaacaacagagagcccgagaattggaacacagacagaagaaattagagcaggctaacaggcgacttctacttcggattcaggaactagaaattcaggctcgtactcatggtctgccaaccctggcttcacttggcacggttgatttaggtgctcatgtcaccaaacagcagagccatcctgagcagaattcagtagactattgccaacaactgactgtgtctcaggggccaagccctgagctctgtgatcaagctatagccttttctgatcctttgtcatacttcacagatttatcatttagtgctgcattgaaagaggaacaaagattggatggcatgctattggatgacacaatctctccatttggaacagatcctctgctatctgccacttcccctgcagtttccaaagaaagcagtaggagaagtagctttagctcagatgatggtgatgaattataagaaataaacagacccaattcatcaactggaaagcaattctatgctggtgctatgcaattatgctctgtgtttcatatgttgctttggcttattttttttcttaaaggaatgtgttgttcatgaaaaactgatagaagcaacagaagaattcgcaggaagaaaaatcatagtgttaatgaattattgagggcgaaaaaaaggtgttttcttctttgactacggagtccaaatccacttaaattctgttttcctgaaaagaggtacagcataagaaatagctctttattgatgttttaaaagcagcaacttggtggtgtactactggaactaatgactgcaaagtgttaaacgactgaaatatacaaacagtctcttagttactcatttccatcttctcttcaactttcacatcagtcttccggaatcaagatcaacatatcaggtggtcattgcctttctccattgtctagtagacatgtctaaagttcaaactttataggataaataaatgtataatagattatctgtcacttgtggttgaaaggcaaatctacaataaatgtgagaattttccacaataaaatatggataacttataaaaacattggttactaaaattagatcctcattttattgtagttggttcaattacactaattctaaaagcatccatgcatatttatatctccagtctctgttcaggaaaaggaacatattgaatattttcctcaggaatatggaccagaattgtatcccttcacacaaacatacacatacacatatgcacatcattcaggtagtatatgttcttttgttttcttcatgcttctgactgcatcagaatcacattccaaattctcttttcttatgaagaagagatgtcagatcatcaattttagtaaataaaatataaaatgtccccctgcaaggacagttttcaggtacttaaaacttttcatcagtattggacagaaatcaattagttgttgatttggtttttctccaaatggataaaatattgaaaattgaattgccaattgacaaaataattattacaacaaactatttcttattattttcagttctgagaggaacgtaaggttctatttctataaacacttagagtgtcctatgatctttggttgcactgttagcatttattataagcacttataactatgatgcttcatttagatttttatctcttgcgcttgttttaggttaggaaattaagttaccaagcacgttgctctgtgctggacctccaagagtgatcatccgatcaatgagtattcatggaggcatactcagaactgcagtgagtcctgagaaaatgtagaagagttgaaaaagatatggtcttactcctaaggtagttaatgagaatgcatgaaaaacaaaaacaaaagatagaagacatatagaataaaaaatctaagcataaactgtaaatacagaaggtcagagaaaatgaaaatgactgacaaactttatgggaacagcagaatttgacttctctttgaaaggcattaattgagtgaaagtgagggcatataaaggaataataccaaccaaatgataaaagtgagaataataggggaagtatctttataggactttaattagaaagatctggatgccctagaagatgtctgttggggagttctgaagcataagactgacaacaggttgtgaaggcccttagaaaactatggtgaaataatatagtattaatataatagaaacaaatctttttagtagcagggaggatgctaaaaactaaaatatatattactaatgagtgagatgtaatctttcatgaatattaagctttgggataaattttgaaaggatcttttagttgcttctcacatggaaaatatgtcactatgaaatgtgagaccctaatgctgataaaagtagaaaaatagtaaatcattatggtataataattatctcaggcttagcttgtatcatttgctcagaatttggagaattaaaataattttattgtttgacatggaaaaataattactaacttctgggtacagtcattaaagcctgatagataaattcatctgaaatatgccatgtgaaacagctattagatacatcttctcaataattttcaagacgatattacatacttttaattttataacaaaattccacttcattatctgagttgataatttgattaaatgttaaaaattatagataaggaatatattttggagttcatagaaaacacaccactttattagatagagactggcttcagttctcattttatctgctcttctcatttcttcatattttgagtagacttgcactgatgatgtcattactcagtcattattttctgttctgttaaggtacaactactgggccttgaaatctatccttcacaatcttggctgagataaggacttggcacaggatgatagagcctggacacaagagatctggagagggaactgctatttgctgctacattcagattatgagatgtcagggaactgtaaaaagggtaatgaatttttaaagagagtaaagagttatgctgtgtcccggtcaactgaaatacattaaaaattaattagatggtagttcttaactttttaaggcagataccttgagaatctagtgagttatagaccctctccctagaaaagtatagaactgtttatatggacaataattcacatgcattcagagatcttagggatctcctgaatgttttcttggatcccaagtgaaaaattcctgaatcaggtctcttaggtgtgcggttaatgtcatgtataacaatggggggacccttacttatctaaatataattatcccaatcctaataatgatgaggttgcataggaaagtaatagtgtaccaaactttagattattcactaaaaaagttgttcatttatgaagtagtcgtttatcaaacatgtcctccccactcagcaaactatgccttctatttattatatatgggtcagtttcactataattactgagtgttataaacatctgaccataacattttgaaatgatgcaaataaatttccaaacaaaaatagtgtgaatttaaaagcaaattatttgagtatctaagaaacaagatagacttctagaaaaatttgactctctagaatatttcttgcagaaatgagatttttcataatagtaaaagaggcatatgtttatcaaacaatgctgtcacaaaaagcatcaactgtaatgggactattaatgcataattattgatttattcattcaattaatatacaattatcccttttcatttaaagatttaattcataattacaattataataaaacttcctttaaagtaagatacaataattttattgtttttcattcttttttcaacaaaatatcccatccaatcattttttatattattaaatattggctgctttttcttggattcacattaaacagccctttccaacttccaattgtcttaaaataatgatgacctcctgtgagtagatacagctctttacaatttttttctttagtgccttttcttcttgaatttttcctatatcaaatggagaatatatgtacagatggtattttctcagtttataggcatatcagtgaccatggctttctttatataggtttttaaaaaagccctaaataataaatagccagatgagctggggacattgagaaatagccttcctcttcctttttcaactcatttttttcccacctacatgactgtaaatcaaatatttaatagctcttacttaaaaaaacagatacaaagaatgtcttgatttggtgtgctcatttaccataatgtcatgaggggaattagatttcacaactttaaaaggaatatatttttattttattttgaaaaactgagtcatataggaattttcttatacttcaaggcatcatggaaacacttttttcctgtttggatattgtggaatttaaacgttcaaataaataaatggcataactaagtgttccaaatttttttacaatgtctttgaccctattcaaacactttaggtatttactgaccgtctgatgtgtaagatgtggaataaaactggaatcaattaattatttcactgtgttatcagcgcaagatcaaccatctgggtttcttaaagacacccgaaggattgaattttgtttcagtattgataatggcatagtctctatgtgctacatggaattacatcatttatccctccagtgccctatatgttgataagtatgtcagtttgacttagtatacatatatacagagatttcattacatttacctaataaatacaaaatacatttcgagtgttactgatctcctatgttacatgagcctcctgtaatcattgtgcattgatgttccaatgttttattgtttgtatgaattttaatttgaaaacaaggaaacaatccaaaagcagaaaaaatagcttttcttaaaattttcagtgctacattttccctctgaggtccatagagatttgaatgtataggagattatccgaaaacagctattttgattaaaaaatatatctcccaggattcaaccaacttaatgatgaagtactattgtctactgctttatacataaaagggaactttttatctgcttgtaaagggatttttatgtgtatttctgcataatcagatgacttctattgtgttttctactgatgaaattctctgtaaaatgtctttttcttacattatccaacaggcataaagaataacagtaaagacttttgtgtttgtaatactacctcttttatccctgcactactgttttattgcaaaaattctatattgtcactgtattttttccatagaatataaattttgttcttgtgctaaagctggtagtttatgtagcagacaaaatatacaaataaaagaagagactgattttgctgaaagaattatatataatcaagaagttacatattgttctttaaatatgatactgaattttaaaagcaaacgaaattcaagaatcttatctaacagcatagcagttgcttatggcatacaaggctaaaattaattcagctatttaatcttaataattattatgtagttaaaaatctttgactttaatagtgttttacatatacaaatagctgaagtaacattcctataattttaatctgacattggttagatcaagaaaacattgttaataagactgtagaatttgtaattattgctatttttcatttttaataacaaagtaatgtgtcttattttctaagaaaatggagaactttggtgtactttaatacatacaaaaatctttgtaaaaataccttaaaatgtaccaatattttctttgcatatattaaatgaaagactataattat

SEQ ID NO: 192355 - DNA, 2704 bp, Homo sapiens
  Payload ID: 17988
  Gene Name: transcription factor EC
  Uniprot ID: O14948
  ENST ID: ENST00000393485
  CDS Start-End: 185-778
atcgtttactttggttgtcccttctggcatggtgcatatgttatgggaagagggattataatttggtgctgtttgtagagatgacaacactgataaaatccactcattgctggtcccagcacacctggaaagttctgcaaggcctcagctacagaaagcccagagacagaaagtaaactctttcatgacccttgatcatcagatcatcaatccaactcttaaatggtcacaacctgcagtgccaagtggtgggcctcttgtgcagcatgcacacacaactctggacagtgatgctggcctcacagaaaacccactcaccaagttactagctattgggaaagaagatgacaatgcacaatggcatttatctggaagtattttggatgtgtatagcggtgaacaaggaatttcaccaattaacatggggcttacaagtgcttcttgtccaagtagtctaccaatgaaaagagaaattacagaaactgacactagagctttagcaaaagagagacaaaaaaaggacaaccacaacctcattgaaagaagaagaaggtataatattaattaccgaatcaaggagcttggcactcttattccaaagtctaatgatcctgatatgcgctggaacaaaggaaccattctaaaagcatcagtggagtacatcaagtggctacaaaaagaacaacagagagcccgagaattggaacacagacagaagaaattagagcaggctaacaggcgacttctacttcggattcaggtttttataagaatgtagccatgagtcacatagcttacacatgactcagctgtcatcagttttcttcattggtctcatttattttttctcttattaacaattatttttccttttgaaggataattttactgctttttagaagttcgtgaattgggttgtttcaattaggatttgactagaaatccaggatcaagatggctgaatatgtatatatgtatatatgtatatacacatatatgtgtatatatgtgtgtatgtgtgcatgtatatatatatacacatatataatgacaacaaattacaaaatgcataaaatataactcatttcataaatgcacacattattatcctaatcaaataataatactaagtaaaacatttgtttctctacattatattggacattaaattctcccctccttctttcatttctttccaacattgctatggatttcattgcctcaaggcatgttgtgacagtgtatattaagtcacttctcatctgttcatataatccaaaatatcaaaatatgggcttttataactctcaagattttttaaaaatgtgagtatgcttagcaccaggtaaaacatttactgtttccatgaaaaggtcctgcatttacagtgagaaattaatcaggaagaataaatagatgactttctgctatctccaaatggctatattgtagtctgagccactatggaaccatcatcagtcataacctttgtagaacaatgagaccaaacttaaaaaaaagtctgagtaattttctcagagttatttttcatgcatcagaaatgtatcaatttcattatttgcaaagattattcataatttgtattgtattactcttcattttaaatgcttgttaatattttgattctatgtctggcttattctctagtgttaaatccaatttcaaagacattatttaatgattttcgtttgaaattacaggaactagaaattcaggctcgtactcatggtctgccaaccctggcttcacttggcacggttgatttaggtgctcatgtcaccaaacagcagagccatcctgagcagaattcagtagactattgccaacaactgactgtgtctcaggggccaagccctgagctctgtgatcaagctatagccttttctgatcctttgtcatacttcacagatttatcatttagtgctgcattgaaagaggaacaaagattggatggcatgctattggatgacacaatctctccatttggaacagatcctctgctatctgccacttcccctgcagtttccaaagaaagcagtaggagaagtagctttagctcagatgatggtgatgaattataagaaataaacagacccaattcatcaactggaaagcaattctatgctggtgctatgcaattatgctctgtgtttcatatgttgctttggcttattttttttcttaaaggaatgtgttgttcatgaaaaactgatagaagcaacagaagaattcgcaggaagaaaaatcatagtgttaatgaattattgagggcgaaaaaaaggtgttttcttctttgactacggagtccaaatccacttaaattctgttttcctgaaaagaggtacagcataagaaatagctctttattgatgttttaaaagcagcaacttggtggtgtactactggaactaatgactgcaaagtgttaaacgactgaaatatacaaacagtctcttagttactcatttccatcttctcttcaactttcacatcagtcttccggaatcaagatcaacatatcaggtggtcattgcctttctccattgtctagtagacatgtctaaagttcaaactttataggataaataaatgtataatagattatctgtcacttgtggttgaaaggcaaatctacaataaatgtgagaattttccacaataaaatatggataacttataaaaa

SEQ ID NO: 192356 - DNA, 6309 bp, Homo sapiens
  Payload ID: 17988
  Gene Name: transcription factor EC
  Uniprot ID: O14948
  ENST ID: ENST00000457268
  CDS Start-End: 64-906
ctttagtgtagaagtttccacacagttctcttggttattgtttgcaagtttaaggaaaagaaaatgatgaaggagaaagagaaaaccattgctattgtgaaggttatagacacttcaaagttaaaactgttatctggaagtattttggatgtgtatagcggtgaacaaggaatttcaccaattaacatggggcttacaagtgcttcttgtccaagtagtctaccaatgaaaagagaaattacagaaactgacactagagctttagcaaaagagagacaaaaaaaggacaaccacaacctcattgaaagaagaagaaggtataatattaattaccgaatcaaggagcttggcactcttattccaaagtctaatgatcctgatatgcgctggaacaaaggaaccattctaaaagcatcagtggagtacatcaagtggctacaaaaagaacaacagagagcccgagaattggaacacagacagaagaaattagagcaggctaacaggcgacttctacttcggattcaggaactagaaattcaggctcgtactcatggtctgccaaccctggcttcacttggcacggttgatttaggtgctcatgtcaccaaacagcagagccatcctgagcagaattcagtagactattgccaacaactgactgtgtctcaggggccaagccctgagctctgtgatcaagctatagccttttctgatcctttgtcatacttcacagatttatcatttagtgctgcattgaaagaggaacaaagattggatggcatgctattggatgacacaatctctccatttggaacagatcctctgctatctgccacttcccctgcagtttccaaagaaagcagtaggagaagtagctttagctcagatgatggtgatgaattataagaaataaacagacccaattcatcaactggaaagcaattctatgctggtgctatgcaattatgctctgtgtttcatatgttgctttggcttattttttttcttaaaggaatgtgttgttcatgaaaaactgatagaagcaacagaagaattcgcaggaagaaaaatcatagtgttaatgaattattgagggcgaaaaaaaggtgttttcttctttgactacggagtccaaatccacttaaattctgttttcctgaaaagaggtacagcataagaaatagctctttattgatgttttaaaagcagcaacttggtggtgtactactggaactaatgactgcaaagtgttaaacgactgaaatatacaaacagtctcttagttactcatttccatcttctcttcaactttcacatcagtcttccggaatcaagatcaacatatcaggtggtcattgcctttctccattgtctagtagacatgtctaaagttcaaactttataggataaataaatgtataatagattatctgtcacttgtggttgaaaggcaaatctacaataaatgtgagaattttccacaataaaatatggataacttataaaaacattggttactaaaattagatcctcattttattgtagttggttcaattacactaattctaaaagcatccatgcatatttatatctccagtctctgttcaggaaaaggaacatattgaatattttcctcaggaatatggaccagaattgtatcccttcacacaaacatacacatacacatatgcacatcattcaggtagtatatgttcttttgttttcttcatgcttctgactgcatcagaatcacattccaaattctcttttcttatgaagaagagatgtcagatcatcaattttagtaaataaaatataaaatgtccccctgcaaggacagttttcaggtacttaaaacttttcatcagtattggacagaaatcaattagttgttgatttggtttttctccaaatggataaaatattgaaaattgaattgccaattgacaaaataattattacaacaaactatttcttattattttcagttctgagaggaacgtaaggttctatttctataaacacttagagtgtcctatgatctttggttgcactgttagcatttattataagcacttataactatgatgcttcatttagatttttatctcttgcgcttgttttaggttaggaaattaagttaccaagcacgttgctctgtgctggacctccaagagtgatcatccgatcaatgagtattcatggaggcatactcagaactgcagtgagtcctgagaaaatgtagaagagttgaaaaagatatggtcttactcctaaggtagttaatgagaatgcatgaaaaacaaaaacaaaagatagaagacatatagaataaaaaatctaagcataaactgtaaatacagaaggtcagagaaaatgaaaatgactgacaaactttatgggaacagcagaatttgacttctctttgaaaggcattaattgagtgaaagtgagggcatataaaggaataataccaaccaaatgataaaagtgagaataataggggaagtatctttataggactttaattagaaagatctggatgccctagaagatgtctgttggggagttctgaagcataagactgacaacaggttgtgaaggcccttagaaaactatggtgaaataatatagtattaatataatagaaacaaatctttttagtagcagggaggatgctaaaaactaaaatatatattactaatgagtgagatgtaatctttcatgaatattaagctttgggataaattttgaaaggatcttttagttgcttctcacatggaaaatatgtcactatgaaatgtgagaccctaatgctgataaaagtagaaaaatagtaaatcattatggtataataattatctcaggcttagcttgtatcatttgctcagaatttggagaattaaaataattttattgtttgacatggaaaaataattactaacttctgggtacagtcattaaagcctgatagataaattcatctgaaatatgccatgtgaaacagctattagatacatcttctcaataattttcaagacgatattacatacttttaattttataacaaaattccacttcattatctgagttgataatttgattaaatgttaaaaattatagataaggaatatattttggagttcatagaaaacacaccactttattagatagagactggcttcagttctcattttatctgctcttctcatttcttcatattttgagtagacttgcactgatgatgtcattactcagtcattattttctgttctgttaaggtacaactactgggccttgaaatctatccttcacaatcttggctgagataaggacttggcacaggatgatagagcctggacacaagagatctggagagggaactgctatttgctgctacattcagattatgagatgtcagggaactgtaaaaagggtaatgaatttttaaagagagtaaagagttatgctgtgtcccggtcaactgaaatacattaaaaattaattagatggtagttcttaactttttaaggcagataccttgagaatctagtgagttatagaccctctccctagaaaagtatagaactgtttatatggacaataattcacatgcattcagagatcttagggatctcctgaatgttttcttggatcccaagtgaaaaattcctgaatcaggtctcttaggtgtgcggttaatgtcatgtataacaatggggggacccttacttatctaaatataattatcccaatcctaataatgatgaggttgcataggaaagtaatagtgtaccaaactttagattattcactaaaaaagttgttcatttatgaagtagtcgtttatcaaacatgtcctccccactcagcaaactatgccttctatttattatatatgggtcagtttcactataattactgagtgttataaacatctgaccataacattttgaaatgatgcaaataaatttccaaacaaaaatagtgtgaatttaaaagcaaattatttgagtatctaagaaacaagatagacttctagaaaaatttgactctctagaatatttcttgcagaaatgagatttttcataatagtaaaagaggcatatgtttatcaaacaatgctgtcacaaaaagcatcaactgtaatgggactattaatgcataattattgatttattcattcaattaatatacaattatcccttttcatttaaagatttaattcataattacaattataataaaacttcctttaaagtaagatacaataattttattgtttttcattcttttttcaacaaaatatcccatccaatcattttttatattattaaatattggctgctttttcttggattcacattaaacagccctttccaacttccaattgtcttaaaataatgatgacctcctgtgagtagatacagctctttacaatttttttctttagtgccttttcttcttgaatttttcctatatcaaatggagaatatatgtacagatggtattttctcagtttataggcatatcagtgaccatggctttctttatataggtttttaaaaaagccctaaataataaatagccagatgagctggggacattgagaaatagccttcctcttcctttttcaactcatttttttcccacctacatgactgtaaatcaaatatttaatagctcttacttaaaaaaacagatacaaagaatgtcttgatttggtgtgctcatttaccataatgtcatgaggggaattagatttcacaactttaaaaggaatatatttttattttattttgaaaaactgagtcatataggaattttcttatacttcaaggcatcatggaaacacttttttcctgtttggatattgtggaatttaaacgttcaaataaataaatggcataactaagtgttccaaatttttttacaatgtctttgaccctattcaaacactttaggtatttactgaccgtctgatgtgtaagatgtggaataaaactggaatcaattaattatttcactgtgttatcagcgcaagatcaaccatctgggtttcttaaagacacccgaaggattgaattttgtttcagtattgataatggcatagtctctatgtgctacatggaattacatcatttatccctccagtgccctatatgttgataagtatgtcagtttgacttagtatacatatatacagagatttcattacatttacctaataaatacaaaatacatttcgagtgttactgatctcctatgttacatgagcctcctgtaatcattgtgcattgatgttccaatgttttattgtttgtatgaattttaatttgaaaacaaggaaacaatccaaaagcagaaaaaatagcttttcttaaaattttcagtgctacattttccctctgaggtccatagagatttgaatgtataggagattatccgaaaacagctattttgattaaaaaatatatctcccaggattcaaccaacttaatgatgaagtactattgtctactgctttatacataaaagggaactttttatctgcttgtaaagggatttttatgtgtatttctgcataatcagatgacttctattgtgttttctactgatgaaattctctgtaaaatgtctttttcttacattatccaacaggcataaagaataacagtaaagacttttgtgtttgtaatactacctcttttatccctgcactactgttttattgcaaaaattctatattgtcactgtattttttccatagaatataaattttgttcttgtgctaaagctggtagtttatgtagcagacaaaatatacaaataaaagaagagactgattttgctgaaagaattatatataatcaagaagttacatattgttctttaaatatgatactgaattttaaaagcaaacgaaattcaagaatcttatctaacagcatagcagttgcttatggcatacaaggctaaaattaattcagctatttaatcttaataattattatgtagttaaaaatctttgactttaatagtgttttacatatacaaatagctgaagtaacattcctataattttaatctgacattggttagatcaagaaaacattgttaataagactgtagaatttgtaattattgctatttttcatttttaataacaaagtaatgtgtcttattttctaagaaaatggagaactttggtgtactttaatacatacaaaaatctttgtaaaaataccttaaaatgtaccaatattttctttgcatatattaaatgaaagactataattatgaaatgtt

SEQ ID NO: 192357 - DNA, 1245 bp, Homo sapiens
  Payload ID: 17988
  Gene Name: transcription factor EC
  ENST ID: ENST00000484212
  CDS Start-End: 176-1126
gaaaaagaggagaagtgggagtaaacagaaagataatgcttatggtacatacaaaacaaatggagagattgagtctcacggattcttcgcctgagccaccagcaaagagtcctatcaatgatttagttccctagagaaaatcagaaagtaaaagtgagaagaaaagaagagaaatatgttacaagctttaactggacttcaatttcagctgaaagaacaattaggagaaaaggagagaagacttcaaatcagccaggaaatcagtgcccatagaacagagttccacatgcagttttcatacaaaccagtgttgcatagacttgtcccagcaagaccacaaatttattcaagtcaattaccatcctttaccagggtcccagcacacctggaaagttctgcaaggcctcagctacagaaagcccagagacagaaagtaaactctttcatgacccttgatcatcagatcatcaatccaactcttaaatggtcacaacctgcagtgccaagtggtgggcctcttgtgcagcatgcacacacaactctggacagtgatgctggcctcacagaaaacccactcaccaagttactagctattgggaaagaagatgacaatgcacaatggcatatggaggacgttattgaggatataatcggtatggaatcaagttttaaagaggaaggagcagactctcctctgctaatgcaaagaacattatctggaagtattttggatgtgtatagcggtgaacaaggaatttcaccaattaacatggggcttacaagtgcttcttgtccaagtagtctaccaatgaaaagagaaattacagaaactgacactagagctttagcaaaagagagacaaaaaaaggacaaccacaacctcattgaaagaagaagaaggtataatattaattaccgaatcaaggagcttggcactcttattccaaagtctaatgatcctgatatgcgctggaacaaaggaaccattctaaaagcatcagtggagtacatcaagtggctacaaaaagaacaacagagagcccgagaattggaacacagacagaagaaattagagcaggctaacaggcgacttctacttcggattcaggtttttataagaatgtagccatgagtcacatagcttacacatgactcagctgtcatcagttttcttcattggtctcatttattttttctcttattaacaattatttttccttttgaaggataattttactgcttttt

SEQ ID NO: 192358 - DNA, 2453 bp, Homo sapiens
  Payload ID: 17989
  Gene Name: transcription factor-like 5 (basic helix-loop-helix)
  ENST ID: ENST00000217162
  CDS Start-End: 238-1689
cgggccgggggtcgcctcccgcctcccgcctcccgcctcccgccgcccgccgcccgcgtcgccctcgccgccgttgggccgcgccgcgccgccatgtcgggccccggaccgcgggagccgccgccggaggcaggcgcggcaggcggcgaggcggccgtcgagggcgcgggcggcggggacgcggcgctgggcgagccggggctgagcttcacgaccaccgacctgagcctggtggagatgacggaggtggagtacacgcagctgcagcacatcctctgctcgcacatggaggcggcggctgacggcgagctcgagacgcgcctcaactcggcgctgctggcggcggcgggcccgggcgcaggcgcgggcggcttcgcggcgggcggtcaggggggcgcggcgcccgtgtaccccgtgctgtgcccgtccgcgctggcggccgacgcgccctgcctgggccacatcgacttccaggagctgcgcatgatgctgctaagcgaggcgggcgcggcggagaagacgtcgggcggcggggacggagcgagggcccgggccgacggcgccgccaaggagggcgcgggcgcggctgcggctgcggctggacccgacggcgcgcccgaggcccgggccaagccggccgtgcgcgtccgcctggaggaccgcttcaacagcatccccgccgagccgccgcccgcgccgcgcggccccgagccccccgagccgggcggggcgctcaacaatttggtaactctcattcgacatccatctgaactaatgaatgttcctcttcagcaacaaaacaaatgtacagcattagtgaaaaataaaactgcggctacaactactgctttgcaatttacatacccactgtttactacaaatgcttgctctactagtggaaattctaatctttcacagacacagagttctagtaactcatgttctgtacttgaagctgccaagcaccaggatattggattgcctagagcattttctttctgttatcagcaagaaattgaatccactaaacagacgttaggtagtagaaacaaagttttgcctgagcaagtttggattaaagtgggagaagcagcgctatgcaaacaagcactgaagaggaatcggagtagaatgcgtcagttggacacaaatgtagagcgaagagcccttggagagattcagaatgtgggcgaaggtgccaccgccacacaaggcgcttggcagtcctcggagtcctcacaggcaaacctgggggagcaggcccagagtgggccccagggaggaaggtctcaacgtagggagaggcataaccgaatggaaagagatagaaggcgcagaatccgcatttgctgtgatgagttgaatctcttagtgccgttctgcaatgccgagactgacaaggccacaactctgcagtggaccacagcattcctgaaatacatccaggaaagacatggagattctcttaaaaaggttctaagcacaaactccagatacgtcatgttatggacttgcttcctgaagatgaaatcagcagttgatggaaagaatccacaacacgcctacagaacagcaaatcacaaatggctgtgtctccacgaagccaggagctttgcatttgaagtttctatctgggctcatttccagctgttcagggttcggattcctgaaggcttccttagcatttaactcattctttgttgactgaaggcactggcactgtttctccacacgcaaactgatctttgtcataaatcacttttataatgagagagcagcctggacacattgccacaccttccccattctccagctcttccttggtgatggagaagttatctccgcatgggcagggacagaaatatgtctccgagtcctcgtcatattggaagtcctcgatttccacctcgtcatgaaatactgccatggtcagcgggggttgctgaaggggtgacgccccagcagtccgagaccagctccgagggtctaacttctccggagccggcccaggctctgactttcatttaattgtcctgaaaggtgaattctatcttgccaaataggcaagtgttttttatatgtaggctttaggtgtcagaatataggaaattatcaaaatgtggggtcattttaaattgcatcctaaaaccttttaaaatttgggaagaagctgggcgtcgtagctcacgcctgtaatcccagcactttgggaagctgaggtgggcagattacctgaggtcaggagttcgagaccagcctggccaatacggtgtgacccccgtctctactaaaaatacaaaaattagccgggcgtggtggtacatgcctgtaatcccagctactcaggaggctgaggtgggagaatcagttgaacccaggaggcaaaggttgcagtgagctgagatcgtgccattgcaccccagtctgggcgacaagagtgaaactccatatcc

SEQ ID NO: 192359 - DNA, 2456 bp, Homo sapiens
  Payload ID: 17989
  Gene Name: transcription factor-like 5 (basic helix-loop-helix)
  Uniprot ID: Q9UL49
  ENST ID: ENST00000335351
  CDS Start-End: 94-1596
cgggccgggggtcgcctcccgcctcccgcctcccgcctcccgccgcccgccgcccgcgtcgccctcgccgccgttgggccgcgccgcgccgccatgtcgggccccggaccgcgggagccgccgccggaggcaggcgcggcaggcggcgaggcggccgtcgagggcgcgggcggcggggacgcggcgctgggcgagccggggctgagcttcacgaccaccgacctgagcctggtggagatgacggaggtggagtacacgcagctgcagcacatcctctgctcgcacatggaggcggcggctgacggcgagctcgagacgcgcctcaactcggcgctgctggcggcggcgggcccgggcgcaggcgcgggcggcttcgcggcgggcggtcaggggggcgcggcgcccgtgtaccccgtgctgtgcccgtccgcgctggcggccgacgcgccctgcctgggccacatcgacttccaggagctgcgcatgatgctgctaagcgaggcgggcgcggcggagaagacgtcgggcggcggggacggagcgagggcccgggccgacggcgccgccaaggagggcgcgggcgcggctgcggctgcggctggacccgacggcgcgcccgaggcccgggccaagccggccgtgcgcgtccgcctggaggaccgcttcaacagcatccccgccgagccgccgcccgcgccgcgcggccccgagccccccgagccgggcggggcgctcaacaatttggtaactctcattcgacatccatctgaactaatgaatgttcctcttcagcaacaaaacaaatgtacagcattagtgaaaaataaaactgcggctacaactactgctttgcaatttacatacccactgtttactacaaatgcttgctctactagtggaaattctaatctttcacagacacagagttctagtaactcatgttctgtacttgaagctgccaagcaccaggatattggattgcctagagcattttctttctgttatcagcaagaaattgaatccactaaacagacgttaggtagtagaaacaaagttttgcctgagcaagtttggattaaagtgggagaagcagcgctatgcaaacaagcactgaagaggaatcggagtagaatgcgtcagttggacacaaatgtagagcgaagagcccttggagagattcagaatgtgggcgaaggtgccaccgccacacaaggcgcttggcagtcctcggagtcctcacaggcaaacctgggggagcaggcccagagtgggccccagggaggaaggtctcaacgtagggagaggcataaccgaatggaaagagatagaaggcgcagaatccgcatttgctgtgatgagttgaatctcttagtgccgttctgcaatgccgagactgacaaggccacaactctgcagtggaccacagcattcctgaaatacatccaggaaagacatggagattctcttaaaaaggaatttgagagcgtattttgcggtaaaactggccgaaggctaaagctgaccagaccggactccttggtgacctgtcctgcacaggggagtttacagagcagcccctcgatggagatcaagtgatcggactgaacaggaatcctcggggggtgaacagccattccttcgtgacctgtgcacgccttctgcaaccctggagctctgctcggctagtctgactcgaaaagggcgtgactcaagctgacgggactccagtagggactttgagagcacattttgtaaaaatatttatctagacgcaaatgcttatccatgaatgtcctcttagaccatttggggatgaagccatcttaataattagtaataattaattagtaataattagtaagcattttctcaatgctctgattccatcatgttttcttaacatgataacttaaaaaattgacatcctttgtactttctttaatcttaaaaagtacacggctttttacttatttaccttttaaatatgcccctttagcaattggaacaagttaaattgttaactaaaaacagtttggaaattttatttcattcgttatatcacacccccttgtcatgactctgagtcacgtgctgctgtattgcaacgtgcaggaccattttaaacctgtgtgctaaaaattttccagatacttgctttaaagctacttttgtccacaaatgaaatactgtcacagtagacgcttaaatgccacgttttcataccaagagtcattcattacttcatgtgtcacaaactgtggtgtttggaattgggtttttcaatgagtggctttacttatcaatcacaacaggtaatagcaatagacgttagtgcaatacaaagtcaccctcaataaatactgttaattggagatgtgagtttgtacacaaaacatcagactagacctttgtatgggagagaatttactgtacattaaattctttattttttgtta

SEQ ID NO: 192360 - DNA, 3052 bp, Homo sapiens
  Payload ID: 17990
  Gene Name: transcription termination factor, RNA polymerase I
  Uniprot ID: Q15361
  ENST ID: ENST00000334270
  CDS Start-End: 41-2758
gggttgggagaaaggtggcggcgctttcggagggaataaaatggaaggagaatcaagcagatttgaaatccacactccagtttctgacaagaaaaagaaaaagtgttctatacataaggaaagacctcagaaacattcccacgaaattttcagagactcctccctggtgaatgaacagtctcaaataactaggaggaaaaagaggaaaaaagatttccagcatctcatttcttctcctttgaaaaaatccagaatctgtgatgagactgcaaatgccacttccacactcaaaaagagaaaaaagagaagatatagtgctttggaggtggacgaggaagcaggtgttacagttgtccttgtggataaagaaaatattaacaacacaccaaagcattttagaaaggatgttgatgttgtttgtgttgatatgagcatagaacagaagttaccaagaaagcctaaaacagacaaatttcaggtacttgctaagtcacatgcacataaatcagaagccctgcacagtaaagttagggagaaaaagaataaaaagcatcagaggaaagctgcatcctgggagagccagcgggcaagggacaccctgcctcagtcagaatcccaccaggaggagtcctggctttctgtgggtccagggggtgaaattacagaactaccagcatctgctcataaaaacaagtctaagaaaaaaaagaaaaagtccagtaaccgggaatatgagacactggccatgcctgaaggatcgcaagcaggcagagaggccgggactgatatgcaggaatcccagcctactgtgggcttggatgatgaaactccacaactactaggacctactcacaaaaaaaagtctaagaaaaaaaagaagaaaaagtccaatcaccaggaatttgaggcattggccatgcctgaaggatcacaagtgggcagtgaggttggggctgatatgcaggaatcccggcctgctgtgggcctgcatggtgaaactgcaggaataccagcacctgcttataaaaacaagtctaagaaaaaaaagaaaaagtccaatcaccaggaatttgaggcagtggccatgcctgagagcctcgagagtgcataccctgaaggatcacaggtgggcagtgaggttgggactgtggaaggcagtacagctcttaaagggttcaaggaatccaacagtacaaagaagaagtctaagaaaaggaagcttacgtctgtcaaaagggcacgagtgtctggtgatgatttttcagtgcccagtaagaactctgagagcacactctttgattcagtagaaggtgatggcgccatgatggaagaaggtgtgaaatctaggccccgacaaaagaaaacccaggcctgtttggcaagcaagcacgtgcaagaggcgccaaggttagaacctgcaaatgaagaacacaatgtggaaacagctgaagattccgaaataagatacttatctgcagattcaggagatgccgatgattcagatgcggatttgggttctgccgtgaaacagcttcaggagttcattcctaacatcaaggacagggccaccagcacaatcaagcggatgtaccgggacgacttggaacggtttaaggaatttaaagcacaaggtgtcgctattaaatttggcaagttttctgtaaaggaaaataagcagttagagaaaaatgtggaagactttctagccctgacaggcattgagagtgcagacaagctgctgtacacggacagatatcctgaggaaaaatctgtgatcaccaacttaaaaaggagatactcgtttagattacacattggtaggaacattgcccggccctggaaacttatatactatcgagcaaagaagatgttcgatgtcaacaattacaaaggcaggtatagcgaaggagatactgagaagttaaagatgtaccattctctccttgggaatgactggaagacgattggtgagatggtggcccgaagtagcctctccgtggccctcaagttctcacagatcagcagtcaaagaaatcgtggtgcttggagtaagtctgaaacccggaaactaatcaaggctgtcgaagaagtgattctgaagaagatgtctccccaggagttaaaagaggtggattccaaactccaagaaaatcctgaaagttgcctatcaattgttcgggaaaaactctacaagggcatatcttgggtagaagtagaagctaaagtgcaaaccagaaattggatgcagtgtaaaagtaagtggacagaaattctaaccaagaggatgactaatggtcggcgtatctactatggcatgaatgccctgcgggccaaggtcagccttattgaaaggttgtatgaaataaatgtggaagatactaatgaaatagactgggaagatcttgctagtgccataggtgatgttcctccatcttacgttcaaactaaattttctaggctgaaagctgtctatgttccattttggcagaaaaagacttttccagagatcatcgactacctttatgagacgactctacctttgctgaaggaaaagttagaaaaaatgatggagaaaaaaggcactaaaatccagactcctgcagcacccaagcaagttttcccatttcgagacatcttttattatgaagacgatagtgaaggagaggacatagaaaaagaaagcgaaggccaggcgccatgcatggctcacgcctgtaattccagtactttgggaggccaaggccggtggatcatctgaggtcaggagttcgagaccggcctgaccaacatggtgaagacctgtcactattaaaaatgcaaaaattagccgggtgtggtagtgcacacctgtaatttcaactacttgggaggctgaggcaggagaattgcttgaacccaggaggtggaggttgcagtgagccaagatcgcaccaccgcatgagagagagagattactatttcttgtccctttttctcagtttgattatatttatatacatatgtcagtaaatctgttttcagtattgatgtttaataaagaatgtacaatggc

SEQ ID NO: 192361 - DNA, 1780 bp, Homo sapiens
  Payload ID: 17990
  Gene Name: transcription termination factor, RNA polymerase I
  ENST ID: ENST00000612514
  CDS Start-End: 241-1413
acttccgcttcctcaacagcagcacttccgggttgggagaaaggtggcggcgctttcggagggttagaacctgcaaatgaagaacacaatgtggaaacagctgaagattccgaaataagatacttatctgcagattcaggagatgccgatgattcagatgcggatttgggttctgccgtgaaacagcttcaggagttcattcctaacatcaaggacagggccaccagcacaatcaagcggatgtaccgggacgacttggaacggtttaaggaatttaaagcacaaggtgtcgctattaaatttggcaagttttctgtaaaggaaaataagcagttagagaaaaatgtggaagactttctagccctgacaggcattgagagtgcagacaagctgctgtacacggacagatatcctgaggaaaaatctgtgatcaccaacttaaaaaggagatactcgtttagattacacattggtaggaacattgcccggccctggaaacttatatactatcgagcaaagaagatgttcgatgtcaacaattacaaaggcaggtatagcgaaggagatactgagaagttaaagatgtaccattctctccttgggaatgactggaagacgattggtgagatggtggcccgaagtagcctctccgtggccctcaagttctcacagatcagcagtcaaagaaatcgtggtgcttggagtaagtctgaaacccggaaactaatcaaggctgtcgaagaagtgattctgaagaagatgtctccccaggagttaaaagaggtggattccaaactccaagaaaatcctgaaagttgcctatcaattgttcgggaaaaactctacaagggcatatcttgggtagaagtagaagctaaagtgcaaaccagaaattggatgcagtgtaaaagtaagtggacagaaattctaaccaagaggatgactaatggtcggcgtatctactatggcatgaatgccctgcgggccaaggtcagccttattgaaaggttgtatgaaataaatgtggaagatactaatgaaatagactgggaagatcttgctagtgccataggtgatgttcctccatcttacgttcaaactaaattttctaggctgaaagctgtctatgttccattttggcagaaaaagacttttccagagatcatcgactacctttatgagacgactctacctttgctgaaggaaaagttagaaaaaatgatggagaaaaaaggcactaaaatccagactcctgcagcacccaagcaagttttcccatttcgagacatcttttattatgaagacgatagtgaaggagaggacatagaaaaagaaagcgaaggccaggcgccatgcatggctcacgcctgtaattccagtactttgggaggccaaggccggtggatcatctgaggtcaggagttcgagaccggcctgaccaacatggtgaagacctgtcactattaaaaatgcaaaaattagccgggtgtggtagtgcacacctgtaatttcaactacttgggaggctgaggcaggagaattgcttgaacccaggaggtggaggttgcagtgagccaagatcgcaccaccgcatgagagagagagattactatttcttgtccctttttctcagtttgattatatttatatacatatgtcagtaaatctgttttcagtattgatgtttaataaagaatgtacaatggccagagttctactctttcctctggagcattaaaatatattgccattcctattaaaacgtatttgaatgtgaaaa

SEQ ID NO: 192362 - DNA, 9462 bp, Homo sapiens
  Payload ID: 17991
  Gene Name: transcription termination factor, RNA polymerase II
  Uniprot ID: Q9UNY4
  ENST ID: ENST00000369466
  CDS Start-End: 45-3533
agaattgggggcggggctttgtggaacttgggggacccagcgaaatggaagaagttaggtgtccagagcacgggactttctgctttcttaagaccggcgtccgcgatggcccgaataaaggaaagagcttctacgtgtgccgggcagacacgtgcagcttcgtgcgggccaccgacattcctgtttcccattgcttattgcatgaggactttgtggtagagcttcagggtttgcttctgccacaggacaagaaagaatacagattgttcttccgatgcattagaagtaaggcagaggggaaacgctggtgtggaagtattccatggcaggatcctgattccaaagaacattctgtatccaataagtctcagcatgcatctgagacatttcatcattcttccaactggctgagaaatccattcaaggtacttgacaagaatcaagaaccagctctctggaaacagctcatcaaaggtgaaggtgaggaaaagaaggctgataagaagcaaagagaaaagggagatcagcttttcgatcaaaagaaagaacagaagcctgaaatgatggagaaagacctctcatctggcctggtaccaaagaaaaaacaatctgtagttcaagagaagaagcaagaagagggagcagagattcagtgtgaggcagagactggaggcacacacaaaagagacttttctgaaattaaatctcaacagtgccaaggtaatgagcttacaagaccatctgcatcttctcaggagaaatcaagtggtaagagtcaagatgtccaaagagaatcagaacctctgagagaaaaggttacccagcttttgcctcaaaatgttcacagtcacaactcaataagcaagccccagaaagggggacccctcaacaaggagtacacgaactgggaggctaaagaaacaaaggcaaaggatggccctagcatacaggccacccagaaaagcctgcctcaggggcatttccaagagcggccggagacccacagtgtgcctgctcctggaggaccagcggctcaggctgcaccagcagcaccagggctttccctgggtgagggccgtgaagctgccacaagcagtgacgacgaggaggaagatgatgttgtttttgtttcctctaagcctgggagccccctactctttgactcgactctggacttagagacgaaggaaaacctccaattccctgatcgaagtgtgcaaagaaaggtgtctcctgcctcaggtgtttccaagaaggtagaaccctcagacccagtagcccggcgtgtctaccttacaacacaactgaaacaaaagaagagcacactggcatcagtgaacatccaggctcttccagacaagggtcagaagttgatcaaacaaatccaggagctggaggaagtactcagtggtcttaccctttccccagagcaaggaactaatgagaagagtaacagtcaagtaccacagcagagtcacttcaccaaaactaccactggccctccccacctggtgcctccccaaccccttcctcgtcgtggtacccaacctgtgggttctctagaactaaagtctgcctgccaggtgactgctggaggatccagtcagtgctatcgaggccatacaaaccaagatcacgttcatgcagtgtggaaaatcacaagtgaagccatcggtcaactgcatcgctcacttgagtcatgtcctggtgagacggttgtggcagaagatcccgccgggctgaaggtccctttgctactacaccagaagcaggcattggcttggttactatggcgagaaagtcagaagccacaaggaggaattctggcagatgatatgggcttaggaaaaaccctgacaatgattgcgctcatcctgacccagaagaatcaagagaaaaaggaagaaaaggagaaaagcacagctttgacgtggctctccaaagatgactcttgtgactttacttcccatggaacactaatcatctgtcctgcctccctgatccatcattggaaaaatgaggtggagaaacgggtgaacagcaacaaactaagagtctatctctaccatgggccaaaccgggattcacgtgccagagtcctctctacatatgacatcgtgatcactacctatagcctcgtggccaaggagattcccacaaacaagcaagaggcagagatcccaggtgcaaacctcaatgtggagggcacctcaacacctttgcttcgaatagcctgggctcgaatcatattggatgaagctcacaatgttaagaatccccgagtgcagacttccatagctgtgtgtaagctacaagcctgtgcccgttgggctgtcactggaacccccattcaaaacaacttattggatatgtattcgctgctgaagtttctccgttgctctccatttgatgagttcaatctgtggaggagtcaggttgacaatggctcaaagaaaggaggagaacggttaagtattttaaccaagagccttttgctgaggagaacaaaagaccagctggactctactggcagacctttggtgatactgccccagcgtaaatttcagttgcaccatttaaagctttctgaagatgaagagactgtttacaatgtgttttttgcaagatcaaggtcagctctgcaatcctatctaaaaagacatgaaagtagaggcaaccaatctggaagaagccctaataatccattcagtagagtggcactggagtttgggtctgaggagcctagacactcggaggcagcagactcaccgagatccagcaccgtccacatactgtcccagttgctgagactccgccagtgttgctgtcatctttctttactgaagtcggccctggatccaatggaactgaagggtgaaggtcttgtcctttccctggaagaacagctcagtgctttgaccttgtcagaactccgtgactcagagccatcttccactgtttcccttaacggcaccttcttcaagatggagctttttgaaggcatgcgagagagcaccaagatttcatctctgttggcagaattggaggcaattcaaagaaattcagcatcccaaaagagtgtcattgtctctcagtggaccaacatgctgaaagttgtagcattgcacctgaagaagcatggactgacttatgccaccatcgatggctctgtcaatcccaagcagagaatggacttggtagaggcatttaaccactccagaggccctcaggtaatgctaatctctctcttggccggaggtgttggtctaaacctgactggaggaaatcacctctttcttttggacatgcactggaatccatcacttgaagatcaagcttgtgaccgaatttaccgagtagggcagcagaaagatgttgtcatacacagatttgtttgtgagggaacagtagaagaaaagatcttacagctccaagaaaaaaagaaagatttggccaaacaagttctatcagggtctggagaatctgtcaccaagctcaccttggctgacctcagagtcctttttggcatctaacctcctgtggataagggctcagaatagcaccattgctggtttgtattaggatctgggaataacaacctaaccatgagccttgaactctgttctttgcatttcaatttcaccgtcaagcctttcaccttcctcaaaatgaggcataatcttatccccagaattgaggaggggttgtgttaaccaattagttaaccaattatgttaataatttatttaatgagtggtatggaaaccaattgatttttttagataaaagaatatgttttagagttggatgattttggaaaacaactctggcagaattgtatataagcttcagtaaagttcaaaaagcgggccaggtgtggtggctcatgcctgtaatcccgacactttgggaggccaaggcaggaggatggcttgaagccagtagttcaagaccagcctgggcaacatagtaagaccccatctctatgaagaataaaaaaatgagctaggcgtggtagtgcacacctgtagtcctagctacttgggaggctgaggcaggaggatcccttgagtccaggaggttgaggctgcagtgagctgtgattgtgccactgttttccagcctgggcaatacagtgagaccctgtctcaaaaaaaggaaaaaaaagctcaaaaagttctgtgttgcctttctcttcttagctgatgatgggagaaccagttactaccttctctaacacaggctccatcctatctcttcatctcttcttgccagtgatgttgcacctgtaaccatctttttatgggtggagcagagagtcaatccctgcagccaccctgcagccagccatctctgcagttctctcagtgcaggcagttcttcctctcaggctgaagatcaaggagatgctttgtacatgaacagatgctgagtatctgttatcattgtattgtttagtgtcagtgtatcatttagtatttgtatcactgtaccatttagtgttgtatatcactcagtcatttaatattggttatcaccatacagtttaatatttgtatcatttggttcattgtatcgtttagtatttctattataacatttctatttgtagtatttgtataatatttgtgtcatttttaatagtatttgtatttttacaaatttgcagtatttgtagcatttagtatcattgtttcatttagtatttggtacaatctaataaatactaatccagtccaatactaatccaatccaatactaataatactattggtacaatccaatactaataatactattggtacaatccaatactaataatactaacagtagtattgatacaatctaataaataatgtgtttgacagtgtagcagaaataatgctatgtgttcaccaaacccacttccttttcctcccgggcacccagagagactgtatttcccagtttttgctgcagtttgacggggtccatatcaatggactgtggagagaagcgattgatgtaagtcacttctaggtggccctctaccactttccaaaagatcattcatgctgtttcttccctcctcagcctatgggatgcaaaggaactgatggaagattacaaggccctagggaaggtgaagccactagctcagcagttcttagcctagtttttggccatcagcccttctattagactagtgaagcctcagtcccaggatggctccccatgtacacttccctcctcgccccagctcacctacactggactatgacatgatcaaggaatctttttttttaagctactgagatttctgtgttgtttacatagcagtttgtaccctaaacaaacacttgagattttatacttcaggaaactattcagatttccttctcattagcaattgttccaaaaacacttactctgctaatttctgctagaaagaatcacagttcttctaacacagaaacatttctgtcccttgagttgggaaacaagaccctatgttaacccagtcagagtgtggactgaggcattcggagcctatttaagcagaagttttctataaggacaagatttaaaggcttacaaaggtaaagacaatggcctggtgggaagaattctagtctagaacgtttgagatttgactctagttctaggttcatcttagctgggtgtgtaacgttgaaaaaattggccgggtgcagtggctcaggcctgtcatcccagcactttgggaggccgaggcagacggatcacgaggtcaagagatcaagaccatcttggccaacatggtgaaaccccgtctctactaaaaatacaaaaattagctgagcgtggtggcgtgcgcctgtagtcccagctactggggaggataaggcaggagaatcgcttgaacctgggaggtggaggttgcagtgagctgagatcgcgccattgcactccagcctggtgacagagcgagactccgtctcaaaaaaaaaaaaaaaaaaaaagagagagaaaaaaatccttactttctctacactctgatttcctcatttgtaaggtgggcagttttcagaacttagcagcaataaggtttctgataaaatcaagaagcaaaggaagtaacattgcctttttgaagttttgctataagattgacataccaaggtaaagattgagtcacctgagaagcagtggctcccaggccagcaagaatgtacaaacctggctctgccatttgctgattgatattaggcaagttgcagattccttggacatctcaatcctttcatctgtaaaatgtgtggattagcatgtatctcatgctccactgggaatttcatagcaaatatatatactacaacatggttgaccagatagatcagtaatgtcaactagaaggtattagatgaacattgtcagtctccaatcaagcattgtttaggggagaggaattctttcaggttcaagcattctggcttttagtttggagagggatgcagggattgtaacttaaaatcttcagatattgaggccattgacaagtaatctactgtaaggtagatgcctcctggtattttaaaacagcttttctaatttctcatgttattgtacataagcaaagcaacctagttatgtcttgggtaggtgttcttatagccgtgagatgctactgacttgaggtggatgcagaaaaaaatggaaccactgccttaatgggatggaatatactaaacatgcattcttaaatcctagtgctgggatggattacatgaattacattgtggagctgcatatgtgtctcccctcttccctccctgggggttaggctgggtttgtttggttttttttgttttgtcctcatgaggcttagcatctaagggagacaggcatgaattaacagaagtggcattctggtatctgtctcagcctcatattcattttagtgtaaatcagtttcgtcaagtctaggtatgacaaggtgggtctttgcaccttctagcgatgggcagcatcccacaacacagtggtctaattgaggtgctgcactatgagtcctgcctgtgttaaccagccttccttcatgtcacaatactgctgctggatttgctttttacatctgcctattgcacctgacttgggcatggatgatatgaggtaataaatgctttgaaaaccatgaagggccacacaagtgctagtgttattgctgtgggacaaggtctgggaatatgagaaccagcagcagcatgggtgcagctgagaaccagatggtgaacatctgtctccaaagtgcaacattcctgagcaccggatttataaggcatttcttactcgacagaattgacttcatggaaggtatgtagtttgactttgccttagccatgttgatcaaataggagtattgtgcatgccgcagctagacagagtcctgggccctttaaaaaccttgtcagtgactcccattgcaggcccagcgcagtggttcacacctgtaatcccagcatttgggaggctgaggcaggcagatcacttgaggccaagagttcgagaccagactggccaacatggcaaaacctcctctctactaaaaatacaaaagttagccaggcgtgatgttgggtgcctgtaattgcagctactcgggaggctgaggcaggagaatcacttgaatccaggaggcggaggttacagtgagctgagatcataccactgcactccagcctgggccacagagaaagaacggtgattctttctagcagaaattagcagagtaagtgtttttggaacaattgctaatgaaaagaaggaaaaacagaaaaaaaaaattttctgtttatgggaggtgacttatttctctatcaatcctgtgagtgatttagcatggcaattcatgaacactgagttgtttccttgctctgattgtctgttgctcaatgaaatggcttttagcagggctcaaaggtgaagccagattctcctgcactaataggataagcatggagacaccagtgttcagtgtggcctctggttgtctgaaattttgctgtcaactctaataccttgaaagaattaggtttccaaagtgggatattgtgctgctgtttgtgatatagcatctagacttaggaaagggcaggaacaatttaaaagcacatctgtaggcacaaagagaattataatagaaattcagaattcctaggcatatgacctagactaaaatgtcttcataactacaaatgaaatcagggtcatttatagtacaaactaccacagaagtcagtagttaggggatggagatagatatgaaaaaaaaaaaaagcaaacccagcctaactcccagggagggaagaggggcgacagatatgcagctacacaatgtttttactatcttgagttctttttacccagattccatagctaaatccagatgtattaataggtagagactacttcagaaaggatgagactattttcttgcttaattatccacacagtaattcagaaatgtatattgaacactttttatatgccaggcactgctgggcactggaaatataaaagtaagcaaaaatgaaaaactatcctgtcctcctgaggcttagcatctaagggagacaggcattagtcaaccccgtgtggctgtgaatcagccatgatgctgagtgctacaagagaggactgtgcggctgggagggcttataacaggatttgacctagttagggaagatctgaggaagtgatgaaagaatggaaatcaatatgtaagagctcacaagtcagagtgagatgtttcttcctatactgcctgcttctaatgagcatccacttcattgaaccacctcttcattgagccaaacctaccatacagggatacattctctggaggaaagttgagcaactattgcatttgggacattagagtatgggtgggctgacaggtatgtgtatgtttattatccaagacagccaaggtgtttatcctgttacaacatcccagaggacagaggctcttatttgtgactcttttttcttacctgtaacaccagaggcataacgtacatcataatgctgcatcttgttgacgcttcaatgctcacaattcaaaggtgatttctgaagcactttgttacactggggacagctcctaaatcctcccactctttttttgcctcaccttggagtcttgggctctgttgatcactgactctgccaggtctttcagcaggcaagacagctcagttaaattgagtttggactccactgtagtgcatgcatgagacagcacccccaatccccaacacccacacacaaactttaaatatttgtaacagaattgttaccattaatattgcttaaaggctaacacattagccagaacctagatgtcttctggaaattttttattgcaatgttacttcatctacataaagttgtccaatcactgaaacctccaactgaaataaatggtaagctttttgttctcaa

SEQ ID NO: 192363 - DNA, 639 bp, Homo sapiens
  Payload ID: 17991
  Gene Name: transcription termination factor, RNA polymerase II
  ENST ID: ENST00000427271
  CDS Start-End: 1-432
aacatgctgaaagttgtagcattgcacctgaagaagcatggactgacttatgccaccatcgatggctctgtcaatcccaagcagagaatggacttggtagaggcatttaaccactccagaggccctcaggtaatgctaatctctctcttggccggaggtgttggtctaaacctgactggaggaaatcacctctttcttttggacatgcactggaatccatcacttgaagatcaagcttgtgaccgaatttaccgagtagggcagcagaaagatgttgtcatacacagatttgtttgtgagggaacagtagaagaaaagatcttacagctccaagaaaaaaagaaagatttggccaaacaagttctatcagggtctggagaatctgtcaccaagctcaccttggctgacctcagagtcctttttggcatctaacctcctgtggataagggctcagaatagcaccattgctgctgatgatgggagaaccagttactaccttctctaacacaggctccatcctatctcttcatctcttcttgccagtgatgttgcacctgtaaccatctttttatgggtggagcagagagtcaatccctgcagccaccctgcagccagccatctctgcagttctctcagtgc

SEQ ID NO: 192364 - DNA, 2159 bp, Homo sapiens
  Payload ID: 17992
  Gene Name: transcriptional adaptor 1
  Uniprot ID: Q96BN2
  ENST ID: ENST00000367874
  CDS Start-End: 95-1102
agcttccagagccaaggccttccgccgagttggtttttgggttgttgatcgcggtggccgggcggtctgcggtcgggctgagacacgcggagcaatggcgacctttgtgagcgagctggaggcggccaagaagaacttaagcgaggccctgggggacaacgtgaaacaatactgggctaacctaaagctgtggttcaagcagaagatcagcaaagaggagtttgaccttgaagctcatagacttctcacacaggataatgtccattctcacaatgatttcctcctggccattctcacgcgttgtcagattttggtttctacaccagatggtgctggatctttgccttggccagggggttccgcagcaaaacctggaaaacccaagggaaagaaaaagctttcttctgttcgtcagaaatttgatcatagattccagcctcaaaatcctctctcaggagcccagcaatttgtggcaaaggatccccaagatgatgacgacttgaaactttgttcccacacaatgatgcttcccactcgaggccagcttgaagggagaatgatagtgactgcttatgagcatgggctggacaatgtcaccgaggaggctgtttcagctgttgtctatgctgtggagaatcaccttaaagatatactgacgtcagttgtgtcaagaaggaaagcttatcggttacgagatggtcattttaaatatgcctttggcagtaacgtgaccccgcagccatacctgaagaatagtgtagtagcttacaacaacttaatagaaagccctccagcttttactgctccctgtgctggtcagaatccagcttctcacccaccccctgatgatgctgagcagcaggctgcactcctgctggcatgctccggagacactctacctgcatctttgcctccggtgaacatgtacgatctttttgaagctttgcaggtgcacagggaagtcatccctacacatactgtctatgctcttaacattgaaaggatcatcacgaaactctggcatccaaatcatgaagagctgcagcaagacaaagttcaccgccagcgcttggcagccaaggaggggcttttgctgtgctaaattaggatttgagggtgtgggaccctcaccgaattcattgattactgaaaattgaatgttttttgggtccacatttcaaggctgaagtgtatagtgtatatataacctttcctatggaaatgtgacattgagtacattttgtgttgctgttgtgaagccattaatataaatctttggtaatgacccatatctctatatgtatgtgttcccagttgtgggagcaggcactaatgaaatcctgtgcctggaatggagatatttaggtacctgaggcttagtgtcctgtggtctgcatgtaagatagatgacatcctagaacaaagaagctgttttaacttaatccccctgatcagcaggatatctgtgtgttcagtgacatcatacattctgtatctagaagtctaaaatttctgcctttctcctaaagaatgtgttcttgcattttggttgaaataacctacacagtgttaaaaatcagatacctcctttagtgaccagttcaaattttaatagcgataggtagcccctgagaaatttatcactataactccacaggaaatatgacttggaagtgctctgtgtactaaacaaaataaagcccctctttgcatttaaaaccaaagtcaaaacaaaactcttgtaatgcaattaattaactttatgtcttcccatgactcaagttttgttaaatatgcccaaaaactttgattggcagtttcttcggttaattattcctatagaatgtattttaagaaatctatacaaattggatatatgcttggtaattctccagtttctaggaggtacctatttctaccgtttcaagtgatgaagtgaaaataatttacattcgatagtgttactgataacaaacctacttaagagatatgttgctttttacttaagggatagtgttgatagataaattagaatgtatagataggtttgtgaaagtctaaataatggttgtatagatatgtatatatggttcacatatctggatctgtgtatttgattttgtactttaaatgtgacaaataaaccttttgggagaaaa

SEQ ID NO: 192365 - DNA, 1948 bp, Homo sapiens
  Payload ID: 17993
  Gene Name: transcriptional adaptor 2A
  ENST ID: ENST00000612272
  CDS Start-End: 371-1702
atttcccgctcagccctggagcgcgtagctctaccaagaatggccactgtgccagatgcccctgaccagcgttgcccatttgaatttcctagcaggccccccaaagtaggtatttcagtaccctgttagagctgaggcgcaggtaaaatgactggcccaggccggtcccaccccgtaaggatttgaacgttggctccacaactcgggagcctgcgcctttcctcctcccaacgtggactcctgcccggcgaagtgcctcacttccttctcccgggagtcatcaagctttggtgtatgtgttggccggttctgaagtcttgaagaagctctgctgaggaagaccaaagcagcactcgttgccaattagggaatggaccgtttgggttcctttagcaatgatccctctgataagccaccttgccgaggctgctcctcctacctcatggagccttatatcaagtgtgctgaatgtgggccacctccttttttcctctgcttgcagtgtttcactcgaggctttgagtacaagaaacatcaaagcgatcatacttatgaaataatgacttcagattttcctgtccttgatcccagctggactgctcaagaagaaatggcccttttagaagctgtgatggactgtggctttggaaattggcaggatgtagccaatcaaatgtgcaccaagaccaaggaggagtgtgagaagcactatatgaagcatttcatcaataaccctctgtttgcatctaccctgctgaacctgaaacaagcagaggaagcaaaaactgctgacacagccattccatttcactctacagatgaccctccccgacctacctttgactccttgctttctcgggacatggccgggtacatgccagctcgagcagatttcattgaggaatttgacaattatgcagaatgggacttgagagacattgattttgttgaagatgactcggacattttacatgctctgaagatggctgtggtagatatctatcattccaggttaaaggagagacaaagacgaaaaaaaattataagagaccatggattaatcaaccttagaaagtttcaattaatggaacggcggtatcccaaggaggtccaggacctgtatgaaacaatgaggcgatttgcaagaattgtggggccagtggaacatgacaaattcattgaaagccatgcattggaatttgaactccgaagggaaatcaagaggctccaagaatacaggacagcaggcattaccaatttttgtagtgccagaacctacgatcacctcaagaagacacgggaggaagagcgccttaaacgcactatgctctcagaagttctccagtatatccaggacagtagtgcttgccagcagtggctccgccggcaagctgacattgattccggcctgagtccttccattccaatggcttcgaattcaggtagacggagtgcaccacccttgaacctcactggcctccctggcacagagaagctgaatgaaaaagaaaaggagctctgtcagatggtgaggttggtccctggagcctatttagaatacaaatctgctctattgaacgaatgtaacaagcaaggaggcttaagactggcgcaggcaagagcactcatcaagatagatgtgaacaaaacccggaaaatctatgatttcctcatcagagaaggatacatcactaaaggctaaggctccaagagcttgggatcagaagtcagaagtttggaatgtggtgggtcaaaggacaatatgggtgggcattctggagagttgtttttcagctgaattctcatggtgaaaacaggggaaaggacaaaggaaaccttaagttgtattgtctactttcttctccatcctgctttaaaacactcctgttgttggtattatgctgcagagttgtgtgctacataagctattattaaatgtgagtgggca

SEQ ID NO: 192366 - DNA, 804 bp, Homo sapiens
  Payload ID: 17993
  Gene Name: transcriptional adaptor 2A
  ENST ID: ENST00000615328
  CDS Start-End: 222-804
agcaggccccccaaagtaggtatttcagtaccctgttagagctgaggcgcaggtaaaatgactggcccaggccggtcccaccccgtaaggatttgaacgttggctccacaactcgggagcctgcgcctttcctcctcccaacgtggactcctgcccggcgaagtgcctcacttccttctcccgggagtcatcaagctttggtctggactgctcaagaagaaatggcccttttagaagctgtgatggactgtggctttggaaattggcaggatgtagccaatcaaatgtgcaccaagaccaaggaggagtgtgagaagcactatatgaagcatttcatcaataaccctctgtttgcatctaccctgctgaacctgaaacaagcagaggaagcaaaaactgctgacacagccattccatttcactctacagatgaccctccccgacctacctttgactccttgctttctcgggacatggccgggtacatgccagctcgagcagatttcattgaggaatttgacaattatgcagaatgggacttgagagacattgattttgttgaagatgactcggacattttacatgctctgaagatggctgtggtagatatctatcattccaggttaaaggagagacaaagacgaaaaaaaattataagagaccatggattaatcaaccttagaaagtttcaattaatggaacggcggtatcccaaggaggtccaggacctgtatgaaacaatgaggcgatttgcaagaattgtggggccagtggaacatgacaaattcattgaaagccatgcat

SEQ ID NO: 192367 - DNA, 2211 bp, Homo sapiens
  Payload ID: 17993
  Gene Name: transcriptional adaptor 2A
  ENST ID: ENST00000620628
  CDS Start-End: 158-1489
aaagcccggaggcgcgcgcgaccggcggctctttggcgcggattagggggtctcggcgagggagtcatcaagctttggtgtatgtgttggccggttctgaagtcttgaagaagctctgctgaggaagaccaaagcagcactcgttgccaattagggaatggaccgtttgggttcctttagcaatgatccctctgataagccaccttgccgaggctgctcctcctacctcatggagccttatatcaagtgtgctgaatgtgggccacctccttttttcctctgcttgcagtgtttcactcgaggctttgagtacaagaaacatcaaagcgatcatacttatgaaataatgacttcagattttcctgtccttgatcccagctggactgctcaagaagaaatggcccttttagaagctgtgatggactgtggctttggaaattggcaggatgtagccaatcaaatgtgcaccaagaccaaggaggagtgtgagaagcactatatgaagcatttcatcaataaccctctgtttgcatctaccctgctgaacctgaaacaagcagaggaagcaaaaactgctgacacagccattccatttcactctacagatgaccctccccgacctacctttgactccttgctttctcgggacatggccgggtacatgccagctcgagcagatttcattgaggaatttgacaattatgcagaatgggacttgagagacattgattttgttgaagatgactcggacattttacatgctctgaagatggctgtggtagatatctatcattccaggttaaaggagagacaaagacgaaaaaaaattataagagaccatggattaatcaaccttagaaagtttcaattaatggaacggcggtatcccaaggaggtccaggacctgtatgaaacaatgaggcgatttgcaagaattgtggggccagtggaacatgacaaattcattgaaagccatgcattggaatttgaactccgaagggaaatcaagaggctccaagaatacaggacagcaggcattaccaatttttgtagtgccagaacctacgatcacctcaagaagacacgggaggaagagcgccttaaacgcactatgctctcagaagttctccagtatatccaggacagtagtgcttgccagcagtggctccgccggcaagctgacattgattccggcctgagtccttccattccaatggcttcgaattcaggtagacggagtgcaccacccttgaacctcactggcctccctggcacagagaagctgaatgaaaaagaaaaggagctctgtcagatggtgaggttggtccctggagcctatttagaatacaaatctgctctattgaacgaatgtaacaagcaaggaggcttaagactggcgcaggcaagagcactcatcaagatagatgtgaacaaaacccggaaaatctatgatttcctcatcagagaaggatacatcactaaaggctaaggctccaagagcttgggatcagaagtcagaagtttggaatgtggtgggtcaaaggacaatatgggtgggcattctggagagttgtttttcagctgaattctcatggtgaaaacaggggaaaggacaaaggaaaccttaagttgtattgtctactttcttctccatcctgctttaaaacactcctgttgttggtattatgctgcagagttgtgtgctacataagctattattaaatgtgagtgggcattcattcctaacacctcttgtaactaaaagaaccatagtacctcacatcacagtgctggtagaaatggaactaaaccacagtctgtaatcccaggagtccagctcagatccttatattgcgaggtaagtttgctgattatctgtcttgccttcaaacactgcagacagatttaaaataaagagaaaggttttagagcataagaaagctctcgttgaaggattttttaagctgacaactttttttttttttttttgagacagagttgcagcgagctgagatcacgccactgtgctccagcctgggcaacaaagtgagactctgtctcaaaaaaaaaaaaacaaaaaaaaacctttaatgtctggctttgtactttgcagtctgcctgtctaatctgcagtagtcttttgaggaggtggcaccggatataacatgtctctgttatttttagaattaattaaaatgttttgctatttaa

SEQ ID NO: 192368 - DNA, 561 bp, Homo sapiens
  Payload ID: 17993
  Gene Name: transcriptional adaptor 2A
  ENST ID: ENST00000614112
  CDS Start-End: 162-561
acgcaaagcccggaggcgcgcgcgaccggcggctctttggcgcggattagggggtctcggcgagggagtcatcaagctttggtgtatgtgttggccggttctgaagtcttgaagaagctctgctgaggaagaccaaagcagcactcgttgccaattagggaatggaccgtttgggttcctttagcaatgatccctctgataagccaccttgccgaggctgctcctcctacctcatggagccttatatcaagtgtgctgaatgtgggccacctccttttttcctctgcttgcagtgtttcactcgaggctttgagtacaagaaacatcaaagcgatcatacttatgaaataatggatgtagccaatcaaatgtgcaccaagaccaaggaggagtgtgagaagcactatatgaagcatttcatcaataaccctctgtttgcatctaccctgctgaacctgaaacaagcagaggaagcaaaaactgctgacacagccattccatttcactctacagatgaccctccccgacctacctttgactccttgctttctcgggacatgg

SEQ ID NO: 192369 - DNA, 1043 bp, Homo sapiens
  Payload ID: 17993
  Gene Name: transcriptional adaptor 2A
  ENST ID: ENST00000620367
  CDS Start-End: 109-1026
gtctcggcgagggagtcatcaagctttggtgtatgtgttggccggttctgaagtcttgaagaagctctgctgaggaagaccaaagcagcactcgttgccaattagggaatggaccgtttgggttcctttagcaatgatccctctgataagccaccttgccgaggctgctcctcctacctcatggagccttatatcaagtgtgctgaatgtgggccacctccttttttcctctgcttgcagtgtttcactcgaggctttgagtacaagaaacatcaaagcgatcatacttatgaaataatgacttcagattttcctgtccttgatcccagctggactgctcaagaagaaatggcccttttagaagctgtgatggactgtggctttggaaattggcaggatgtagccaatcaaatgtgcaccaagaccaaggaggagtgtgagaagcactatatgaagcatttcatcaataaccctctgtttgcatctaccctgctgaacctgaaacaagcagaggaagcaaaaactgctgacacagccattccatttcactctacagatgaccctccccgacctacctttgactccttgctttctcgggacatggccgggtacatgccagctcgagcagatttcattgaggaatttgacaattatgcagaatgggacttgagagacattgattttgttgaagatgactcggacattttacatgctctgaagatggctgtggtagatatctatcattccaggttaaaggagagacaaagacgaaaaaaaattataagagaccatggattaatcaaccttagaaagtttcaattaatggaacggcggtatcccaaggaggtccaggacctgtatgaaacaatgaggcgatttgcaagaattgtggggccagtggaacatgacaaattcattgaaagccatgcatgtaggtggtttttgagccttgagcagtatttgtgtgtgtatatttatataaataggagagataatggtgtgttttatgtgaagttctataaataaataaatggatatttctc

SEQ ID NO: 192370 - DNA, 4253 bp, Homo sapiens
  Payload ID: 17993
  Gene Name: transcriptional adaptor 2A
  ENST ID: ENST00000615182
  CDS Start-End: 174-1505
ccgggggcgcgcacgcaaagcccggaggcgcgcgcgaccggcggctctttggcgcggattagggggtctcggcgagggagtcatcaagctttggtgtatgtgttggccggttctgaagtcttgaagaagctctgctgaggaagaccaaagcagcactcgttgccaattagggaatggaccgtttgggttcctttagcaatgatccctctgataagccaccttgccgaggctgctcctcctacctcatggagccttatatcaagtgtgctgaatgtgggccacctccttttttcctctgcttgcagtgtttcactcgaggctttgagtacaagaaacatcaaagcgatcatacttatgaaataatgacttcagattttcctgtccttgatcccagctggactgctcaagaagaaatggcccttttagaagctgtgatggactgtggctttggaaattggcaggatgtagccaatcaaatgtgcaccaagaccaaggaggagtgtgagaagcactatatgaagcatttcatcaataaccctctgtttgcatctaccctgctgaacctgaaacaagcagaggaagcaaaaactgctgacacagccattccatttcactctacagatgaccctccccgacctacctttgactccttgctttctcgggacatggccgggtacatgccagctcgagcagatttcattgaggaatttgacaattatgcagaatgggacttgagagacattgattttgttgaagatgactcggacattttacatgctctgaagatggctgtggtagatatctatcattccaggttaaaggagagacaaagacgaaaaaaaattataagagaccatggattaatcaaccttagaaagtttcaattaatggaacggcggtatcccaaggaggtccaggacctgtatgaaacaatgaggcgatttgcaagaattgtggggccagtggaacatgacaaattcattgaaagccatgcattggaatttgaactccgaagggaaatcaagaggctccaagaatacaggacagcaggcattaccaatttttgtagtgccagaacctacgatcacctcaagaagacacgggaggaagagcgccttaaacgcactatgctctcagaagttctccagtatatccaggacagtagtgcttgccagcagtggctccgccggcaagctgacattgattccggcctgagtccttccattccaatggcttcgaattcaggtagacggagtgcaccacccttgaacctcactggcctccctggcacagagaagctgaatgaaaaagaaaaggagctctgtcagatggtgaggttggtccctggagcctatttagaatacaaatctgctctattgaacgaatgtaacaagcaaggaggcttaagactggcgcaggcaagagcactcatcaagatagatgtgaacaaaacccggaaaatctatgatttcctcatcagagaaggatacatcactaaaggctaaggctccaagagcttgggatcagaagtcagaagtttggaatgtggtgggtcaaaggacaatatgggtgggcattctggagagttgtttttcagctgaattctcatggtgaaaacaggggaaaggacaaaggaaaccttaagttgtattgtctactttcttctccatcctgctttaaaacactcctgttgttggtattatgctgcagagttgtgtgctacataagctattattaaatgtgagtgggcattcattcctaacacctcttgtaactaaaagaaccatagtacctcacatcacagtgctggtagaaatggaactaaaccacagtctgtaatcccaggagtccagctcagatccttatattgcgaggtaagtttgctgattatctgtcttgccttcaaacactgcagacagatttaaaataaagagaaaggttttagagcataagaaagctctcgttgaaggattttttaagctgacaactttttttttttttttttgagacagagtttgctcttgtcctccaggctggagtgtgatggcaagatctcagctcactacaacctctgcctcccaggttcaagtgattctcctgcctcagcctcccgaatagctgggactacaggtgtccaccaccacacctggctaattttgtatttttagtagagacagggttttgtcatgttggccaggctggtcacaaactcctgacctcaggtgatctgcccgcctcagcctcccaaagtactaggattacaggcgtgagccatcgcgcccggcctaagctgacaacttttatgagtaaaggggaagaaaatatccttatgatggtcttatcccaaactgcatctttaacttcggccgggcaaggtggctcacctgtaatcccagcactttgggaggctaaggtgggcggatcacgaagtcaggagttcaagaccagcctgaccaacatggtgaaacagtctctactaaaaatacaaaaattagctgagtgtggtggcacacgcctgtaatcccagctactcaggaggctgaggcaggagaattgcttgaacacaggaggcagaggttgcagcgagctgagatcacgccactgtgctccagcctgggcaacaaagtgagactctgtctcaaaaaaaaaaaaacaaaaaaaaacctttaatgtctggctttgtactttgcagtctgcctgtctaatctgcagtagtcttttgaggaggtggcaccggatataacatgtctctgttatttttagaattaattaaaatgttttgctatttaatttgtgggtgtgtcaaatattctggtaactgaaacacacttaaggtgttggatgcctgccccatcacgctgcactgtctgctgtcacatgtgtcctgaactcaccctgtttttgccctgggtttcccaggataccaagcccctgaggatggagatgatgcaacaaacctcagctttgcttggattgtgacttgaaccctatttctcaatggtgaaaggctagcctgcaataaaagctgcttttaaaacagaagtaaagcagctttatatatgggactcactagatatgagggtaagtagccccaccacatgtaaaacttggtcctcaaacgtttctgcagaataagaagccaaacttatggttatcttgtttctgttagaaacaaagttgtatatagaaataacttcgtcagaatcgacacaaatcacatcgaatagttgactgtttaattccttctacattcaaatatctaattaaaatactgtgtgctttgttggaagcatctgctcaaacttttgactgttgtaaatatgcatgcagctgggaagggattcatctaagggataagaaatgaaaaagacactctaaggacctgagggaattcaaatagaggacttcgattttttaaaaagaatgacgtggaaatgacctgttttccttgtaaaatcatatctcgtagaaaacattttaccactaccatcacccctagttggttgtgaagtgattgcctcttatccctgaaaggaaactcctgttctgaaaagttgggatgcattagccatcagtgttaggtgacgtctgttgtagtctgaagagtccttaaccttgattaaggaaggcttcctgggagaggtgggcttttggggcaattatatgatagagaagagagagaaaaatggcagatggaagtgggagacaattccacacacagggggtggagaatgatgtggaggcagcagtgggtgtaaggacaatggtgccaagagatttatttggctagaacacaaggggcagctgggtagttaggagtgggaggatggtaggacagtctgacagaaaccttggaaacagttgaactctgaaaagctgatggcaaatcagatttcatgaggaaaatggcatggttgaaaatagtaatagaaaaataagactgaagttttaaatgactggatttttgaaagtaggattattatttctttggtataccgaactttgcaaagatacgtagcattgcatccttcctctttgcttctagacagggttggccataaaccaactacactgatagaggtctctccagattgtctcagaagagagagtttaccctgaaacttaatgacatgaataaaacctgtttactgaaatttttattgcaatttaacgttaaaagtttctgctggagttttatgcatatttttctctctaagtggtgggaaataaagaacaaatctctttccatgtaa

SEQ ID NO: 192371 - DNA, 1948 bp, Homo sapiens
  Payload ID: 17993
  Gene Name: transcriptional adaptor 2A
  Uniprot ID: O75478
  ENST ID: ENST00000622522
  CDS Start-End: 371-1702
atttcccgctcagccctggagcgcgtagctctaccaagaatggccactgtgccagatgcccctgaccagcgttgcccatttgaatttcctagcaggccccccaaagtaggtatttcagtaccctgttagagctgaggcgcaggtaaaatgactggcccaggccggtcccaccccgtaaggatttgaacgttggctccacaactcgggagcctgcgcctttcctcctcccaacgtggactcctgcccggcgaagtgcctcacttccttctcccgggagtcatcaagctttggtgtatgtgttggccggttctgaagtcttgaagaagctctgctgaggaagaccaaagcagcactcgttgccaattagggaatggaccgtttgggtccctttagcaatgatccctctgataagccaccttgccgaggctgctcctcctacctcatggagccttatatcaagtgtgctgaatgtgggccacctccttttttcctctgcttgcagtgtttcactcgaggctttgagtacaagaaacatcaaagcgatcatacttatgaaataatgacttcagattttcctgtccttgatcccagctggactgctcaagaagaaatggcccttttagaagctgtgatggactgtggctttggaaattggcaggatgtagccaatcaaatgtgcaccaagaccaaggaggagtgtgagaagcactatatgaagcatttcatcaataaccctctgtttgcatctaccctgctgaacctgaaacaagcagaggaagcaaaaactgctgacacagccattccatttcactctacagatgaccctccccgacctacctttgactccttgctttctcgggacatggccgggtacatgccagctcgagcagatttcattgaggaatttgacaattatgcagaatgggacttgagagacattgattttgttgaagatgactcggacattttacatgctctgaagatggctgtggtagatatctatcattccaggttaaaggagagacaaagacgaaaaaaaattataagagaccatggattaatcaaccttagaaagtttcaattaatggaacggcggtatcccaaggaggtccaggacctgtatgaaacaatgaggcgatttgcaagaattgtggggccagtggaacatgacaaattcattgaaagccatgcattggaatttgaactccgaagggaaatcaagaggctccaagaatacaggacagcaggcattaccaatttttgtagtgccagaacctacgatcacctcaagaagacacgggaggaagagcgccttaaacgcactatgctctcagaagttctccagtatatccaggacagtagtgcttgccagcagtggctccgccggcaagctgacattgattccggcctgagtccttccattccaatggcttcgaattcaggtagacggagtgcaccacccttgaacctcactggcctccctggcacagagaagctgaatgaaaaagaaaaggagctctgtcagatggtgaggttggtccctggagcctatttagaatacaaatctgctctattgaacgaatgtaacaagcaaggaggcttaagactggcgcaggcaagagcactcatcaagatagatgtgaacaaaacccggaaaatctatgatttcctcatcagagaaggatacatcactaaaggctaaggctccaagagcttgggatcagaagtcagaagtttggaatgtggtgggtcaaaggacaatatgggtgggcattctggagagttgtttttcagctgaattctcatggtgaaaacaggggaaaggacaaaggaaaccttaagttgtattgtctactttcttctccatcctgctttaaaacactcctgttgttggtattatgctgcagagttgtgtgctacataagctattattaaatgtgagtgggca

SEQ ID NO: 192372 - DNA, 920 bp, Homo sapiens
  Payload ID: 17993
  Gene Name: transcriptional adaptor 2A
  ENST ID: ENST00000619777
  CDS Start-End: 1-253
gacttcagattttcctgtccttgatcccagctggactgctcaagaagaaatggcccttttagaagctgtgatggactgtggctttggaaattggcaggatgtagccaatcaaatgtgcaccaagaccaaggaggagtgtgagaagcactatatgaagcatttcatcaataaccctctgtttgcatctaccctgctgaacctgaaacaagcagaggaagcaaaaactgctgacacagccattccatttcactgaatttgacaattatgcagaatgggacttgagagacattgattttgttgaagatgactcggacattttacatgctctgaagatggctgtggtagatatctatcattccaggttaaaggagagacaaagacgaaaaaaaattataagagaccatggattaatcaaccttagaaagtttcaattaatggaacggcggtatcccaaggaggtccaggacctgtatgaaacaatgaggcgatttgcaagaattgtggggccagtggaacatgacaaattcattgaaagccatgcattggaatttgaactccgaagggaaatcaagaggctccaagaatacaggacagcaggcattaccaatttttgtagtgccagaacctacgatcacctcaagaagacacgggaggaagagcgccttaaacgcactatgctctcagaagttctccagtatatccaggacagtagtgcttgccagcagtggctccgccggcaagctgacattgattccggcctgagtccttccattccaatggcttcgaattcaggtagacggagtgcaccacccttgaacctcactggcctccctggcacagagaagctgaatgaaaaagaaaaggagctctgtcagatggtgaggttggtccctggagcctatttagaatacaaatctgct

SEQ ID NO: 192373 - DNA, 2211 bp, Homo sapiens
  Payload ID: 17993
  Gene Name: transcriptional adaptor 2A
  Uniprot ID: O75478
  ENST ID: ENST00000617828
  CDS Start-End: 158-1489
aaagcccggaggcgcgcgcgaccggcggctctttggcgcggattagggggtctcggcgagggagtcatcaagctttggtgtatgtgttggccggttctgaagtcttgaagaagctctgctgaggaagaccaaagcagcactcgttgccaattagggaatggaccgtttgggtccctttagcaatgatccctctgataagccaccttgccgaggctgctcctcctacctcatggagccttatatcaagtgtgctgaatgtgggccacctccttttttcctctgcttgcagtgtttcactcgaggctttgagtacaagaaacatcaaagcgatcatacttatgaaataatgacttcagattttcctgtccttgatcccagctggactgctcaagaagaaatggcccttttagaagctgtgatggactgtggctttggaaattggcaggatgtagccaatcaaatgtgcaccaagaccaaggaggagtgtgagaagcactatatgaagcatttcatcaataaccctctgtttgcatctaccctgctgaacctgaaacaagcagaggaagcaaaaactgctgacacagccattccatttcactctacagatgaccctccccgacctacctttgactccttgctttctcgggacatggccgggtacatgccagctcgagcagatttcattgaggaatttgacaattatgcagaatgggacttgagagacattgattttgttgaagatgactcggacattttacatgctctgaagatggctgtggtagatatctatcattccaggttaaaggagagacaaagacgaaaaaaaattataagagaccatggattaatcaaccttagaaagtttcaattaatggaacggcggtatcccaaggaggtccaggacctgtatgaaacaatgaggcgatttgcaagaattgtggggccagtggaacatgacaaattcattgaaagccatgcattggaatttgaactccgaagggaaatcaagaggctccaagaatacaggacagcaggcattaccaatttttgtagtgccagaacctacgatcacctcaagaagacacgggaggaagagcgccttaaacgcactatgctctcagaagttctccagtatatccaggacagtagtgcttgccagcagtggctccgccggcaagctgacattgattccggcctgagtccttccattccaatggcttcgaattcaggtagacggagtgcaccacccttgaacctcactggcctccctggcacagagaagctgaatgaaaaagaaaaggagctctgtcagatggtgaggttggtccctggagcctatttagaatacaaatctgctctattgaacgaatgtaacaagcaaggaggcttaagactggcgcaggcaagagcactcatcaagatagatgtgaacaaaacccggaaaatctatgatttcctcatcagagaaggatacatcactaaaggctaaggctccaagagcttgggatcagaagtcagaagtttggaatgtggtgggtcaaaggacaatatgggtgggcattctggagagttgtttttcagctgaattctcatggtgaaaacaggggaaaggacaaaggaaaccttaagttgtattgtctactttcttctccatcctgctttaaaacactcctgttgttggtattatgctgcagagttgtgtgctacataagctattattaaatgtgagtgggcattcattcctaacacctcttgtaactaaaagaaccatagtacctcacatcacagtgctggtagaaatggaactaaaccacagtctgtaatcccaggagtccagctcagatccttatattgcgaggtaagtttgctgattatctgtcttgccttcaaacactgcagacagatttaaaataaagagaaaggttttagagcataagaaagctctcgttgaaggattttttaagctgacaactttttttttttttttttgagacagagttgcagcgagctgagatcacgccactgtgctccagcctgggcaacaaagtgagactctgtctcaaaaaaaaaaaaacaaaaaaaaacctttaatgtctggctttgtactttgcagtctgcctgtctaatctgcagtagtcttttgaggaggtggcaccggatataacatgtctctgttatttttagaattaattaaaatgttttgctatttaa

SEQ ID NO: 192374 - DNA, 1003 bp, Homo sapiens
  Payload ID: 17993
  Gene Name: transcriptional adaptor 2A
  ENST ID: ENST00000614122
  CDS Start-End: 158-445
aaagcccggaggcgcgcgcgaccggcggctctttggcgcggattagggggtctcggcgagggagtcatcaagctttggtgtatgtgttggccggttctgaagtcttgaagaagctctgctgaggaagaccaaagcagcactcgttgccaattagggaatggaccgtttgggttcctttagcaatgatccctctgataagccaccttgccgaggctgctcctcctacctcatggagccttatatcaagtgtgctgaatgtgggccacctccttttttcctctgcttgcagtgtttcactcgaggctttgagtacaagaaacatcaaagcgatcatacttatgaaataatgacttcagattttcctgtccttgatcccagctggactgctcaagaagaaatggcccttttagaagctgtgatggactgtggctttggaaattggtaagagcttggtgttaagagttgtcctgccctagtggactcagagaagaagctgttgttgaagagtaaaggaaggaacctcaggaagagaaagcaggatgtagccaatcaaatgtgcaccaagaccaaggaggagtgtgagaagcactatatgaagcatttcatcaataaccctctgtttgcatctaccctgctgaacctgaaacaagcagaggaagcaaaaactgctgacacagccattccatttcactctacagatgaccctccccgacctacctttgactccttgctttctcgggacatggccgggtacatgccagctcgagcagatttcattgaggaatttgacaattatgcagaatgggacttgagagacattgattttgttgaagatgactcggacattttacatgctctgaagatggctgtggtagatatctatcattccaggttaaaggagagacaaagacgaaaaaaaattataagagaccatggattaatcaaccttagaaagtttcaattaatggaacggcggtatcccaaggaggtccaggacctgtat

SEQ ID NO: 192375 - DNA, 598 bp, Homo sapiens
  Payload ID: 17993
  Gene Name: transcriptional adaptor 2A
  ENST ID: ENST00000621780
  CDS Start-End: 429-598
gtagctctaccaagaatggccactgtgccagatgcccctgaccagcgttgcccatttgaatttcctagcaggccccccaaagtaggtatttcagtaccctgttagagctgaggcgcaggtaaaatgactggcccaggccggtcccaccccgtaaggatttgaacgttggctccacaactcgggagcctgcgcctttcctcctcccaacgtggactcctgcccggcgaagtgcctcacttccttctcccgggagtcatcaagctttggtgtatgtgttggccggttctgaagtcttgaagaagctctgctgaggaagaccaaagcagcactcgttgccaattagggaatggaccgtttgggttcctttagcatgtttcactcgaggctttgagtacaagaaacatcaaagcgatcatacttatgaaataatgacttcagattttcctgtccttgatcccagctggactgctcaagaagaaatggcccttttagaagctgtgatggactgtggctttggaaattggcaggatgtagccaatcaaatgtgcaccaagaccaaggaggagtgtgagaagcactatatgaagcatttcatcaa

SEQ ID NO: 192376 - DNA, 920 bp, Homo sapiens; identical to SEQ ID NO: 192372
  Payload ID: 17993
  Gene Name: transcriptional adaptor 2A
  ENST ID: ENST00000632804
  CDS Start-End: 1-253

SEQ ID NO: 192377 - DNA, 1043 bp, Homo sapiens
  Payload ID: 17993
  Gene Name: transcriptional adaptor 2A
  Uniprot ID: O75478
  ENST ID: ENST00000633584
  CDS Start-End: 109-1026
gtctcggcgagggagtcatcaagctttggtgtatgtgttggccggttctgaagtcttgaagaagctctgctgaggaagaccaaagcagcactcgttgccaattagggaatggaccgtttgggtccctttagcaatgatccctctgataagccaccttgccgaggctgctcctcctacctcatggagccttatatcaagtgtgctgaatgtgggccacctccttttttcctctgcttgcagtgtttcactcgaggctttgagtacaagaaacatcaaagcgatcatacttatgaaataatgacttcagattttcctgtccttgatcccagctggactgctcaagaagaaatggcccttttagaagctgtgatggactgtggctttggaaattggcaggatgtagccaatcaaatgtgcaccaagaccaaggaggagtgtgagaagcactatatgaagcatttcatcaataaccctctgtttgcatctaccctgctgaacctgaaacaagcagaggaagcaaaaactgctgacacagccattccatttcactctacagatgaccctccccgacctacctttgactccttgctttctcgggacatggccgggtacatgccagctcgagcagatttcattgaggaatttgacaattatgcagaatgggacttgagagacattgattttgttgaagatgactcggacattttacatgctctgaagatggctgtggtagatatctatcattccaggttaaaggagagacaaagacgaaaaaaaattataagagaccatggattaatcaaccttagaaagtttcaattaatggaacggcggtatcccaaggaggtccaggacctgtatgaaacaatgaggcgatttgcaagaattgtggggccagtggaacatgacaaattcattgaaagccatgcatgtaggtggtttttgagccttgagcagtatttgtgtgtgtatatttatataaataggagagataatggtgtgttttatgtgaagttctataaataaataaatggatatttctc

SEQ ID NO: 192378 - DNA, 4253 bp, Homo sapiens
  Payload ID: 17993
  Gene Name: transcriptional adaptor 2A
  Uniprot ID: O75478
  ENST ID: ENST00000633468
  CDS Start-End: 174-1505
ccgggggcgcgcacgcaaagcccggaggcgcgcgcgaccggcggctctttggcgcggattagggggtctcggcgagggagtcatcaagctttggtgtatgtgttggccggttctgaagtcttgaagaagctctgctgaggaagaccaaagcagcactcgttgccaattagggaatggaccgtttgggtccctttagcaatgatccctctgataagccaccttgccgaggctgctcctcctacctcatggagccttatatcaagtgtgctgaatgtgggccacctccttttttcctctgcttgcagtgtttcactcgaggctttgagtacaagaaacatcaaagcgatcatacttatgaaataatgacttcagattttcctgtccttgatcccagctggactgctcaagaagaaatggcccttttagaagctgtgatggactgtggctttggaaattggcaggatgtagccaatcaaatgtgcaccaagaccaaggaggagtgtgagaagcactatatgaagcatttcatcaataaccctctgtttgcatctaccctgctgaacctgaaacaagcagaggaagcaaaaactgctgacacagccattccatttcactctacagatgaccctccccgacctacctttgactccttgctttctcgggacatggccgggtacatgccagctcgagcagatttcattgaggaatttgacaattatgcagaatgggacttgagagacattgattttgttgaagatgactcggacattttacatgctctgaagatggctgtggtagatatctatcattccaggttaaaggagagacaaagacgaaaaaaaattataagagaccatggattaatcaaccttagaaagtttcaattaatggaacggcggtatcccaaggaggtccaggacctgtatgaaacaatgaggcgatttgcaagaattgtggggccagtggaacatgacaaattcattgaaagccatgcattggaatttgaactccgaagggaaatcaagaggctccaagaatacaggacagcaggcattaccaatttttgtagtgccagaacctacgatcacctcaagaagacacgggaggaagagcgccttaaacgcactatgctctcagaagttctccagtatatccaggacagtagtgcttgccagcagtggctccgccggcaagctgacattgattccggcctgagtccttccattccaatggcttcgaattcaggtagacggagtgcaccacccttgaacctcactggcctccctggcacagagaagctgaatgaaaaagaaaaggagctctgtcagatggtgaggttggtccctggagcctatttagaatacaaatctgctctattgaacgaatgtaacaagcaaggaggcttaagactggcgcaggcaagagcactcatcaagatagatgtgaacaaaacccggaaaatctatgatttcctcatcagagaaggatacatcactaaaggctaaggctccaagagcttgggatcagaagtcagaagtttggaatgtggtgggtcaaaggacaatatgggtgggcattctggagagttgtttttcagctgaattctcatggtgaaaacaggggaaaggacaaaggaaaccttaagttgtattgtctactttcttctccatcctgctttaaaacactcctgttgttggtattatgctgcagagttgtgtgctacataagctattattaaatgtgagtgggcattcattcctaacacctcttgtaactaaaagaaccatagtacctcacatcacagtgctggtagaaatggaactaaaccacagtctgtaatcccaggagtccagctcagatccttatattgcgaggtaagtttgctgattatctgtcttgccttcaaacactgcagacagatttaaaataaagagaaaggttttagagcataagaaagctctcgttgaaggattttttaagctgacaactttttttttttttttttgagacagagtttgctcttgtcctccaggctggagtgtgatggcaagatctcagctcactacaacctctgcctcccaggttcaagtgattctcctgcctcagcctcccgaatagctgggactacaggtgtccaccaccacacctggctaattttgtatttttagtagagacagggttttgtcatgttggccaggctggtcacaaactcctgacctcaggtgatctgcccgcctcagcctcccaaagtactaggattacaggcgtgagccatcgcgcccggcctaagctgacaacttttatgagtaaaggggaagaaaatatccttatgatggtcttatcccaaactgcatctttaacttcggccgggcaaggtggctcacctgtaatcccagcactttgggaggctaaggtgggcggatcacgaagtcaggagttcaagaccagcctgaccaacatggtgaaacagtctctactaaaaatacaaaaattagctgagtgtggtggcacacgcctgtaatcccagctactcaggaggctgaggcaggagaattgcttgaacacaggaggcagaggttgcagcgagctgagatcacgccactgtgctccagcctgggcaacaaagtgagactctgtctcaaaaaaaaaaaaacaaaaaaaaacctttaatgtctggctttgtactttgcagtctgcctgtctaatctgcagtagtcttttgaggaggtggcaccggatataacatgtctctgttatttttagaattaattaaaatgttttgctatttaatttgtgggtgtgtcaaatattctggtaactgaaacacacttaaggtgttggatgcctgccccatcacgctgcactgtctgctgtcacatgtgtcctgaactcaccctgtttttgccctgggtttcccaggataccaagcccctgaggatggagatgatgcaacaaacctcagctttgcttggattgtgacttgaaccctatttctcaatggtgaaaggctagcctgcaataaaagctgcttttaaaacagaagtaaagcagctttatatatgggactcactagatatgagggtaagtagccccaccacatgtaaaacttggtcctcaaacgtttctgcagaataagaagccaaacttatggttatcttgtttctgttagaaacaaagttgtatatagaaataacttcgtcagaatcgacacaaatcacatcgaatagttgactgtttaattccttctacattcaaatatctaattaaaatactgtgtgctttgttggaagcatctgctcaaacttttgactgttgtaaatatgcatgcagctgggaagggattcatctaagggataagaaatgaaaaagacactctaaggacctgagggaattcaaatagaggacttcgattttttaaaaagaatgacgtggaaatgacctgttttccttgtaaaatcatatctcgtagaaaacattttaccactaccatcacccctagttggttgtgaagtgattgcctcttatccctgaaaggaaactcctgttctgaaaagttgggatgcattagccatcagtgttaggtgacgtctgttgtagtctgaagagtccttaaccttgattaaggaaggcttcctgggagaggtgggcttttggggcaattatatgatagagaagagagagaaaaatggcagatggaagtgggagacaattccacacacagggggtggagaatgatgtggaggcagcagtgggtgtaaggacaatggtgccaagagatttatttggctagaacacaaggggcagctgggtagttaggagtgggaggatggtaggacagtctgacagaaaccttggaaacagttgaactctgaaaagctgatggcaaatcagatttcatgaggaaaatggcatggttgaaaatagtaatagaaaaataagactgaagttttaaatgactggatttttgaaagtaggattattatttctttggtataccgaactttgcaaagatacgtagcattgcatccttcctctttgcttctagacagggttggccataaaccaactacactgatagaggtctctccagattgtctcagaagagagagtttaccctgaaacttaatgacatgaataaaacctgtttactgaaatttttattgcaatttaacgttaaaagtttctgctggagttttatgcatatttttctctctaagtggtgggaaataaagaacaaatctctttccatgtaa

SEQ ID NO: 192379 - DNA, 1003 bp, Homo sapiens
  Payload ID: 17993
  Gene Name: transcriptional adaptor 2A
  ENST ID: ENST00000631413
  CDS Start-End: 158-445
aaagcccggaggcgcgcgcgaccggcggctctttggcgcggattagggggtctcggcgagggagtcatcaagctttggtgtatgtgttggccggttctgaagtcttgaagaagctctgctgaggaagaccaaagcagcactcgttgccaattagggaatggaccgtttgggtccctttagcaatgatccctctgataagccaccttgccgaggctgctcctcctacctcatggagccttatatcaagtgtgctgaatgtgggccacctccttttttcctctgcttgcagtgtttcactcgaggctttgagtacaagaaacatcaaagcgatcatacttatgaaataatgacttcagattttcctgtccttgatcccagctggactgctcaagaagaaatggcccttttagaagctgtgatggactgtggctttggaaattggtaagagcttggtgttaagagttgtcctgccctagtggactcagagaagaagctgttgttgaagagtaaaggaaggaacctcaggaagagaaagcaggatgtagccaatcaaatgtgcaccaagaccaaggaggagtgtgagaagcactatatgaagcatttcatcaataaccctctgtttgcatctaccctgctgaacctgaaacaagcagaggaagcaaaaactgctgacacagccattccatttcactctacagatgaccctccccgacctacctttgactccttgctttctcgggacatggccgggtacatgccagctcgagcagatttcattgaggaatttgacaattatgcagaatgggacttgagagacattgattttgttgaagatgactcggacattttacatgctctgaagatggctgtggtagatatctatcattccaggttaaaggagagacaaagacgaaaaaaaattataagagaccatggattaatcaaccttagaaagtttcaattaatggaacggcggtatcccaaggaggtccaggacctgtat

SEQ ID NO: 192380 - DNA, 804 bp, Homo sapiens; identical to SEQ ID NO: 192366
  Payload ID: 17993
  Gene Name: transcriptional adaptor 2A
  ENST ID: ENST00000632146
  CDS Start-End: 222-804

SEQ ID NO: 192381 - DNA, 561 bp, Homo sapiens
  Payload ID: 17993
  Gene Name: transcriptional adaptor 2A
  ENST ID: ENST00000632354
  CDS Start-End: 162-561
acgcaaagcccggaggcgcgcgcgaccggcggctctttggcgcggattagggggtctcggcgagggagtcatcaagctttggtgtatgtgttggccggttctgaagtcttgaagaagctctgctgaggaagaccaaagcagcactcgttgccaattagggaatggaccgtttgggtccctttagcaatgatccctctgataagccaccttgccgaggctgctcctcctacctcatggagccttatatcaagtgtgctgaatgtgggccacctccttttttcctctgcttgcagtgtttcactcgaggctttgagtacaagaaacatcaaagcgatcatacttatgaaataatggatgtagccaatcaaatgtgcaccaagaccaaggaggagtgtgagaagcactatatgaagcatttcatcaataaccctctgtttgcatctaccctgctgaacctgaaacaagcagaggaagcaaaaactgctgacacagccattccatttcactctacagatgaccctccccgacctacctttgactccttgctttctcgggacatgg

SEQ ID NO: 192382 - DNA, 598 bp, Homo sapiens
  Payload ID: 17993
  Gene Name: transcriptional adaptor 2A
  ENST ID: ENST00000632358
  CDS Start-End: 429-598
gtagctctaccaagaatggccactgtgccagatgcccctgaccagcgttgcccatttgaatttcctagcaggccccccaaagtaggtatttcagtaccctgttagagctgaggcgcaggtaaaatgactggcccaggccggtcccaccccgtaaggatttgaacgttggctccacaactcgggagcctgcgcctttcctcctcccaacgtggactcctgcccggcgaagtgcctcacttccttctcccgggagtcatcaagctttggtgtatgtgttggccggttctgaagtcttgaagaagctctgctgaggaagaccaaagcagcactcgttgccaattagggaatggaccgtttgggtccctttagcatgtttcactcgaggctttgagtacaagaaacatcaaagcgatcatacttatgaaataatgacttcagattttcctgtccttgatcccagctggactgctcaagaagaaatggcccttttagaagctgtgatggactgtggctttggaaattggcaggatgtagccaatcaaatgtgcaccaagaccaaggaggagtgtgagaagcactatatgaagcatttcatcaa

SEQ ID NO: 192383 - DNA, 4350 bp, Homo sapiens
  Payload ID: 17994
  Gene Name: transcriptional adaptor 2B
  Uniprot ID: Q86TJ2
  ENST ID: ENST00000310074
  CDS Start-End: 190-1452
aggggggacgcggcccggctggctggctctggcggcggctgggctggggccgcggtggcggcagccgcggcggcgggcggcggttgctcgtgcgcggcggcggcggcgggtcccgcgggcggcggggcgctgacggccgggggcgcggcggctgcggcgggccgggcggcgggcggcgagcgggggaagatggcggagctggggaagaagtactgcgtgtactgcctggccgaggtgagcccgctgcgcttccgctgcaccgagtgccaggacatcgagctgtgccccgagtgcttctcggccggcgccgagatcggccaccaccgccgctaccacggctaccagctggtggacggcgggcgcttcacgctctgggggcccgaggccgagggcggctggaccagtcgcgaggagcagctgctgctggacgccatcgagcagttcggcttcggaaactgggaagatatggctgcccacgttggtgcttcccggactccccaagaggtgatggagcattacgtgagcatgtacatccacgggaacctggggaaggcctgcatccccgacaccatccccaaccgcgtgacagaccacacctgtcccagcggaggccccctctcacccagcctcaccaccccgctgcccccgctggacatctctgtggctgagcagcagcagctgggctacatgccgctgcgggatgattacgagatcgagtatgaccaggatgccgagacgctcatcagcgggctctctgtcaactatgatgacgacgacgtggagatcgagctgaagcgcgcccacgtggacatgtacgtgcggaagctgaaagagagacagcggcggaagaacatcgcccgtgactacaatctggtgccagccttcctggggaaggacaagaaggagaaggaaaaggcgctgaagcgcaagatcaccaaggaggagaaggagctgcgcctgaagctgaggccgctgtaccagttcatgtcatgcaaggagtttgatgacctttttgaaaacatgcacaaagaaaaaatgctccgggccaagatccgagaactgcagcggtaccggcgaaacgggatcaccaagatggaagagtcggcagagtacgaggcagcgcggcataaacgggagaagaggaaggagaacaaaaacctagccggctccaaacggggaaaggaggacggcaaagacagcgagttcgccgccattgagaaccttccaggcttcgagctcctgtcagatcgcgagaaggtgctctgcagctctttaaacttgagtccagcccgctacgtgactgtgaagactattataattaaagaccacctccagaagcggcaaggaatcccctccaaaagccgccttcctagctacctggacaaagtcctaaagaaaaggattttgaatttcctcacagaaagcggctggatctccagggacgcgtcttgaagctgagacgctttgaaagccagggtgatgctcagacagtgtgccagccaaaatgacttgggggaggggagccgcttccccactgttgctcttttttaaacaaattgagttcctttttttaagatagaaattcttttcatggtcctctgaaagaagcaatagtaacaatcttatattggatcatgggggaagcaaatgtgtgtattttaagtgagttcctgcgagtcatacactgcgatgatgctccgcctttacccgttcagttgggagcttattgtgagattggatcatttccttttgagtgttcttctctttggtacaaaagctattgtgggtgacaggagcagtgttttcctgctggacccgcaagccaccagctatttcctggtgacacaagctcttctcaggcggggctgcctgcaggctcccgttttctgagcccacgctgcccacagctgaccccagcgcagccccgggcacgcggcactttacatgggggcagcttgggcccagactcctccgctgtgtagcagatgaggaaaatcaggccagaggacaacaggctggcgttttgttgggaactgaagaggaatctgttgaacacagcgaccagatgaccttccatttcaccggcggcagcagtttcagcgtgcagttcccaaaccccaaagctgaccctgcgccccatttgaatacggccagagcctgctggttcactttgggtagagccgtgcctcttgggcaggctcccatagtgaccacgtccccacgaatgggaaagcacgttagtgggagggacgtaggacacgtgtggaccgccaggccctctcagtccattttccggggctgctcggtgctgctgttaagacgtgagtgcatttcacttggaagaacccattgtacaaagttcaaggctaagagttctgaattctggcgtcagcttcctcaggattttcttcagttgcaagtacctttccactgaaaatatgagcatgcccgcctggctagtaggcatctgtaagagtgtcgccaggcccgcgccagctgaggcctcagactagccaggcaagagccgtctgaccagttggctggcggtggttctggtggagcacgagggagcccgggtggtgccctgagcctcgagctgctctctgtcactgtcttgaatcagactcagaaatggcttcttcccagccctgcctacaagtttttctctggggtcctctttcaaggatgtccacggtaccttcctcctgaaacttgaggaagtcttttgtcttccagctgctcagggttctctggtccaagaccctgctttaaagagagtctttggcgtgctcagactccagcgctccgttcttcaaggaggttgacttgcctctcgggccccgtaggtaccaagagactgtttacctcccagaatgtttgggcttgaagttacattaaagtgaagttatttgaaagaaagaaaacctcatcatttctaaggatgacttaattactgtgccttttcctttctttttacacatcctactgtcccttagggtaaaattttcagcattaaataaaacatttcaaatatattgtatatggctttagttgtaaactatactgcatgctgacagagaagcgctcttttagctaagcccagaacttctcttttgacaataaagtactgagcagtggtatcatgagggccacctccacattgtcccctgcagaataaatgcggatgacagaaagcttatgctgtctaccactgaacagtgatggagatggtgctaagtttttacagttgtcttagccccagtggttctcaaggtggggctcctggcccagcagcagcaacttgtttgttagaatgcagacgcgcaggccccacctggcctcctgaatcaaaatggtgtgcggcagggtgcagcgagctgttttcacgaggcctccaggtgactggatgtaagcttgcttgagaactatgggttttagctattctggtgtctccctgattttctacagcgccaggatcctagtttggtgaggttttaaatttaatcttatttttatataaaatgattgccagacgtactatattaagcttgaagaagcagaagatccctgttaatgtgtatggcccaggccaagagctgtcaaatgaaaaactttgtgctgaagcaggtttttagtatgtatatctttttgatggtatgaagaatttatttaggcttgactgttttaaaacaccataatgaatgtataattaatttatgttaaagtattaaccctttgtcacaaaggaatggtaatgtgattggctgcctgttagcccatcgactattcccgtcacggtagtccttacctctgtcggcagctcagagcctccacatttttatatttaattctcatgataaattagccaccataatcccatggaattaggtcttgttaaaatctagtccgggcgcagtggctcacgcctgtaatcccagcactttgggaggccaaggcgggctgatcacgaggtcaagagatcgagaccatcctggccaacatggtgaaaccctgtctctactaaaaatacaaaaattagctgggtgtggtggtgcatgcctgtagtcccagctacttgggaggctgaggtaggagaattgcttgaacctgggaggcggaggttgcggtgagctgagatcacgccactacactccagcctggtgacagagcaagactccatctcaaaaaaaatctaagcaaactatctttgagtcaaaaaaagttggataactcatctatatttgaaataatgctgtctgaatggccaacatcccaagaatgtattaaaaacagcaaccctgcctaccgttttgatgacctttttccatattaaacaagttgagaacaaaa

SEQ ID NO: 192384 - DNA, 558 bp, Homo sapiens
  Payload ID: 17994
  Gene Name: transcriptional adaptor 2B
  ENST ID: ENST00000506692
  CDS Start-End: 195-558
atccgacagctgcccatggcctgcatcaccacctgcttcttgagtgcctggaagcgtcgccactccttctccaccctggtgagcttctcctggcactgccgcttcaactggcccagctcctggtggtaccactgcaggtcgtctgcctgctgcttcttcagctcctccagcatgcccagatggcgcaggaagatatggctgcccacgttggtgcttcccggactccccaagaggtgatggagcattacgtgagcatgtacatccacgggaacctggggaaggcctgcatccccgacaccatccccaaccgcgtgacagaccacacctgtcccagcggaggccccctctcacccagcctcaccaccccgctgcccccgctggacatctctgtggctgagcagcagcagctgggctacatgccgctgcgggatgattacgagatcgagtatgaccaggatgccgagacgctcatcagcgggctctctgtcaactatgatgacgacgacgtggagatcgagctgaagcgcgcccacgtggacatgtacgtgcggaagctga

SEQ ID NO: 192385 - DNA, 3818 bp, Homo sapiens
  Payload ID: 17994
  Gene Name: transcriptional adaptor 2B
  Uniprot ID: Q86TJ2
  ENST ID: ENST00000515646
  CDS Start-End: 1245-2231
ttctcaaagaggcccacagttgagttttggcactgccttctgtagtcagagtcctggagattcctgggccccaggtggcggggggaagggtccagcacctcggctccaggcatgtgtgccagaggaagccccagctgtgggatcccatccgttcctggagcccagaacacttctctcccagacgccagctcatagtcatcagcctggatggggtggcggtccctctggtttcagctgggcctctggcagtgctgcaggcagcgctgcagtgctggttccacacccaggcgggcagaggcaggtgggggctgggtggctgagaggcggtggccagggaatgagtgcgcactttgggcagttactttctgaagtggctttagcggttgactttgaggaagaggcctctcggcagaaggaaaagattgagggagttatacagtttcctcccattaaaccttgtatttatgggttaccctcttgtaggaatgatgaatgctttcagccagtggcagactcccagccagctgcttaaccgtggaaggtgctaaaaatgaaggcctgctcccttgaagagccacaggcccatcttctgcagtcactgcctaggaaagggccacgccagcccccccggcgcatgaaggccaggatgggtgtgcggccaggacaagcgtcacagaggtgtcctggcccttgcttttccagcgggtggcaacatggtagaactgggtcccctcctgcagtgccgtggacttggcctggtctcacaccctggcacaagcccgttttctagtctgaatgaggcgagttcaggcattccttggcctgccctgctgtctcctgggacattcagacagcccctgagtgcagggtttatggcagtaccaggtgggctcctctggtcgcaggtggggaatgagaacaaagtccaaacctcagccaggggttctggcctcagctctgccaccagctcaccccaagaccttgtgccagcttgtgcctctctgggtcttcactttctcatgtacagaatcagcatgtgttgttgcttcaacattgtcatctctcccctgagcccagctcataagacagtgtgtgactgaatgcctttggggagggtgggtaacggtgctgtaggaagtactctaggtcagcctttgtaaaaacgtgaagagaatctgtgcggaacccaaatctggcaccctgatggtggaactaacttctgccctttgtcatcgtaggaagatatggctgcccacgttggtgcttcccggactccccaagaggtgatggagcattacgtgagcatgtacatccacgggaacctggggaaggcctgcatccccgacaccatccccaaccgcgtgacagaccacacctgtcccagcggaggccccctctcacccagcctcaccaccccgctgcccccgctggacatctctgtggctgagcagcagcagctgggctacatgccgctgcgggatgattacgagatcgagtatgaccaggatgccgagacgctcatcagcgggctctctgtcaactatgatgacgacgacgtggagatcgagctgaagcgcgcccacgtggacatgtacgtgcggaagctgaaagagagacagcggcggaagaacatcgcccgtgactacaatctggtgccagccttcctggggaaggacaagaaggagaaggaaaaggcgctgaagcgcaagatcaccaaggaggagaaggagctgcgcctgaagctgaggccgctgtaccagttcatgtcatgcaaggagtttgatgacctttttgaaaacatgcacaaagaaaaaatgctccgggccaagatccgagaactgcagcggtaccggcgaaacgggatcaccaagatggaagagtcggcagagtacgaggcagcgcggcataaacgggagaagaggaaggagaacaaaaacctagccggctccaaacggggaaaggaggacggcaaagacagcgagttcgccgccattgagaaccttccaggcttcgagctcctgtcagatcgcgagaaggtgctctgcagctctttaaacttgagtccagcccgctacgtgactgtgaagactattataattaaagaccacctccagaagcggcaaggaatcccctccaaaagccgccttcctagctacctggacaaagtcctaaagaaaaggattttgaatttcctcacagaaagcggctggatctccagggacgcgtcttgaagctgagacgctttgaaagccagggtgatgctcagacagtgtgccagccaaaatgacttgggggaggggagccgcttccccactgttgctcttttttaaacaaattgagttcctttttttaagatagaaattcttttcatggtcctctgaaagaagcaatagtaacaatcttatattggatcatgggggaagcaaatgtgtgtattttaagtgagttcctgcgagtcatacactgcgatgatgctccgcctttacccgttcagttgggagcttattgtgagattggatcatttccttttgagtgttcttctctttggtacaaaagctattgtgggtgacaggagcagtgttttcctgctggacccgcaagccaccagctatttcctggtgacacaagctcttctcaggcggggctgcctgcaggctcccgttttctgagcccacgctgcccacagctgaccccagcgcagccccgggcacgcggcactttacatgggggcagcttgggcccagactcctccgctgtgtagcagatgaggaaaatcaggccagaggacaacaggctggcgttttgttgggaactgaagaggaatctgttgaacacagcgaccagatgaccttccatttcaccggcggcagcagtttcagcgtgcagttcccaaaccccaaagctgaccctgcgccccatttgaatacggccagagcctgctggttcactttgggtagagccgtgcctcttgggcaggctcccatagtgaccacgtccccacgaatgggaaagcacgttagtgggagggacgtaggacacgtgtggaccgccaggccctctcagtccattttccggggctgctcggtgctgctgttaagacgtgagtgcatttcacttggaagaacccattgtacaaagttcaaggctaagagttctgaattctggcgtcagcttcctcaggattttcttcagttgcaagtacctttccactgaaaatatgagcatgcccgcctggctagtaggcatctgtaagagtgtcgccaggcccgcgccagctgaggcctcagactagccaggcaagagccgtctgaccagttggctggcggtggttctggtggagcacgagggagcccgggtggtgccctgagcctcgagctgctctctgtcactgtcttgaatcagactcagaaatggcttcttcccagccctgcctacaagtttttctctggggtcctctttcaaggatgtccacggtaccttcctcctgaaacttgaggaagtcttttgtcttccagctgctcagggttctctggtccaagaccctgctttaaagagagtctttggcgtgctcagactccagcgctccgttcttcaaggaggttgacttgcctctcgggccccgtaggtaccaagagactgtttacctcccagaatgtttgggcttgaagttacattaaagtgaagttatttgaaagaaagaaaacctcatcatttctaaggatgacttaattactgtgccttttcctttctttttacacatcctactgtcccttagggtaaaattttcagcattaaataaaacatttcaaatatattgt

SEQ ID NO: 192386 - DNA, 1343 bp, Homo sapiens
  Payload ID: 17994
  Gene Name: transcriptional adaptor 2B
  Uniprot ID: Q86TJ2
  ENST ID: ENST00000512388
  CDS Start-End: 46-1083
gcggcggctgcggcgggccgggcggcgggcggcgagcgggggaagatggcggagctggggaagaagtactgcgtgtactgcctggccgaggaagatatggctgcccacgttggtgcttcccggactccccaagaggtgatggagcattacgtgagcatgtacatccacgggaacctggggaaggcctgcatccccgacaccatccccaaccgcgtgacagaccacacctgtcccagcggaggccccctctcacccagcctcaccaccccgctgcccccgctggacatctctgtggctgagcagcagcagctgggctacatgccgctgcgggatgattacgagatcgagtatgaccaggatgccgagacgctcatcagcgggctctctgtcaactatgatgacgacgacgtggagatcgagctgaagcgcgcccacgtggacatgtacgtgcggaagctgaaagagagacagcggcggaagaacatcgcccgtgactacaatctggtgccagccttcctggggaaggacaagaaggagaaggaaaaggcgctgaagcgcaagatcaccaaggaggagaaggagctgcgcctgaagctgaggccgctgtaccagttcatgtcatgcaaggagtttgatgacctttttgaaaacatgcacaaagaaaaaatgctccgggccaagatccgagaactgcagcggtaccggcgaaacgggatcaccaagatggaagagtcggcagagtacgaggcagcgcggcataaacgggagaagaggaaggagaacaaaaacctagccggctccaaacggggaaaggaggacggcaaagacagcgagttcgccgccattgagaaccttccaggcttcgagctcctgtcagatcgcgagaaggtgctctgcagctctttaaacttgagtccagcccgctacgtgactgtgaagactattataattaaagaccacctccagaagcggcaaggaatcccctccaaaagccgccttcctagctacctggacaaagtcctaaagaaaaggattttgaatttcctcacagaaagcggctggatctccagggacgcgtcttgaagctgagacgctttgaaagccagggtgatgctcagacagtgtgccagccaaaatgacttgggggaggggagccgcttccccactgttgctcttttttaaacaaattgagttcctttttttaagatagaaattcttttcatggtcctctgaaagaagcaatagtaacaatcttatattggatcatgggggaagcaaatgtgtgtattttaagtgagttcctgcgagtcatacactgcgatgatgctccgcctttacccgtt

SEQ ID NO: 192387 - DNA, 544 bp, Homo sapiens
  Payload ID: 17994
  Gene Name: transcriptional adaptor 2B
  ENST ID: ENST00000510704
  CDS Start-End: 156-544
taaccgtggaaggtgctaaaaatgaaggcctgctcccttgaagagccacaggcccatcttctgcagtcactgcctaggaaagggccacgccagcccccccggcgcatgaaggccaggatgggtgtgcggccaggacaagcgtcacagaggaagatatggctgcccacgttggtgcttcccggactccccaagaggtgatggagcattacgtgagcatgtacatccacgggaacctggggaaggcctgcatccccgacaccatccccaaccgcgtgacagaccacacctgtcccagcggaggccccctctcacccagcctcaccaccccgctgcccccgctggacatctctgtggctgagcagcagcagctgggctacatgccgctgcgggatgattacgagatcgagtatgaccaggatgccgagacgctcatcagcgggctctctgtcaactatgatgacgacgacgtggagatcgagctgaagcgcgcccacgtggacatgtacgtgcggaagctgaaagagagacagcggcggaagaacat

SEQ ID NO: 192388 - DNA, 2355 bp, Homo sapiens
  Payload ID: 17995
  Gene Name: transcriptional adaptor 3
  Uniprot ID: O75528
  ENST ID: ENST00000301964
  CDS Start-End: 560-1858
cttccggttctgtacccccatcctttctctcgcccctcctacccgcagctcctggcgctcggcggggctaactgcagcgcggagatctcggccgccaagctccgcctcccgccccgggctgtgccccggggctcgcctgaggccgaccacccgcaccccacctctagcggctttgctcgaggcccaccttcttcccacccccggcaaactccagtaggctcgccctcgctgactccccgcccccgcgtcaactgcaaggggcccgcccatagccagttccggggcggttgctcacatcgaccggaactccccgccccctcccgcggcccctggggccgtaggaggccgcagcgaggaggtagagggggcgggggtcgcactagggtgtccctagagaacgaggactctgaaggcgggacatttgggcgacccccgggcggggccagccattaaacagtcccacttctgtgccagacactgaactgggctcttgacgggcatcatctcttaatcctcagaacatcccagggagctccacaggatccccatatcctgggccatgagtgagttgaaagactgccccttgcagttccacgacttcaagtctgtggatcacctgaaggtctgtccccgctacacggcagtgctggcacgctctgaggatgatggcatcggcatcgaggagctggacaccctgcagctggagctggagaccctgctgtcttctgccagccggcgcctgcgtgtgcttgaggccgaaacccagatcctcaccgactggcaggataagaaaggtgacagacgattcctgaagctgggtcgagaccatgaacttggagctccccccaaacatgggaagcccaagaagcagaaactggaagggaaggcaggacatgggccgggccctggcccaggacggcccaaatccaaaaaccttcagcccaagatccaggaatatgaattcactgatgaccctatcgacgtgccacggatccccaaaaatgatgcccccaacaggttctgggcttcagtggagccctactgtgctgacatcaccagcgaggaggtccgcacacttgaggagttactgaagcccccagaagatgaggctgagcattacaagatcccacccctggggaagcactactcccagcgctgggcccaggaggacctgctggaggagcagaaggatggggcccgggcagcggctgtggctgacaagaagaaaggcctcatggggccactgaccgaactggacactaaagatgtggatgccctgctgaagaagtctgaggcccagcatgaacagccggaagatggatgcccctttggtgccctgacgcagcgcctcctgcaggccctggtggaggaaaatattatttcccctatggaggattctcctattcctgacatgtctgggaaagaatcaggggctgacggggcaagcacctcccctcgcaatcagaacaagcccttcagtgtgccgcatactaagtccctggagagccgcatcaaggaggagctaattgcccagggccttttggagtctgaggaccgccccgcagaggactccgaggatgaggtccttgctgagcttcgcaaacggcaggctgagctgaaggcacttagtgcccacaaccgcaccaagaagcacgacctgctgaggctggcaaaggaggaggtgagccggcaggagctgaggcagcgggtgcgcatggctgacaacgaggtcatggacgcctttcgcaagatcatggctgcccggcagaagaagcggactcccaccaagaaagaaaaggaccaggcctggaagactctgaaggagcgtgagagcatcctgaagctgctggatgggtagccctcacccctgcctcaggctgattatctggcctaggggaggggaagggaggcccacttccttctttgggcacaggaaacattggcctgtggctgtccctcaaatggcggcagtctctagagggccgtggcccttcccctgaggtcttttggcctagctctgtacaaccaggacacaggaagccctgctgggctagcctgaggcctagtctctgcttggtccccgagatggggttggaggggacttcgtttctgggtcttcctcttcccctctttaccatcccccactccctaatcccctacccctgtctccccttcaaggacttctcccttgtggttttgtaaagtgcaaacttaagaataaagtgactgctgtggtttttcaaaaaaagcatccagtctttgaatgtctgttacagtggggaggaaggaaccagtgtgggtggtaaggtttgtggggggtatgcttggtggctctcagcccatggccactaaccc

SEQ ID NO: 192389 - DNA, 2554 bp, Homo sapiens
  Payload ID: 17995
  Gene Name: transcriptional adaptor 3
  Uniprot ID: O75528
  ENST ID: ENST00000343450
  CDS Start-End: 549-1658
gtacccccatcctttctctcgcccctcctacccgcagctcctggcgctcggcggggctaactgcagcgcggagatctcggccgccaagctccgcctcccgccccgggctgtgccccggggctcgcctgaggccgaccacccgcaccccacctctagcggctttgctcgaggcccaccttcttcccacccccggcaaactccagtaggctcgccctcgctgactccccgcccccgcgtcaactgcaaggggcccgcccatagccagttccggggcggttgctcacatcgaccggaactccccgccccctcccgcggcccctggggccgtaggaggccgcagcgaggaggtagagggggcgggggtcgcactagggtgtccctagagaacgaggactctgaaggcgggacatttgggcgacccccgggcggggccagccattaaacagtcccacttctgtgccagacactgaactgggctcttgacgggcatcatctcttaatcctcagaacatcccagggagctccacaggatccccatatcctgggccatgagtgagttgaaagactgccccttgcagttccacgacttcaagtctgtggatcacctgaaggtctgtccccgctacacggcagtgctggcacgctctgaggatgatggcatcggcatcgaggagctggacaccctgcagctggagctggagaccctgctgtcttctgccagccggcgcctgcgtgtgcttgaggccgaaacccagatcctcaccgactggcaggataagaaaggtgacagacgattcctgaagctgggtcgagaccatgaacttggagctccccccaaacatgggaagcccaagaagcagaaactggaagggaaggcaggacatgggccgggccctggcccaggacggcccaaatccaaaaaccttcagcccaagatccaggaatatgaattcactgatgaccctatcgacgtgccacggatccccaaaaatgatgcccccaacaggttctgggcttcagtggagccctactgtgctgacatcaccagcgaggaggtccgcacacttgaggagttactgaagcccccagaagatgaggctgagcattacaagatcccacccctggggaagcactactcccagcgctgggcccaggaggacctgctggaggagcagaaggatggggcccgggcagcggctgtggctgacaagaagaaaggcctcatggggccactgaccgaactggacactaaagatgtggatgccctgctgaagaagtctgaggcccagcatgaacagccggaagatggatgcccctttggtgccctgacgcagcgcctcctgcaggccctggtggaggaaaatattatttcccctatggaggattctcctattcctgacatgtctgggaaagaatcaggggctgacggggcaagcacctcccctcgcaatcagaacaagcccttcagtgtgccgcatactaagtccctggagagccgcatcaaggaggagctaattgcccagggccttttggagtctgaggaccgccccgcagaggactccgaggatgaggtccttgctgagcttcgcaaacggcaggctgagctgaaggcacttagtgcccacaaccgcaccaagaagcacgacctgctgaggtgagcgttagcaggatgcacagtcccgggggtggccttggaggctgtggccacggctagtcacctttcaggggttttacaacaggctttccaatcctggctggcctctaaatcacctggagagcctcgaaaaaaacagcagtggccagtccaccgggtatgtcccaaacaaattctgattccacagagtggggctcaggcatctgtgactgaccgattgatttgatttgtttttgttttgtttttttttgagagggagtctcgcactgtcacccaggctggagtgcagtggcatgatctcggctcactgcaagctccgcctcccaggttcatgccattctcctgcctcagcctcctgagtagctgatactacaggcacccaccaccacgcccagctaatttttttgtatttttagtagagacggggtttcaccgtgttagccaggatggtctcgatctcctgacctcgtgatccacccgcctcggcctcccaaagtgccgggattacaggcgtgagccactgcgcctggcctagtttggttttttaattatggtaaaggcataatataaaatgtatctccatgggaggctgaggcaggagaatcagttgaacctgggaggcggaggttgcagtgagctgagactgcaccattgcattccagcctgggcaacaagagtgaaactgcatctcaaaaaaaaaaagaaaaaaaatttacgcttcttaaccatttttaagtgtacagtttagtagtgttacccatattcacattgttgtgtgatttattttttgtcttttcatgcttcttttctttttatccccaaagttttgttattaaaaatttgatacacacagaaaatctgaaagaatcatacaataaacatcagtatattctccaccta

SEQ ID NO: 192390 - DNA, 1617 bp, Homo sapiens
  Payload ID: 17995
  Gene Name: transcriptional adaptor 3
  Uniprot ID: O75528
  ENST ID: ENST00000440161
  CDS Start-End: 218-1516
accatctatgctccgagcggggtagagagcccttacgaacgcttgggccttccggaagttttccacctagggctgtctcggtatttttaaattcttgcactcgagtcactatttaagctcctccaggaatgggtgcagcttccctttgtgccttcggccttcttgtcacctttgccacagcctcccccagctccacaggatccccatatcctgggccatgagtgagttgaaagactgccccttgcagttccacgacttcaagtctgtggatcacctgaaggtctgtccccgctacacggcagtgctggcacgctctgaggatgatggcatcggcatcgaggagctggacaccctgcagctggagctggagaccctgctgtcttctgccagccggcgcctgcgtgtgcttgaggccgaaacccagatcctcaccgactggcaggataagaaaggtgacagacgattcctgaagctgggtcgagaccatgaacttggagctccccccaaacatgggaagcccaagaagcagaaactggaagggaaggcaggacatgggccgggccctggcccaggacggcccaaatccaaaaaccttcagcccaagatccaggaatatgaattcactgatgaccctatcgacgtgccacggatccccaaaaatgatgcccccaacaggttctgggcttcagtggagccctactgtgctgacatcaccagcgaggaggtccgcacacttgaggagttactgaagcccccagaagatgaggctgagcattacaagatcccacccctggggaagcactactcccagcgctgggcccaggaggacctgctggaggagcagaaggatggggcccgggcagcggctgtggctgacaagaagaaaggcctcatggggccactgaccgaactggacactaaagatgtggatgccctgctgaagaagtctgaggcccagcatgaacagccggaagatggatgcccctttggtgccctgacgcagcgcctcctgcaggccctggtggaggaaaatattatttcccctatggaggattctcctattcctgacatgtctgggaaagaatcaggggctgacggggcaagcacctcccctcgcaatcagaacaagcccttcagtgtgccgcatactaagtccctggagagccgcatcaaggaggagctaattgcccagggccttttggagtctgaggaccgccccgcagaggactccgaggatgaggtccttgctgagcttcgcaaacggcaggctgagctgaaggcacttagtgcccacaaccgcaccaagaagcacgacctgctgaggctggcaaaggaggaggtgagccggcaggagctgaggcagcgggtgcgcatggctgacaacgaggtcatggacgcctttcgcaagatcatggctgcccggcagaagaagcggactcccaccaagaaagaaaaggaccaggcctggaagactctgaaggagcgtgagagcatcctgaagctgctggatgggtagccctcacccctgcctcaggctgattatctggcctaggggaggggaagggaggcccacttccttctttgggcacaggaaacattggcctgtggctgtccctc

SEQ ID NO: 192391 - DNA, 873 bp, Homo sapiens
  Payload ID: 17995
  Gene Name: transcriptional adaptor 3
  ENST ID: ENST00000439043
  CDS Start-End: 588-873
aattaggacaagccgaagcggacgagcccttcgtttcttccggttctgtacccccatcctttctctcgcccctcctacccgcagctcctggcgctcggcggggctaactgcagcgcggagatctcggccgccaagctccgcctcccgccccgggctgtgccccggggctcgcctgaggccgaccacccgcaccccacctctagcggctttgctcgaggcccaccttcttcccacccccggcaaactccagtaggctcgccctcgctgactccccgcccccgcgtcaactgcaaggggcccgcccatagccagttccggggcggttgctcacatcgaccggaactccccgccccctcccgcggcccctggggccgtaggaggccgcagcgaggaggtagagggggcgggggtcgcactagggtgtccctagagaacgaggactctgaaggcgggacatttgggcgacccccgggcggggccagccattaaacagtcccacttctgtgccagacactgaactgggctcttgacgggcatcatctcttaatcctcagaacatcccagggaggatccccatatcctgggccatgagtgagttgaaagactgccccttgcagttccacgacttcaagtctgtggatcacctgaaggtctgtccccgctacacggcagtgctggcacgctctgaggatgatggcatcggcatcgaggagctggacaccctgcagctggagctggagaccctgctgtcttctgccagccggcgcctgcgtgtgcttgaggccgaaacccagatcctcaccgactggcaggataagaaaggtgacagacgattcctgaagctgggtcgagaccatgaacttggagctcccc

SEQ ID NO: 192392 - DNA, 4174 bp, Homo sapiens
  Payload ID: 17996
  Gene Name: transcriptional regulating factor 1
  Uniprot ID: Q96PN7
  ENST ID: ENST00000340840
  CDS Start-End: 589-3978
ctctgctcgccccccatctcaccccccaagcggatactggtcttctcgtcggattgcccatgcacttgttgcagaaacagccaaggccctggctgtggagaatgctgaaggaagaagacgcagaagcaggacgaccctgaaagattcagcctcttcatcctcaaacaggtcgcttctcgggagttcttggtgttggaatattttacagcaaagcagtcgaccaggcctcctcttcccacctgtccagcagcatgaaagcagcatgattggccgaccgcaggagaagcccccagaaccaggcccccaactcagccatctgcggaggtcaaggtgtgagcgacgtctcctcaccacagtgctgtgtggtctatacctcagccagggagaggatgtgaaaccccccgccctgcacatgagtggtacaggccaacaggaacacctggctccagccacgttcacagacatgtcagccgtggagtagtgctgacacttttctctcagcttctcagggtttcagtccttttgggtttgttttatttaccttttttatggttttgtggctggacgttcacaaccaaggcagacagcatgggtgaccagcaactgtacaagaccaaccatgtggcccatggtagtgagaaccttttctaccaacagccaccacttggcgtccacagcgggctgaaccacaactatgggaatgcagttacagggggcggaatggatgcccctcaggcctcgccaatctccccccacttccctcaagatacacgggatggtctgggcttgcctgttggctccaaaaaccttggccaaatggatacctcgaggcagggagggtggggaagtcatgcagggcctggaaaccatgtccagctacgtggaaacctggccaactcaaacatgatgtggggggcaccagcccaggctgagcccactgatggctaccaatacacctactcccaggccagcgagatccggacccagaagcttaccagcggtgtcttacacaagctggactctttcacccaggtgtttgccaaccaaaacctgcgaattcaggtcaacaatatggcccaggtgctgcacactcagtcagcagtgatggatggagcccctgacagtgctctccgccagctgctgtctcagaagcccatggagcccccagcaccggctatcccttcccgctaccagcaggtgccccagcagcctcaccctggtttcactggtgggctgtccaaaccagctcttcaggtcgggcagcaccctacccaagggcacctgtattatgactaccagcagcctctggctcaggtgccagtgcagggaggacagccactgcaggccccacagatgctgtcacagcacatgcaacagatgcagcagcaccagtattacccaccgcagcaacagcagcaagccgggcaacagcgtatctccatgcaagaaatacagacgcagccgcaacaaattcgcccatcacagccacagccgccgccacagcagcagcagccgcagcagctacagctgcagcagcggcagggttcaatgcagatacctcagtattatcagccccaacccatgatgcagcacttgcaagagcagcagcagcaacagatgcacctgcagcctccttcttatcacagggaccctcaccagtataccccagagcaggcacacactgtccagctgattcccctgggctccatgtcccagtactactaccaggagccccagcagccctacagccaccccctctaccagcagagccacctgtcccagcaccagcagcgtgaggacagtcagctgaagacctactctagtgacagacaggcccaggccatgctgagctcccatggggacctggggcctcctgacacaggaatgggagacccagcgagctcagatctgacccgggtcagcagcaccctcccccatcgccccctcctatcccccagtgggatccacctcaacaacatggggcctcagcatcagcagctgtctcccagtgccatgtggccccagatgcacctacctgatgggagagcccagccagggtcccctgagtcaagtggccaacccaaaggagcgtttggggagcagtttgatgccaagaacaagctgacatgctccatctgcctgaaggagttcaagaacctgcctgccctgaatggccacatgcggtcccacgggggaatgagggcctcccccaacctcaaacaggaaatccccaggaagcatcagccgagtgtgcccaaagccgaggagcccctcaagaccgtgcaggagaagaaaaagttccggcaccggccggaacctctcttcatcccgccgccgccctcctacaacccgaaccccgctgcctcctactcgggcgccaccctgtaccagagccagctgcgctccccgcgcgtcctcggggaccacctgctcctggaccccacccacgagctgcccccttacacgcccccacccatgctgagcccggtgcgccagggctcggggctcttcagcaatgtcctcatctccggccacggccctggcgcccacccgcagctgcccctgacgcccctgacgcccacaccacgggtgctgctgtgtcgctccaacagcatcgatggcagcaacgtgacggtcaccccagggcctggagagcagactgtagatgttgaaccacgcatcaacattggcttgagattccaagcagaaatccctgaactccaagatatctctgccctggcccaggacacacacaaggccacactggtatggaagccctggccagaactagaaaaccatgacctccagcaaagagtggagaatcttctgaatttgtgctgttccagtgcattgccaggtggagggaccaattctgaatttgctttgcactctctgtttgaggccaaaggtgatgtgatggttgctctggaaatgctgctactgcggaagcctgtcaggttaaaatgtcatcctttagcaaattaccactatgccggttcggacaagtggacctccctagaaagaaaactgtttaacaaagcactagccacttacagcaaagactttatttttgtacagaagatggtgaagtccaagacggtggctcagtgcgtggagtactactacacgtggaaaaagatcatgcggctggggcggaaacaccggacacgcctggcagaaatcatcgacgattgtgtgacaagtgaagaagaagaagagttagaggaggaggaggaggaggacccggaagaagataggaaatccacaaaagaagaagagagtgaggtgccgaagtccccggagccaccacccgtccccgtcctggctcccacggaggggccgcccctgcaggccctgggccagccctcaggctccttcatctgtgaaatgcccaactgtggggctgactgtagatgtcatgtcactccctttcttccccaggtgttcagctcccgacaggcactgaatggccatgcccgcatccacgggggcaccaaccaggtgaccaaggcccgaggtgccatcccctctgggaagcagaagcctggtggcacccagagtgggtactgttcggtaaagagctcaccctctcacagcaccaccagcggcgagacagaccccaccaccatcttcccctgcaaggagtgtggcaaagtcttcttcaagatcaaaagccgaaatgcacacatgaaaactcacaggcagcaggaggaacaacagaggcaaaaggctcagaaggcggcttttgcagctgagatggcagccacgattgagaggactacggggcccgtgggggcgccggggctgctgcccctggaccagctgagtctgatcaaacccatcaaggatgtggacatcctcgacgacgacgtcgtccagcagttgggaggtgtcatggaagaggctgaagttgtggacaccgatcttctcttggatgatcaagattcagtcttgcttcagggtgacgcagaactataaagccctgtgtgtcacttagagacagtgaaaacccacggcctccatcttcattaatcaggaaacctggactgcctgcttgttttgtaacccttttaaactacctgttttaaaagtggtcattttattcaggtttagaaaaaaaaatcctatttcttttccttttatttaaaaaaatttgtttttgtggggggttggg

SEQ ID NO: 192393 - DNA, 4138 bp, Homo sapiens
  Payload ID: 17996
  Gene Name: transcriptional regulating factor 1
  Uniprot ID: Q96PN7
  ENST ID: ENST00000354325
  CDS Start-End: 589-3942
ctctgctcgccccccatctcaccccccaagcggatactggtcttctcgtcggattgcccatgcacttgttgcagaaacagccaaggccctggctgtggagaatgctgaaggaagaagacgcagaagcaggacgaccctgaaagattcagcctcttcatcctcaaacaggtcgcttctcgggagttcttggtgttggaatattttacagcaaagcagtcgaccaggcctcctcttcccacctgtccagcagcatgaaagcagcatgattggccgaccgcaggagaagcccccagaaccaggcccccaactcagccatctgcggaggtcaaggtgtgagcgacgtctcctcaccacagtgctgtgtggtctatacctcagccagggagaggatgtgaaaccccccgccctgcacatgagtggtacaggccaacaggaacacctggctccagccacgttcacagacatgtcagccgtggagtagtgctgacacttttctctcagcttctcagggtttcagtccttttgggtttgttttatttaccttttttatggttttgtggctggacgttcacaaccaaggcagacagcatgggtgaccagcaactgtacaagaccaaccatgtggcccatggtagtgagaaccttttctaccaacagccaccacttggcgtccacagcgggctgaaccacaactatgggaatgcagttacagggggcggaatggatgcccctcaggcctcgccaatctccccccacttccctcaagatacacgggatggtctgggcttgcctgttggctccaaaaaccttggccaaatggatacctcgaggcagggagggtggggaagtcatgcagggcctggaaaccatgtccagctacgtggaaacctggccaactcaaacatgatgtggggggcaccagcccaggctgagcccactgatggctaccaatacacctactcccaggccagcgagatccggacccagaagcttaccagcggtgtcttacacaagctggactctttcacccaggtgtttgccaaccaaaacctgcgaattcaggtcaacaatatggcccaggtgctgcacactcagtcagcagtgatggatggagcccctgacagtgctctccgccagctgctgtctcagaagcccatggagcccccagcaccggctatcccttcccgctaccagcaggtgccccagcagcctcaccctggtttcactggtgggctgtccaaaccagctcttcaggtcgggcagcaccctacccaagggcacctgtattatgactaccagcagcctctggctcaggtgccagtgcagggaggacagccactgcaggccccacagatgctgtcacagcacatgcaacagatgcagcagcaccagtattacccaccgcagcaacagcagcaagccgggcaacagcgtatctccatgcaagaaatacagacgcagccgcaacaaattcgcccatcacagccacagccgccgccacagcagcagcagccgcagcagctacagctgcagcagcggcagggttcaatgcagatacctcagtattatcagccccaacccatgatgcagcacttgcaagagcagcagcagcaacagatgcacctgcagcctccttcttatcacagggaccctcaccagtataccccagagcaggcacacactgtccagctgattcccctgggctccatgtcccagtactactaccaggagccccagcagccctacagccaccccctctaccagcagagccacctgtcccagcaccagcagcgtgaggacagtcagctgaagacctactctagtgacagacaggcccaggccatgctgagctcccatggggacctggggcctcctgacacaggaatgggagacccagcgagctcagatctgacccgggtcagcagcaccctcccccatcgccccctcctatcccccagtgggatccacctcaacaacatggggcctcagcatcagcagctgtctcccagtgccatgtggccccagatgcacctacctgatgggagagcccagccagggtcccctgagtcaagtggccaacccaaaggagcgtttggggagcagtttgatgccaagaacaagctgacatgctccatctgcctgaaggagttcaagaacctgcctgccctgaatggccacatgcggtcccacgggggaatgagggcctcccccaacctcaaacaggaaatccccaggaagcatcagccgagtgtgcccaaagccgaggagcccctcaagaccgtgcaggagaagaaaaagttccggcaccggccggaacctctcttcatcccgccgccgccctcctacaacccgaaccccgctgcctcctactcgggcgccaccctgtaccagagccagctgcgctccccgcgcgtcctcggggaccacctgctcctggaccccacccacgagctgcccccttacacgcccccacccatgctgagcccggtgcgccagggctcggggctcttcagcaatgtcctcatctccggccacggccctggcgcccacccgcagctgcccctgacgcccctgacgcccacaccacgggtgctgctgtgtcgctccaacagcatcgatggcagcaacgtgacggtcaccccagggcctggagagcagactgtagatgttgaaccacgcatcaacattggcttgagattccaagcagaaatccctgaactccaagatatctctgccctggcccaggacacacacaaggccacactggtatggaagccctggccagaactagaaaaccatgacctccagcaaagagtggagaatcttctgaatttgtgctgttccagtgcattgccaggtggagggaccaattctgaatttgctttgcactctctgtttgaggccaaaggtgatgtgatggttgctctggaaatgctgctactgcggaagcctgtcaggttaaaatgtcatcctttagcaaattaccactatgccggttcggacaagtggacctccctagaaagaaaactgtttaacaaagcactagccacttacagcaaagactttatttttgtacagaagatggtgaagtccaagacggtggctcagtgcgtggagtactactacacgtggaaaaagatcatgcggctggggcggaaacaccggacacgcctggcagaaatcatcgacgattgtgtgacaagtgaagaagaagaagagttagaggaggaggaggaggaggacccggaagaagataggaaatccacaaaagaagaagagagtgaggtgccgaagtccccggagccaccacccgtccccgtcctggctcccacggaggggccgcccctgcaggccctgggccagccctcaggctccttcatctgtgaaatgcccaactgtggggctgtgttcagctcccgacaggcactgaatggccatgcccgcatccacgggggcaccaaccaggtgaccaaggcccgaggtgccatcccctctgggaagcagaagcctggtggcacccagagtgggtactgttcggtaaagagctcaccctctcacagcaccaccagcggcgagacagaccccaccaccatcttcccctgcaaggagtgtggcaaagtcttcttcaagatcaaaagccgaaatgcacacatgaaaactcacaggcagcaggaggaacaacagaggcaaaaggctcagaaggcggcttttgcagctgagatggcagccacgattgagaggactacggggcccgtgggggcgccggggctgctgcccctggaccagctgagtctgatcaaacccatcaaggatgtggacatcctcgacgacgacgtcgtccagcagttgggaggtgtcatggaagaggctgaagttgtggacaccgatcttctcttggatgatcaagattcagtcttgcttcagggtgacgcagaactataaagccctgtgtgtcacttagagacagtgaaaacccacggcctccatcttcattaatcaggaaacctggactgcctgcttgttttgtaacccttttaaactacctgttttaaaagtggtcattttattcaggtttagaaaaaaaaatcctatttcttttccttttatttaaaaaaatttgtttttgtggggggttggg

SEQ ID NO: 192394 - DNA, 3914 bp, Homo sapiens
  Payload ID: 17996
  Gene Name: transcriptional regulating factor 1
  Uniprot ID: Q96PN7
  ENST ID: ENST00000372917
  CDS Start-End: 825-3695
ctctgctcgccccccatctcaccccccaagcggatactggtcttctcgtcggattgcccatgcacttgttgcagaaacagccaaggccctggctgtggagaatgctgaaggaagaagacgcagaagcaggacgaccctgaaagattcagcctcttcatcctcaaacaggtcgcttctcgggagttcttggtgttggaatattttacagcaaagcagtcgaccaggcctcctcttcccacctgtccagcagcatgaaagcagcatgattggccgaccgcaggagaagcccccagaaccaggcccccaactcagccatctgcggaggtcaaggtgtgagcgacgtctcctcaccacagtgctgtgtggtctatacctcagccagggagaggatgtgaaaccccccgccctgcacatgagtggtacaggccaacaggaacacctggctccagccacgttcacagacatgtcagccgtggagtagtgctgacacttttctctcagcttctcagggtttcagtccttttgggtttgttttatttaccttttttatggttttgtggctggacgttcacaaccaaggcagacagcatgggtgaccagcaactgtacaagaccaaccatgtggcccatggtagtgagaaccttttctaccaacagccaccacttggcgtccacagcgggctgagcccactgatggctaccaatacacctactcccaggccagcgagatccggacccagaagcttaccagcggtgtcttacacaagctggactctttcacccaggtgtttgccaaccaaaacctgcgaattcaggtcaacaatatggcccaggtgctgcacactcagtcagcagtgatggatggagcccctgacagtgctctccgccagctgctgtctcagaagcccatggagcccccagcaccggctatcccttcccgctaccagcaggtgccccagcagcctcaccctggtttcactggtgggctgtccaaaccagctcttcaggtcgggcagcaccctacccaagggcacctgtattatgactaccagcagcctctggctcaggtgccagtgcagggaggacagccactgcaggccccacagatgctgtcacagcacatgcaacagatgcagcagcaccagtattacccaccgcagcaacagcagcaagccgggcaacagcgtatctccatgcaagaaatacagacgcagccgcaacaaattcgcccatcacagccacagccgccgccacagcagcagcagccgcagcagctacagctgcagcagcggcagggttcaatgcagatacctcagtattatcagccccaacccatgatgcagcacttgcaagagcagcagcagcaacagatgcacctgcagcctccttcttatcacagggaccctcaccagtataccccagagcaggcacacactgtccagctgattcccctgggctccatgtcccagtactactaccaggagccccagcagccctacagccaccccctctaccagcagagccacctgtcccagcaccagcagcgtgaggacagtcagctgaagacctactctagtgacagacaggcccaggccatgctgagctcccatggggacctggggcctcctgacacaggaatgggagacccagcgagctcagatctgacccgggtcagcagcaccctcccccatcgccccctcctatcccccagtgggatccacctcaacaacatggggcctcagcatcagcagctgtctcccagtgccatgtggccccagatgcacctacctgatgggagagcccagccagggtcccctgagtcaagtggccaacccaaaggagcgtttggggagcagtttgatgccaagaacaagctgacatgctccatctgcctgaaggagttcaagaacctgcctgccctgaatggccacatgcggtcccacgggggaatgagggcctcccccaacctcaaacaggaaatccccaggaagcatcagccgagtgtgcccaaagccgaggagcccctcaagaccgtgcaggagaagaaaaagttccggcaccggccggaacctctcttcatcccgccgccgccctcctacaacccgaaccccgctgcctcctactcgggcgccaccctgtaccagagccagctgcgctccccgcgcgtcctcggggaccacctgctcctggaccccacccacgagctgcccccttacacgcccccacccatgctgagcccggtgcgccagggctcggggctcttcagcaatgtcctcatctccggccacggccctggcgcccacccgcagctgcccctgacgcccctgacgcccacaccacgggtgctgctgtgtcgctccaacagcatcgatggcagcaacgtgacggtcaccccagggcctggagagcagactgtagatgttgaaccacgcatcaacattggcttgagattccaagcagaaatccctgaactccaagatatctctgccctggcccaggacacacacaaggccacactggtatggaagccctggccagaactagaaaaccatgacctccagcaaagagtggagaatcttctgaatttgtgctgttccagtgcattgccaggtggagggaccaattctgaatttgctttgcactctctgtttgaggccaaaggtgatgtgatggttgctctggaaatgctgctactgcggaagcctgtcaggttaaaatgtcatcctttagcaaattaccactatgccggttcggacaagtggacctccctagaaagaaaactgtttaacaaagcactagccacttacagcaaagactttatttttgtacagaagatggtgaagtccaagacggtggctcagtgcgtggagtactactacacgtggaaaaagatcatgcggctggggcggaaacaccggacacgcctggcagaaatcatcgacgattgtgtgacaagtgaagaagaagaagagttagaggaggaggaggaggaggacccggaagaagataggaaatccacaaaagaagaagagagtgaggtgccgaagtccccggagccaccacccgtccccgtcctggctcccacggaggggccgcccctgcaggccctgggccagccctcaggctccttcatctgtgaaatgcccaactgtggggctgtgttcagctcccgacaggcactgaatggccatgcccgcatccacgggggcaccaaccaggtgaccaaggcccgaggtgccatcccctctgggaagcagaagcctggtggcacccagagtgggtactgttcggtaaagagctcaccctctcacagcaccaccagcggcgagacagaccccaccaccatcttcccctgcaaggagtgtggcaaagtcttcttcaagatcaaaagccgaaatgcacacatgaaaactcacaggcagcaggaggaacaacagaggcaaaaggctcagaaggcggcttttgcagctgagatggcagccacgattgagaggactacggggcccgtgggggcgccggggctgctgcccctggaccagctgagtctgatcaaacccatcaaggatgtggacatcctcgacgacgacgtcgtccagcagttgggaggtgtcatggaagaggctgaagttgtggacaccgatcttctcttggatgatcaagattcagtcttgcttcagggtgacgcagaactataaagccctgtgtgtcacttagagacagtgaaaacccacggcctccatcttcattaatcaggaaacctggactgcctgcttgttttgtaacccttttaaactacctgttttaaaagtggtcattttattcaggtttagaaaaaaaaatcctatttcttttccttttatttaaaaaaatttgtttttgtggggggttgggggaataaataattggcacaacta

SEQ ID NO: 192395 - DNA, 7286 bp, Homo sapiens
  Payload ID: 17996
  Gene Name: transcriptional regulating factor 1
  Uniprot ID: Q96PN7
  ENST ID: ENST00000372922
  CDS Start-End: 564-4166
ggcgaggatggggagcaatgcaaagctctgctcgccccccatctcaccccccaagcggatactggtcttctcgtcggattgcccatgcacttgttgcagaaacagccaaggccctggctgtggagaatgctgaaggaagaagacgcagaagcaggacgaccctgaaagattcagcctcttcatcctcaaacaggaccaggcctcctcttcccacctgtccagcagcatgaaagcagcatgattggccgaccgcaggagaagcccccagaaccaggcccccaactcagccatctgcggaggtcaaggtgtgagcgacgtctcctcaccacagtgctgtgtggtctatacctcagccagggagaggatgtgaaaccccccgccctgcacatgagtggtacaggccaacaggaacacctggctccagccacgttcacagacatgtcagccgtggagtagtgctgacacttttctctcagcttctcagggtttcagtccttttgggtttgttttatttaccttttttatggttttgtggctggacgttcacaaccaaggcagacagcatgggtgaccagcaactgtacaagaccaaccatgtggcccatggtagtgagaaccttttctaccaacagccaccacttggcgtccacagcgggctgaaccacaactatgggaatgcagttacagggggcggaatggatgcccctcaggcctcgccaatctccccccacttccctcaagatacacgggatggtctgggcttgcctgttggctccaaaaaccttggccaaatggatacctcgaggcagggagggtggggaagtcatgcagggcctggaaaccatgtccagctacgtggaaacctggccaactcaaacatgatgtggggggcaccagcccaggctgagcccactgatggctaccaatacacctactcccaggccagcgagatccggacccagaagcttaccagcggtgtcttacacaagctggactctttcacccaggtgtttgccaaccaaaacctgcgaattcaggtcaacaatatggcccaggtgctgcacactcagtcagcagtgatggatggagcccctgacagtgctctccgccagctgctgtctcagaagcccatggagcccccagcaccggctatcccttcccgctaccagcaggtgccccagcagcctcaccctggtttcactggtgggctgtccaaaccagctcttcaggtcgggcagcaccctacccaagggcacctgtattatgactaccagcagcctctggctcaggtgccagtgcagggaggacagccactgcaggccccacagatgctgtcacagcacatgcaacagatgcagcagcaccagtattacccaccgcagcaacagcagcaagccgggcaacagcgtatctccatgcaagaaatacagacgcagccgcaacaaattcgcccatcacagccacagccgccgccacagcagcagcagccgcagcagctacagctgcagcagcggcagggttcaatgcagatacctcagtattatcagccccaacccatgatgcagcacttgcaagagcagcagcagcaacagatgcacctgcagcctccttcttatcacagggaccctcaccagtataccccagagcaggcacacactgtccagctgattcccctgggctccatgtcccagtactactaccaggagccccagcagccctacagccaccccctctaccagcagagccacctgtcccagcaccagcagcgtgaggacagtcagctgaagacctactctagtgacagacaggcccaggccatgctgagctcccatggggacctggggcctcctgacacaggaatgggagacccagcgagctcagatctgacccgggtcagcagcaccctcccccatcgccccctcctatcccccagtgggatccacctcaacaacatggggcctcagcatcagcagctgtctcccagtgccatgtggccccagatgcacctacctgatgggagagcccagccagggtcccctgagtcaagtggccaacccaaaggagcgtttggggagcagtttgatgccaagaacaagctgacatgctccatctgcctgaaggagttcaagaacctgcctgccctgaatggccacatgcggtcccacgggggaatgagggcctcccccaacctcaaacaggaggaaggagagaaggtcctgccgcctcagccccagccaccactgccgcctccgcctccgcctccgccgccaccacagctccctcccgaggcagaaagcctcacgcctatggtcatgcccgtgtctgtccctgtcaagcttctcccgcccaagcccagctctcaggggttcaccaacagcaccgttgccgccccctccgccagagacaagccagccagctcgatgtcggacgacgagatgcctgtgctcgaaatccccaggaagcatcagccgagtgtgcccaaagccgaggagcccctcaagaccgtgcaggagaagaaaaagttccggcaccggccggaacctctcttcatcccgccgccgccctcctacaacccgaaccccgctgcctcctactcgggcgccaccctgtaccagagccagctgcgctccccgcgcgtcctcggggaccacctgctcctggaccccacccacgagctgcccccttacacgcccccacccatgctgagcccggtgcgccagggctcggggctcttcagcaatgtcctcatctccggccacggccctggcgcccacccgcagctgcccctgacgcccctgacgcccacaccacgggtgctgctgtgtcgctccaacagcatcgatggcagcaacgtgacggtcaccccagggcctggagagcagactgtagatgttgaaccacgcatcaacattggcttgagattccaagcagaaatccctgaactccaagatatctctgccctggcccaggacacacacaaggccacactggtatggaagccctggccagaactagaaaaccatgacctccagcaaagagtggagaatcttctgaatttgtgctgttccagtgcattgccaggtggagggaccaattctgaatttgctttgcactctctgtttgaggccaaaggtgatgtgatggttgctctggaaatgctgctactgcggaagcctgtcaggttaaaatgtcatcctttagcaaattaccactatgccggttcggacaagtggacctccctagaaagaaaactgtttaacaaagcactagccacttacagcaaagactttatttttgtacagaagatggtgaagtccaagacggtggctcagtgcgtggagtactactacacgtggaaaaagatcatgcggctggggcggaaacaccggacacgcctggcagaaatcatcgacgattgtgtgacaagtgaagaagaagaagagttagaggaggaggaggaggaggacccggaagaagataggaaatccacaaaagaagaagagagtgaggtgccgaagtccccggagccaccacccgtccccgtcctggctcccacggaggggccgcccctgcaggccctgggccagccctcaggctccttcatctgtgaaatgcccaactgtggggctgtgttcagctcccgacaggcactgaatggccatgcccgcatccacgggggcaccaaccaggtgaccaaggcccgaggtgccatcccctctgggaagcagaagcctggtggcacccagagtgggtactgttcggtaaagagctcaccctctcacagcaccaccagcggcgagacagaccccaccaccatcttcccctgcaaggagtgtggcaaagtcttcttcaagatcaaaagccgaaatgcacacatgaaaactcacaggcagcaggaggaacaacagaggcaaaaggctcagaaggcggcttttgcagctgagatggcagccacgattgagaggactacggggcccgtgggggcgccggggctgctgcccctggaccagctgagtctgatcaaacccatcaaggatgtggacatcctcgacgacgacgtcgtccagcagttgggaggtgtcatggaagaggctgaagttgtggacaccgatcttctcttggatgatcaagattcagtcttgcttcagggtgacgcagaactataaagccctgtgtgtcacttagagacagtgaaaacccacggcctccatcttcattaatcaggaaacctggactgcctgcttgttttgtaacccttttaaactacctgttttaaaagtggtcattttattcaggtttagaaaaaaaaatcctatttcttttccttttatttaaaaaaatttgtttttgtggggggttgggggaataaataattggcacaactatctttaagaggtgtttcatctgggctaccttctcatgaaatcattcccagtagggactgaagctgaccttcatgttccattgcattcagatgtcaaccatcccggttgccttttatcccaaagcttgctgtgagtgtgtgtgtgtgagacgcaggcgaccctcttagtactggggtcttggggccaacttttcccatcaagcgttactttgattctgttctgacctcattccatagtttgcagtgagcatggcatctttgcctggagatactatgctaggggcagctttccaggggcaaagcaagccctcgtgttacacggctctcctccagctcacacgacatgtgaggagatgaccaaatgtgaaaacaggtttcccctgtgttgcccgtcatcctttggcccgttcacaggaatggagtactgtataattttaggctttcattcccagcagtgtttactgaggacctggttttctagaacaggtgtgtcctgtcctcttccatgttccctgggggctggtcagctccaagttgtgggtggcagagctgtgtttcagcatgaactgactagagacccatctggaggcaaatattaagttgccaggactgctttcacttcagggtgattgaaggacacatattgaagtacctagaatgccagaaagtgttctattgcccaaaaaacaaatcagaaaagcctattcttttttgcaacgctgttaatgattagtggagttctgaaattactttgtgccacttggaagtactgtgaaaccgcattcactgggattttgctgtaattcacatccgctggactgaagtttaccttgatgttagctataagaaatagttttctaacacatacgatagcaaatacaagacaaatagcattgaaggccaacaaaaatggcttcagatacaccttagctataatgtttgcattcaaacaatgaatgtattcatcacaagtcacttaccaaagcacttctagacttctccaacctccatgactttgctctgcttcctcctgtccctgtcagcagggttgctgtttgtacttgaaggtaataaacctgtaatccttcaaaaatgccatttagccccaggcttctgagctgagtcagactgacccatcccaccgttagggcaaaagtcaggctgggacacagcgccagtacagagaggatcctgcttcatgcaactccccttttggagttaatgcagcgtgatttcctgggccggtgttttcaggcatcgcccaccccaggtatgctggttcccagctccacgtaggtgtgcctatcacgctgggccactttgctgacaacattcatagcttgacatgagagagaatatcagcagaagcatgagagtaggacctgacgtctttgactctgcaaaagcatttagcacacactcatgggggggaactggctgtgagccacagcagccccacacagacagtggtctctgaacttcaggaaagccatggacagaaaaaaaaataaaattcttttccatcattctattttcaaagaggtcttggcgttttcctacatcttttgtttagagggggaaaaaagtttcatttgctgccatttcagaaaggttatgctatcctgttttatccaagcagttgtgagtcaggaactgcctgggcagtgtgcatcaactttgtggccgaaccattacagctgtcatatccttggctgatcgtctctcccagggactactgccctccacttagtgtctgagggtaagcctagaagggtgctgctattgggtctatggaagcttatctatcaaaggagcaaacatccagaaaagtgtttataaagcaaatgtattgcctctgtttagagatttgcccagctgttccagttttaaacattaaaaaataaactcagttgccatggcaaaaatagaatgcacagcttacttataattttccatgcagtatagcataaggatttttgacttgaaacaaccaaagaactcctccttaacgagacagttcaaattcctgaattagtatttcttgactatcaacttaaagaatggacttcctagtacaatgttgcacttatttttttttctgaaataattctgcctgcatgtatgtgttgtgttttagcttctccccttaccccaccccaaagatcttttcttcctaatggttaatgtctcaactcggttactgtttactatcagatggtttttcattagtgaatttagacctctttgagaaagcttgtatataaaaagttaacagatatattttatggaaaaacccatcttattttcaaatatatttaactgctgttatattttattagaggaaggttgtaaatattttctaggagttctattgtaaagaaaagtatttttgaaaaaaattaatgtaataaaaaggaaaacatttttaaatagtggttgtgattgcttcctgttctggcttcgttatgttctattctcagcagatgaattgcatgccttccatatcaggatgtaatttattcaggtttgcactattataagttgacatcataatatctagtgtgcttaactgtattttcccggaatgcaagtcccttggtccatattaaagcactatgtatagcatattcataatttttcttttgtaacgtgtgtatttttaataaggattttatgtaacattttggcaacaagaggaccgtattttctagtgaattttataataacattttgctaaaaatgtttcttcctaggtcagtttttgttaaggtgaaccaaaagtcttattttaccaggggtttaaaaaaagtttgaagcttgaaagcaaagttatatttaaacatcatatgtaacaaataaataaagatgttttatagacttgtcctaaaaaggtgcattcctt

SEQ ID NO: 192396 - DNA, 7646 bp, Homo sapiens
  Payload ID: 17996
  Gene Name: transcriptional regulating factor 1
  ENST ID: ENST00000541110
  CDS Start-End: 570-4232
ggagggggcgaggatggggagcaatgcaaagctctgctcgccccccatctcaccccccaagcggatactggtcttctcgtcggattgcccatgcacttgttgcagaaacagccaaggccctggctgtggagaatgctgaaggaagaagacgcagaagcaggacgaccctgaaagattcagcctcttcatcctcaaacaggaccaggcctcctcttcccacctgtccagcagcatgaaagcagcatgattggccgaccgcaggagaagcccccagaaccaggcccccaactcagccatctgcggaggtcaaggtgtgagcgacgtctcctcaccacagtgctgtgtggtctatacctcagccagggagaggatgtgaaaccccccgccctgcacatgagtggtacaggccaacaggaacacctggctccagccacgttcacagacatgtcagccgtggagtagtgctgacacttttctctcagcttctcagggtttcagtccttttgggtttgttttatttaccttttttatggttttgtggctggacgttcacaaccaaggcagacagcatgggtgaccagcaactgtacaagaccaaccatgtggcccatggtagtgagaaccttttctaccaacagccaccacttggcgtccacagcgggctgaaccacaactatgggaatgcagttacagggggcggaatggatgcccctcaggcctcgccaatctccccccacttccctcaagatacacgggatggtctgggcttgcctgttggctccaaaaaccttggccaaatggatacctcgaggcagggagggtggggaagtcatgcagggcctggaaaccatgtccagctacgtggaaacctggccaactcaaacatgatgtggggggcaccagcccaggctgagcccactgatggctaccaatacacctactcccaggccagcgagatccggacccagaagcttaccagcggtgtcttacacaagctggactctttcacccaggtgtttgccaaccaaaacctgcgaattcaggtcaacaatatggcccaggtgctgcacactcagtcagcagtgatggatggagcccctgacagtgctctccgccagctgctgtctcagaagcccatggagcccccagcaccggctatcccttcccgctaccagcaggtgccccagcagcctcaccctggtttcactggtgggctgtccaaaccagctcttcaggtcgggcagcaccctacccaagggcacctgtattatgactaccagcagcctctggctcaggtgccagtgcagggaggacagccactgcaggccccacagatgctgtcacagcacatgcaacagatgcagcagcaccagtattacccaccgcagcaacagcagcaagccgggcaacagcgtatctccatgcaagaaatacagacgcagccgcaacaaattcgcccatcacagccacagccgccgccacagcagcagcagccgcagcagctacagctgcagcagcggcagggttcaatgcagatacctcagtattatcagccccaacccatgatgcagcacttgcaagagcagcagcagcaacagatgcacctgcagcctccttcttatcacagggaccctcaccagtataccccagagcaggcacacactgtccagctgattcccctgggctccatgtcccagtactactaccaggagccccagcagccctacagccaccccctctaccagcagagccacctgtcccagcaccagcagcgtgaggacagtcagctgaagacctactctagtgacagacaggcccaggccatgctgagctcccatggggacctggggcctcctgacacaggaatgggagacccagcgagctcagatctgacccgggtcagcagcaccctcccccatcgccccctcctatcccccagtgggatccacctcaacaacatggggcctcagcatcagcagctgtctcccagtgccatgtggccccagatgcacctacctgatgggagagcccagccagggtcccctgagtcaagtggccaacccaaaggagcgtttggggagcagtttgatgccaagaacaagctgacatgctccatctgcctgaaggagttcaagaacctgcctgccctgaatggccacatgcggtcccacgggggaatgagggcctcccccaacctcaaacaggaggaaggagagaaggtcctgccgcctcagccccagccaccactgccgcctccgcctccgcctccgccgccaccacagctccctcccgaggcagaaagcctcacgcctatggtcatgcccgtgtctgtccctgtcaagcttctcccgcccaagcccagctctcaggggttcaccaacagcaccgttgccgccccctccgccagagacaagccagccagctcgatgtcggacgacgagatgcctgtgctcgtgaggatgaccctctctcccccacactcaccccaaggggctgccccccgcacgcctgctgaaatccccaggaagcatcagccgagtgtgcccaaagccgaggagcccctcaagaccgtgcaggagaagaaaaagttccggcaccggccggaacctctcttcatcccgccgccgccctcctacaacccgaaccccgctgcctcctactcgggcgccaccctgtaccagagccagctgcgctccccgcgcgtcctcggggaccacctgctcctggaccccacccacgagctgcccccttacacgcccccacccatgctgagcccggtgcgccagggctcggggctcttcagcaatgtcctcatctccggccacggccctggcgcccacccgcagctgcccctgacgcccctgacgcccacaccacgggtgctgctgtgtcgctccaacagcatcgatggcagcaacgtgacggtcaccccagggcctggagagcagactgtagatgttgaaccacgcatcaacattggcttgagattccaagcagaaatccctgaactccaagatatctctgccctggcccaggacacacacaaggccacactggtatggaagccctggccagaactagaaaaccatgacctccagcaaagagtggagaatcttctgaatttgtgctgttccagtgcattgccaggtggagggaccaattctgaatttgctttgcactctctgtttgaggccaaaggtgatgtgatggttgctctggaaatgctgctactgcggaagcctgtcaggttaaaatgtcatcctttagcaaattaccactatgccggttcggacaagtggacctccctagaaagaaaactgtttaacaaagcactagccacttacagcaaagactttatttttgtacagaagatggtgaagtccaagacggtggctcagtgcgtggagtactactacacgtggaaaaagatcatgcggctggggcggaaacaccggacacgcctggcagaaatcatcgacgattgtgtgacaagtgaagaagaagaagagttagaggaggaggaggaggaggacccggaagaagataggaaatccacaaaagaagaagagagtgaggtgccgaagtccccggagccaccacccgtccccgtcctggctcccacggaggggccgcccctgcaggccctgggccagccctcaggctccttcatctgtgaaatgcccaactgtggggctgtgttcagctcccgacaggcactgaatggccatgcccgcatccacgggggcaccaaccaggtgaccaaggcccgaggtgccatcccctctgggaagcagaagcctggtggcacccagagtgggtactgttcggtaaagagctcaccctctcacagcaccaccagcggcgagacagaccccaccaccatcttcccctgcaaggagtgtggcaaagtcttcttcaagatcaaaagccgaaatgcacacatgaaaactcacaggcagcaggaggaacaacagaggcaaaaggctcagaaggcggcttttgcagctgagatggcagccacgattgagaggactacggggcccgtgggggcgccggggctgctgcccctggaccagctgagtctgatcaaacccatcaaggatgtggacatcctcgacgacgacgtcgtccagcagttgggaggtgtcatggaagaggctgaagttgtggacaccgatcttctcttggatgatcaagattcagtcttgcttcagggtgacgcagaactataaagccctgtgtgtcacttagagacagtgaaaacccacggcctccatcttcattaatcaggaaacctggactgcctgcttgttttgtaacccttttaaactacctgttttaaaagtggtcattttattcaggtttagaaaaaaaaatcctatttcttttccttttatttaaaaaaatttgtttttgtggggggttgggggaataaataattggcacaactatctttaagaggtgtttcatctgggctaccttctcatgaaatcattcccagtagggactgaagctgaccttcatgttccattgcattcagatgtcaaccatcccggttgccttttatcccaaagcttgctgtgagtgtgtgtgtgtgagacgcaggcgaccctcttagtactggggtcttggggccaacttttcccatcaagcgttactttgattctgttctgacctcattccatagtttgcagtgagcatggcatctttgcctggagatactatgctaggggcagctttccaggggcaaagcaagccctcgtgttacacggctctcctccagctcacacgacatgtgaggagatgaccaaatgtgaaaacaggtttcccctgtgttgcccgtcatcctttggcccgttcacaggaatggagtactgtataattttaggctttcattcccagcagtgtttactgaggacctggttttctagaacaggtgtgtcctgtcctcttccatgttccctgggggctggtcagctccaagttgtgggtggcagagctgtgtttcagcatgaactgactagagacccatctggaggcaaatattaagttgccaggactgctttcacttcagggtgattgaaggacacatattgaagtacctagaatgccagaaagtgttctattgcccaaaaaacaaatcagaaaagcctattcttttttgcaacgctgttaatgattagtggagttctgaaattactttgtgccacttggaagtactgtgaaaccgcattcactgggattttgctgtaattcacatccgctggactgaagtttaccttgatgttagctataagaaatagttttctaacacatacgatagcaaatacaagacaaatagcattgaaggccaacaaaaatggcttcagatacaccttagctataatgtttgcattcaaacaatgaatgtattcatcacaagtcacttaccaaagcacttctagacttctccaacctccatgactttgctctgcttcctcctgtccctgtcagcagggttgctgtttgtacttgaaggtaataaacctgtaatccttcaaaaatgccatttagccccaggcttctgagctgagtcagactgacccatcccaccgttagggcaaaagtcaggctgggacacagcgccagtacagagaggatcctgcttcatgcaactccccttttggagttaatgcagcgtgatttcctgggccggtgttttcaggcatcgcccaccccaggtatgctggttcccagctccacgtaggtgtgcctatcacgctgggccactttgctgacaacattcatagcttgacatgagagagaatatcagcagaagcatgagagtaggacctgacgtctttgactctgcaaaagcatttagcacacactcatgggggggaactggctgtgagccacagcagccccacacagacagtggtctctgaacttcaggaaagccatggacagaaaaaaaaataaaattcttttccatcattctattttcaaagaggtcttggcgttttcctacatcttttgtttagagggggaaaaaagtttcatttgctgccatttcagaaaggttatgctatcctgttttatccaagcagttgtgagtcaggaactgcctgggcagtgtgcatcaactttgtggccgaaccattacagctgtcatatccttggctgatcgtctctcccagggactactgccctccacttagtgtctgagggtaagcctagaagggtgctgctattgggtctatggaagcttatctatcaaaggagcaaacatccagaaaagtgtttataaagcaaatgtattgcctctgtttagagatttgcccagctgttccagttttaaacattaaaaaataaactcagttgccatggcaaaaatagaatgcacagcttacttataattttccatgcagtatagcataaggatttttgacttgaaacaaccaaagaactcctccttaacgagacagttcaaattcctgaattagtatttcttgactatcaacttaaagaatggacttcctagtacaatgttgcacttatttttttttctgaaataattctgcctgcatgtatgtgttgtgttttagcttctccccttaccccaccccaaagatcttttcttcctaatggttaatgtctcaactcggttactgtttactatcagatggtttttcattagtgaatttagacctctttgagaaagcttgtatataaaaagttaacagatatattttatggaaaaacccatcttattttcaaatatatttaactgctgttatattttattagaggaaggttgtaaatattttctaggagttctattgtaaagaaaagtatttttgaaaaaaattaatgtaataaaaaggaaaacatttttaaatagtggttgtgattgcttcctgttctggcttcgttatgttctattctcagcagatgaattgcatgccttccatatcaggatgtaatttattcaggtttgcactattataagttgacatcataatatctagtgtgcttaactgtattttcccggaatgcaagtcccttggtccatattaaagcactatgtatagcatattcataatttttcttttgtaacgtgtgtatttttaataaggattttatgtaacattttggcaacaagaggaccgtattttctagtgaattttataataacattttgctaaaaatgtttcttcctaggtcagtttttgttaaggtgaaccaaaagtcttattttaccaggggtttaaaaaaagtttgaagcttgaaagcaaagttatatttaaacatcatatgtaacaaataaataaagatgttttatagacttgtcctaaaaaggtgcattccttaaaaaaaaaaaaaagaaaaaaaaaggaaactggggcattctaggttgtttcccctccaagtgataagctttttttttttcttaattatcacaatgcttcttcaaaaagggaaccagggaaattttatttaacacattctaatcattagcctctcagaaagttattacagttcctatagatgggcattcatcaaatggagatgtaaccaaacagacactgtcatatttatttgtgaaaacctgattcaatattgcatcagctgctctgaaaataaaatattaatcttttgcgttt

SEQ ID NO: 192397 - DNA, 1467 bp, Homo sapiens
  Payload ID: 17997
  Gene Name: transducer of ERBB2, 1
  Uniprot ID: P50616
  ENST ID: ENST00000268957
  CDS Start-End: 430-1467
agtgcggttccttctaaaaaggagaggcgggagagtcagggtggagaaggcggctccaaccagattttgcgtccacaaagccaaaagcttctaggcctggcatgtacggcgggtttgtgcccgaggagcacagctggtctacacgggcccgccccgtagacaccctactcctcgactttccccttttcccagtccgagtttgacgtcggtctcctggataccaggcagccaatcgcctcgttgcgaagggaccagcgcagccaatcaggcgtcgttgctacctgaacaagatcactcaaggtgaaggataatctactaataccagcactttgaatgaaaatttgtttctctgccacaaactgaacatcttttttttttttttttttttttggtgggggagttgaaacctaattttgtggcgtagcagctatgcagcttgaaatccaagtagcactaaattttattatttcgtatttgtacaataagcttcccaggagacgtgtcaacatttttggtgaagaacttgaaagacttcttaagaagaaatatgaagggcactggtatcctgaaaagccatacaaaggatcggggtttagatgtatacacataggggagaaagtggacccagtgattgaacaagcatccaaagagagtggtttggacattgatgatgttcgtggcaatctgccacaggatcttagtgtttggatcgacccatttgaggtttcttaccaaattggtgaaaagggaccagtgaaggtgctttacgtggatgataataatgaaaatggatgtgagttggataaggagatcaaaaacagctttaacccagaggcccaggtttttatgcccataagtgacccagcctcatcagtgtccagctctccatcgcctccttttggtcactctgctgctgtaagccctaccttcatgccccggtccactcagcctttaacctttaccactgccacttttgctgccaccaagttcggctctaccaaaatgaagaatagtggccgtagcaacaaggttgcacgtacttctcccatcaacctcggcttgaatgtgaatgacctcttgaagcagaaagccatctcttcctcaatgcactctctgtatgggcttggcttgggtagccagcagcagccacagcaacagcagcagccagcccagccgccaccgccaccaccaccaccacagcagcaacaacagcagaaaacctctgctctttctcctaatgccaaggaatttatttttcctaatatgcagggtcaaggtagtagtaccaatggaatgttcccaggtgacagcccccttaacctcagtcctctccagtacagtaatgcctttgatgtgtttgcagcctatggaggcctcaatgagaaatcttttgtagatggcttgaattttagcttaaataacatgcagtattctaaccagcaattccagcctgttatggctaactaa

SEQ ID NO: 192398 - DNA, 2229 bp, Homo sapiens
  Payload ID: 17997
  Gene Name: transducer of ERBB2, 1
  Uniprot ID: P50616
  ENST ID: ENST00000499247
  CDS Start-End: 435-1472
gaagctctggcccggcgtgtagcgggcgcactacggggacgctgggccgggcaccgggctgtgtggagaagtgagcgcgctcgtctgacccccgtgcccgccaccccgagccactaacggcgatctcccaaggcctgcccgaggcctctgtcctctgtcctcagccccgcagcggcaacgtcttgcactcggcgagctcgccgctcccgaccctcccgcgcccccgccctgccgcgctgctccccgcccagccgcgggtctgtggtccaagccgccccgaagcagcccgaacaagatcactcaaggtgaaggataatctactaataccagcactttgaatgaaaatttgtttctctgccacaaactgaacatcttttttttttttttttttttttggtgggggagttgaaacctaattttgtggcgtagcagctatgcagcttgaaatccaagtagcactaaattttattatttcgtatttgtacaataagcttcccaggagacgtgtcaacatttttggtgaagaacttgaaagacttcttaagaagaaatatgaagggcactggtatcctgaaaagccatacaaaggatcggggtttagatgtatacacataggggagaaagtggacccagtgattgaacaagcatccaaagagagtggtttggacattgatgatgttcgtggcaatctgccacaggatcttagtgtttggatcgacccatttgaggtttcttaccaaattggtgaaaagggaccagtgaaggtgctttacgtggatgataataatgaaaatggatgtgagttggataaggagatcaaaaacagctttaacccagaggcccaggtttttatgcccataagtgacccagcctcatcagtgtccagctctccatcgcctccttttggtcactctgctgctgtaagccctaccttcatgccccggtccactcagcctttaacctttaccactgccacttttgctgccaccaagttcggctctaccaaaatgaagaatagtggccgtagcaacaaggttgcacgtacttctcccatcaacctcggcttgaatgtgaatgacctcttgaagcagaaagccatctcttcctcaatgcactctctgtatgggcttggcttgggtagccagcagcagccacagcaacagcagcagccagcccagccgccaccgccaccaccaccaccacagcagcaacaacagcagaaaacctctgctctttctcctaatgccaaggaatttatttttcctaatatgcagggtcaaggtagtagtaccaatggaatgttcccaggtgacagcccccttaacctcagtcctctccagtacagtaatgcctttgatgtgtttgcagcctatggaggcctcaatgagaaatcttttgtagatggcttgaattttagcttaaataacatgcagtattctaaccagcaattccagcctgttatggctaactaaaaaaaagaaaatgtatcgtacaagttaaaatgcacgggcccaagggggattttttttttcacctccttgagaatttttttttttaagcttatagtaaggatacattcaagcttggttaaaaaaataataataaaacatgcatcatttttcatttgccaaccaagcacaaagttattttatactgactgtatattttaaagtatactctcagatatggcctcttacagtatttaagatatagcaaggacatggctgatttttttttataaaaattggcactaataagtgggtttattggtcttttctaattgtataatttaatttagtacaaagtttgtaaaatatcagaggatatatatatattgtttctacgacatggtattgcatttatatctttttactacagtgatctgtgacagcagcagcttcatgttgtattttttttactgaaattgtaaaatatccatcttaaagacatcaactattctaaaaattgtgtacaggatattcctttagtggtggaattaaaatgtacgaatacttgctttttcaaaaaaatgtattttctgttaaaagtttaaagatttttgctatatattatggaagaaaaatgtaatcgtaaatattaattttgtacctatattgtgcaatacttgaaaaaaacggtataaaagtattttgagtcagtgtcttacatgttaagagggactgaaatagtttatattaagtttgtattaaaattctttaaaattaaaaa

SEQ ID NO: 192399 - DNA, 4561 bp, Homo sapiens
  Payload ID: 17998
  Gene Name: transducer of ERBB2, 2
  Uniprot ID: Q14106
  ENST ID: ENST00000327492
  CDS Start-End: 708-1742
cagggaggggaagacggggagccggacgcacgaccggcgagcacagaagggcacaggagctgctccgcgagataccagcgagctgaggcgcggggctggctgggaagtagtcccggccgggccctggccccgcccctgcagggcggagggacgcatcacgcaggggtggggaagccggatccgtgcgcagggttgctaagggtgaaacttttcattgactttgctcacttcgggccggggcgcgggaaggtgcgggttgttggctgaggcaagccgtggctcgggcgacgcggggccaggagggcaggaccgtctgccggcgacagcccataccgtctgccgttgcgcgacacgaaccaccctccgatccgccatccccgcgtcgtcgccgctagtccgcccgcccgccctcgggccccccgctgccgagcccgacctcctaagagctgaaagaaattattgagagtcatagtccatagccccctgcttcgtcccccaaccctcaacgacgaaaaggacttcggtcccctggcccggcgacgcccgggaaggaaaggagagcgacctccgccccgcgctcaggccaccctggagggagaagccgccccgcggccggtagagcgccccgccgccgcggagacccgaagccgcctggagcccaaggctgtacacgtgccctgtgctgattctctgcctaggaaaggaccatgcagctagagatcaaagtggccctgaacttcatcatctcctacttgtacaacaagctgccccggcgccgggcagacctgtttggggaggagctagagcggcttttgaaaaagaaatatgaaggccactggtaccctgagaagccactgaaaggctctggcttccgctgtgttcacattggggagatggtggaccccgtggtggagctggccgccaagcggagtggcctggcggtggaagatgtgcgggccaatgtgcctgaggagctgagtgtctggattgatccctttgaggtgtcctaccagattggtgagaagggagctgtgaaagtgctgtacctggatgacagtgagggttgcggtgccccagagctggacaaggagatcaagagcagcttcaaccctgacgcccaggtgttcgtgcccattggcagccaggacagctccctgtccaactccccatcgccatcctttggccagtcacccagccctaccttcattccccgctccgctcagcccatcaccttcaccaccgcctccttcgctgccaccaaatttggctccactaagatgaagaaggggggcggggcagcaagtggtgggggtgtagccagcagtggggcgggtggccagcagccaccacagcagcctcgcatggcccgctcacccaccaacagcctgctgaagcacaagagcctctctctgtctatgcattcactgaacttcatcacggccaacccggcccctcagtcccagctctcacccaatgccaaggagttcgtgtacaacggtggtggctcacccagcctcttctttgatgcggccgatggccagggcagcggcaccccaggcccgtttggaggcagtggggctggcacctgcaacagcagcagctttgacatggcccaggtatttggaggtggtgccaacagcctcttcctggagaagacaccctttgtggaaggcctcagctacaacctgaacaccatgcagtatcccagccagcagttccagcccgtggtgctggccaactgaccatctacctgcccgtggggccaggagcacccaagaccacagaaaagagaaaggaaaggccaaaaaaaagaggaaaagaaaaatgtacaaaaagattttcgatcttctcactcttacttctagaaaaaagatccagcccaggcacggaatgggagggccctgcaaagcacccaagtgtgtttcactcaccccttaccgctcgcccaccggcctgtgatttatttggttggtttgggttttatatttctttttcttttttttttttcttacatgtagttttctatataacatctttaatgagtggcttcctgtgctaagaatggtccagatgtgaactgctgctccctgctcctcccttcctccttcacactcctagtttaggattgatgtgtccaagctcatagggaagaaagagctgcagctggagcctgaccctccctggaacagggagaggctggcccgtgtcactgcctctgtcacccagctatcctcgcactcaaagccatccaacctcagcaggccttctcgggccctgccacctgaataggtctgaccccagtccccactccctttcaggctgggccacagggagttgctggctggccacttgacaccctccccctggagctgatgtctgtgactacagggagattagcacttcgtctagtgaaactcctttcatctctgtcctatggccccaccccaccattccctctaggcccagaccatcatcatggccctggccattgatgtgtatgggctttctttccctcatgcagccccttcttccccaggctggatgttgtgggtagggaggggtgtgtgtgtgtgtatttggtttgctgtccttttttaaaggattccaagccatgtgaaacttcccttctggatgtgattctgggtcgcaagtccttatttatatgtgaggctggggaatgggctgggggtattggcagtccttttgcagggcagtgtgtgtggtggggtgacaccgctgtggcttagcccaagacactcccagaggaaaacactgcagaaggaactggtttgcagactgtggaaggatctgcagttttgtttttgaccaaaaaaataataataagttagctctgaagggcagagggaatacccaagcccctgatgcctatgagaagtccctggacttcaaccctcctgttgtttggccttagcccagagggagctgctcacctgagcacccttgggggtgggcagagaggcagggtgggattttagagttagtgtctgtgcgggggcagccctgagcctggagttgagactttggggtctcttagtttggaggtgttgagtgcatttgtgcccctgcctggttgagagcttcttggtacctcttgccaccccttctcactgccctgacccaaccccactggaccttgatgctgcgaggagtggtgtcctgacggactcagcactcccgcctgatgtattggatcataggagagcacttgctctcctgcctctgccaggagagggcttgttcctccaactctaggaggccaggcaagcatggacaggagccaagggagcagggtcattaactttttcttctttgcaaagtgggcacttggcatcagggtcccaatcaccagaaagcaccaaagcccctggcaccccacccactccatcctacccagggaccccaagtaggcaactgttatggcagtgggtccagcccaggccagcactgccagcctcctctccctgcagtaggcaccagctctacctcccccggcaggcaatgtcctggcttctcagcccagcaccatctgttcccctagacttctcaggggccagcccagtctgggccaccctttgtttccctcatcctcggctcccacacaggtgacagacccagcagatagcttctctctgggaaaggttggatgctgccttacatccccttctagccctcctcccatccacacacacaggcacccacccacaccaggtcggcttgtttctcacatgtagggagagaggggagaccaacccctttgtgtcttttgaaatacgaagaaaaatgtgtgttcaggagcatgactccagtgctgcgctcttgggcccagttcagtctgtcttgtctcaaatctaggcatttttgcttcaattttattttttttaagaatacaaaaacagaaatctgcactaatttacctggtttcgtaggaaaacttttttttattttttacattttttggtgtccgtttgtattgaataatttgctacatttgtaaaatgtaagaggtatataatatatgtatatttctaacgtaaaaaacataatttttttcttttcaagattttttcttaaaaagatgagagaaacatattttttcaggaaaaacaaactttaaaaaaaaaagaggagaaataaaaccttttctcccctttccccatcctctatctatccctctttcccaggaacaaatcaaaaggtggattatcttctgaagaatggaaactgttagtccagaatgatgtgtttttctcaatgcagtgagttatagattctctagttttctccctagggatgggaagggggcattgaggcaagcctggagaggagcccggggagcagggtcatgaacttttttctttagtgaaggaggaatacaatcaagggttttgtattcagaatgttgtgcaatattttggaatgggacattggtgtgtttagagattttagtttaaaaacaaaacaaaaagattgatcaaatctgtacagtttctattgttccagatttttttaagtttgtattaaaagcatgatacataatagc

SEQ ID NO: 192400 - DNA, 777 bp, Homo sapiens
  Payload ID: 17998
  Gene Name: transducer of ERBB2, 2
  ENST ID: ENST00000434408
  CDS Start-End: 474-777
ggcgcgggaaggtgcgggttgttggctgaggcaagccgtggctcgggcgacgcggggccaggagggcaggaccgtctgccggcgacagcccataccgtctgccgttgcgcgacacgaaccaccctccgatccgccatccccgcgtcgtcgccgctagtccgcccgcccgccctcgggccccccgctgccgagcccgacctcctaagagctgaaagaaattattgagagtcatagtccatagccccctgcttcgtcccccaaccctcaacgacgaaaaggacttcggtcccctggcccggcgacgcccgggaaggaaaggagagcgacctccgccccgcgctcaggccaccctggagggagaagccgccccgcggccggtagagcgccccgccgccgcggagacccgagtgaagccgcctggagcccaaggctgtacacgtgccctgtgctgattctctgcctaggaaaggaccatgcagctagagatcaaagtggccctgaacttcatcatctcctacttgtacaacaagctgccccggcgccgggcagacctgtttggggaggagctagagcggcttttgaaaaagaaatatgaaggccactggtaccctgagaagccactgaaaggctctggcttccgctgtgttcacattggggagatggtggaccccgtggtggagctggccgccaagcggagtggcctggcggtggaagatgtgcgggccaatgtgcctgaggagctgagtgtctggattgatccctttgaggtgtcctacc

SEQ ID NO: 192401 - DNA, 611 bp, Homo sapiens
  Payload ID: 17999
  Gene Name: transducin (beta)-like 1 X-linked receptor 1
  ENST ID: ENST00000352800
  CDS Start-End: 178-611
aattgcctctcaccccccggaggggttattttgggggtggttggaggcggtggcggcggcggcgaggaggggaatttccttgtgcctccattcccgggaggggggagcggcgttggaggccaccgtttccagggttatatcctgtgttgtgacctcatggtttaagtgggaataaagatgagtataagcagtgatgaggtcaacttcttggtatatagatacttgcaagagtcaggattttctcattcagcatttacctttggtatagaaagccatatcagtcagtccaatataaatggtgccctcgtcccacccgctgcattgatttctatcatccagaaaggtctacagtatgtagaagcagaagttagtattaatgaggatggtaccttgtttgatggtcgaccaatagagtctctgtccctgatagatgccgtaatgcctgatgtagtacaaacaagacaacaagcttatagagataagcttgcacagcaacaggcagcagctgctgcagctgccgcagctgcagccagccaacaaggatctgcaaaaaatggagaaaacacagcaaatggggaggagaatggagcacatactatagcaaataatca

SEQ ID NO: 192402 - DNA, 564 bp, Homo sapiens
  Payload ID: 17999
  Gene Name: transducin (beta)-like 1 X-linked receptor 1
  ENST ID: ENST00000422442
  CDS Start-End: 348-564
ttattttgggggtggttggaggcggtggcggcggcggcgaggaggggaatttccttgtgcctccattcccgggaggggggagcggcgttggaggccaccgtttccagcatcaacaacagcaacttgtgattggcggtgaccggatattcagttgcacatccccacatcaatgcactgccaatgatgaggaaactgaggccttggactagaacagaggtctcctgactcagtccaggactctttctattacatcatgcggcctgatatttgtctttatggaactcagcaacatcacatacaggggttatatcctgtgttgtgacctcatggtttaagtgggaataaagatgagtataagcagtgatgaggtcaacttcttggtatatagatacttgcaagagtcaggattttctcattcagcatttacctttggtatagaaagccatatcagtcagtccaatataaatggtgccctcgtcccacccgctgcattgatttctatcatccagaaaggtctacagtatgtagaagcagaagttagtattaatgaggatggtaccttgt

SEQ ID NO: 192403 - DNA, 575 bp, Homo sapiens
  Payload ID: 17999
  Gene Name: transducin (beta)-like 1 X-linked receptor 1
  ENST ID: ENST00000428970
  CDS Start-End: 349-575
aggggcgcgcggcagccgggccttgctccgggacgtgtttatttgtaacttagtgctttttatcgtcttaaggaggtatttggtggaggctctttgaagttgggttcaggagtgtagaattggcaaagttattgccagcttcctggattttctcattcagcatttacctttggtatagaaagccatatcagtcagtccaatataaatggtgccctcgtcccacccgctgcattgatttctatcatccagaaaggtctacagtatgtagaagcagaagttagtattaatgaggatggtaccttgtttgatggtcgaccaatagagtctctgtccctgatagatgccgtaatgcctgatgtagtacaaacaagacaacaagcttatagagataagcttgcacagcaacaggcagcagctgctgcagctgccgcagctgcagccagccaacaaggatctgcaaaaaatggagaaaacacagcaaatggggaggagaatggagcacatactatagcaaataatcatactgatatgatggaagtggatggggatgttgaaatccctcctaataaagctgt

SEQ ID NO: 192404 - DNA, 565 bp, Homo sapiens
  Payload ID: 17999
  Gene Name: transducin (beta)-like 1 X-linked receptor 1
  ENST ID: ENST00000437738
  CDS Start-End: 130-565
atcgtcttaaggaggtatttggtggaggctctttgaagttgggttcaggagtgtagaattggcaaagttattgccagcttcctgggttatatcctgtgttgtgacctcatggtttaagtgggaataaagatgagtataagcagtgatgaggtcaacttcttggtatatagatacttgcaagagtcaggattttctcattcagcatttacctttggtatagaaagccatatcagtcagtccaatataaatggtgccctcgtcccacccgctgcattgatttctatcatccagaaaggtctacagtatgtagaagcagaagttagtattaatgaggatggtaccttgtttgatggtcgaccaatagagtctctgtccctgatagatgccgtaatgcctgatgtagtacaaacaagacaacaagcttatagagataagcttgcacagcaacaggcagcagctgctgcagctgccgcagctgcagccagccaacaaggatctgcaaaaaatggagaaaacacagcaaatggggaggagaatggagcacatactatagcaaataatcata

SEQ ID NO: 192405 - DNA, 580 bp, Homo sapiens
  Payload ID: 17999
  Gene Name: transducin (beta)-like 1 X-linked receptor 1
  ENST ID: ENST00000443315
  CDS Start-End: 337-580
ttagtgctttttatcgtcttaaggaggtatttggtggaggctctttgaagttgggttcaggagtgtagaattggcaaagttattgccagcttcctgcatcaacaacagcaacttgtgattggcggtgaccggatattcagttgcacatccccacatcaatgcactgccaatgatgaggaaactgaggccttggactagaacagaggtctcctgactcagtccaggactctttctattacatcatgcggcctgatatttgtctttatggaactcagcaacatcacatacaggggttatatcctgtgttgtgacctcatggtttaagtgggaataaagatgagtataagcagtgatgaggtcaacttcttggtatatagatacttgcaagagtcaggattttctcattcagcatttacctttggtatagaaagccatatcagtcagtccaatataaatggtgccctcgtcccacccgctgcattgatttctatcatccagaaaggtctacagtatgtagaagcagaagttagtattaatgaggatggtaccttgtttgatggtcgaccaatagagtctctgt

SEQ ID NO: 192406 - DNA, 559 bp, Homo sapiens
  Payload ID: 17999
  Gene Name: transducin (beta)-like 1 X-linked receptor 1
  ENST ID: ENST00000431674
  CDS Start-End: 271-559
ggcgaggaggggaatttccttgtgcctccattcccgggaggggggagcggcgttggaggccaccgtttccagcatcaacaacagcaacttgtgattggcggtgaccggatattcagttgcacatccccacatcaatgcactgccaatgacagcaaaaccaacttctcctcagccttgtgaagaggatgaggaccttcaggatgattcacttccatttaatgaatgggttatatcctgtgttgtgacctcatggtttaagtgggaataaagatgagtataagcagtgatgaggtcaacttcttggtatatagatacttgcaagagtcaggattttctcattcagcatttacctttggtatagaaagccatatcagtcagtccaatataaatggtgccctcgtcccacccgctgcattgatttctatcatccagaaaggtctacagtatgtagaagcagaagttagtattaatgaggatggtaccttgtttgatggtcgaccaatagagtctctgtccctgatagatgccgtaatgcctgatgtagtacaaacaagacaac

SEQ ID NO: 192407 - DNA, 604 bp, Homo sapiens
  Payload ID: 17999
  Gene Name: transducin (beta)-like 1 X-linked receptor 1
  ENST ID: ENST00000422066
  CDS Start-End: 345-604
attttgggggtggttggaggcggtggcggcggcggcgaggaggggaatttccttgtgcctccattcccgggaggggggagcggcgttggaggccaccgtttccagagtttcactctgtcacccaggctcgagtgcagtggcgtgttctcggctcactacaacctccgtcctctgggctcaagcagtcctcgcatctcagcctcccaaggagctgggacctcagcatcaacaacagcaacttgtgattggcggtgaccggatattcagttgcacatccccacatcaatgcactgccaatgggttatatcctgtgttgtgacctcatggtttaagtgggaataaagatgagtataagcagtgatgaggtcaacttcttggtatatagatacttgcaagagtcaggattttctcattcagcatttacctttggtatagaaagccatatcagtcagtccaatataaatggtgccctcgtcccacccgctgcattgatttctatcatccagaaaggtctacagtatgtagaagcagaagttagtattaatgaggatggtaccttgtttgatggtcgaccaatagagtctctgtccctgatagatgccgt

SEQ ID NO: 192408 - DNA, 554 bp, Homo sapiens
  Payload ID: 17999
  Gene Name: transducin (beta)-like 1 X-linked receptor 1
  ENST ID: ENST00000427349
  CDS Start-End: 370-554
attgcctctcaccccccggaggggttattttgggggtggttggaggcggtggcggcggcggcgaggaggggaatttccttgtgcctccattcccgggaggggggagcggcgttggaggccaccgtttccaggtgtgggaataagtatctttggaagaccaggcactttatgcagtattgagctcaggaggcagtgagtgttaaggaatgggtgtaaaacatcaacaacagcaacttgtgattggcggtgaccggatattcagttgcacatccccacatcaatgcactgccaatgtgggattacagctaagtattacgttttaaaggttatatcctgtgttgtgacctcatggtttaagtgggaataaagatgagtataagcagtgatgaggtcaacttcttggtatatagatacttgcaagagtcaggattttctcattcagcatttacctttggtatagaaagccatatcagtcagtccaatataaatggtgccctcgtcccacccgctgcattgatttctatcatccagaaaggtctacagtatgtagaagc

SEQ ID NO: 192409 - DNA, 550 bp, Homo sapiens
  Payload ID: 17999
  Gene Name: transducin (beta)-like 1 X-linked receptor 1
  ENST ID: ENST00000431421
  CDS Start-End: 385-550
attttgggggtggttggaggcggtggcggcggcggcgaggaggggaatttccttgtgcctccattcccgggaggggggagcggcgttggaggccaccgtttccagcatcaacaacagcaacttgtgattggcggtgaccggatattcagttgcacatccccacatcaatgcactgccaatggattttctcattcagcatttacctttggtatagaaagccatatcagtcagtccaatataaatggtgccctcgtcccacccgctgcattgatttctatcatccagaaaggtctacagtatgtagaagcagaagttagtattaatgaggatggtaccttgtttgatggtcgaccaatagagtctctgtccctgatagatgccgtaatgcctgatgtagtacaaacaagacaacaagcttatagagataagcttgcacagcaacaggcagcagctgctgcagctgccgcagctgcagccagccaacaaggatctgcaaaaaatggagaaaacacagcaaatggggaggagaatggagcacatactatagcaa

SEQ ID NO: 192410 - DNA, 592 bp, Homo sapiens
  Payload ID: 17999
  Gene Name: transducin (beta)-like 1 X-linked receptor 1
  ENST ID: ENST00000424913
  CDS Start-End: 374-592
agtgctttttatcgtcttaaggaggtatttggtggaggctctttgaagttgggttcaggagtgtagaattggcaaagttattgccagcttcctgcatcaacaacagcaacttgtgattggcggtgaccggatattcagttgcacatccccacatcaatgcactgccaatggattttctcattcagcatttacctttggtatagaaagccatatcagtcagtccaatataaatggtgccctcgtcccacccgctgcattgatttctatcatccagaaaggtctacagtatgtagaagcagaagttagtattaatgaggatggtaccttgtttgatggtcgaccaatagagtctctgtccctgatagatgccgtaatgcctgatgtagtacaaacaagacaacaagcttatagagataagcttgcacagcaacaggcagcagctgctgcagctgccgcagctgcagccagccaacaaggatctgcaaaaaatggagaaaacacagcaaatggggaggagaatggagcacatactatagcaaataatcatactgatatgatggaagtggatggggatgttgaaatccctcctaat

SEQ ID NO: 192411 - DNA, 7948 bp, Homo sapiens
  Payload ID: 17999
  Gene Name: transducin (beta)-like 1 X-linked receptor 1
  Uniprot ID: Q9BZK7
  ENST ID: ENST00000430069
  CDS Start-End: 261-1805
gcgcggcagccgggccttgctccgggacgtgtttatttgtaacttagtgctttttatcgtcttaaggaggtatttggtggaggctctttgaagttgggttcaggagtgtagaattggcaaagttattgccagcttcctgcatcaacaacagcaacttgtgattggcggtgaccggatattcagttgcacatccccacatcaatgcactgccaatgggttatatcctgtgttgtgacctcatggtttaagtgggaataaagatgagtataagcagtgatgaggtcaacttcttggtatatagatacttgcaagagtcaggattttctcattcagcatttacctttggtatagaaagccatatcagtcagtccaatataaatggtgccctcgtcccacccgctgcattgatttctatcatccagaaaggtctacagtatgtagaagcagaagttagtattaatgaggatggtaccttgtttgatggtcgaccaatagagtctctgtccctgatagatgccgtaatgcctgatgtagtacaaacaagacaacaagcttatagagataagcttgcacagcaacaggcagcagctgctgcagctgccgcagctgcagccagccaacaaggatctgcaaaaaatggagaaaacacagcaaatggggaggagaatggagcacatactatagcaaataatcatactgatatgatggaagtggatggggatgttgaaatccctcctaataaagctgttgtgttgcggggccatgaatctgaagtttttatctgtgcctggaaccctgttagtgatctcctagcatcagggtctggagactcaacagcaagaatatggaatcttagtgagaacagcaccagtggctctacacagttagtacttagacattgtatacgagaaggagggcaagatgttccaagcaacaaggatgtcacatctctagattggaatagtgaaggtacacttctagcaactggttcctatgatgggtttgccagaatatggactaaagatggtaaccttgctagcaccttagggcagcataaaggccctatatttgcattaaaatggaataagaaaggaaatttcatcctaagtgctggagtagacaagactacaattatttgggacgcacatactggtgaagccaagcaacagtttccttttcattcagcaccagcattggatgttgattggcagagcaacaacacctttgcttcttgtagtacagatatgtgcattcatgtctgtaaattaggacaagacagacctattaaaacattccaaggacatacgaatgaagtaaatgctatcaaatgggacccaactggcaatctcttggcctcctgttctgacgacatgactttaaagatatggagtatgaaacaagacaattgtgtccatgatttgcaagcacataataaagaaatttatactatcaaatggagtccaacaggaccagggactaataatccaaatgccaaccttatgttagcaagtgcatcctttgattctactgttaggttatgggatgtagaccgagggatatgcatccataccttgacaaaacaccaagagcctgtgtacagtgtagctttcagtcctgatggcaggtatctggcaagtggttcttttgacaaatgtgtacacatctggaacacgcagacaggtgctctagttcacagctataggggaacaggtggaatatttgaagtttgctggaatgcagcaggagacaaagttggagccagtgcatcagatggttcagtttgtgtattagaccttcggaaatagcgctactagttggaagccatggaccgactatgaatgtgtacatagccaaaatgactgtccctgacccatgtactgctatagtcccacttgaaccatggccagtccactacagccaaatctaaaagaaatatatacatacagtgtatataaacaaaattgcaccctgaagatgacagagttttgtcacagcttgtgaattctgttcaccaagtgctggaatctaatctgctgtgcccctaaaatagcatttagaagttttggatatgaaaaacagaagagagaaaaatatacattataaaagcagaacatacatgtaccagtttttggatactaaatgacagccttgtttctcccctttgaatcagcagacaccatggattatattctttttttcccttcagtagtgagcagtttgtatgtacagagaaaatggacttacaaaaacttgcagcagtagtttgttcttgctttaaaatttcgtttttggtttagattatggatgcatgaagtaagggagtgaatcagtttcttgtttatatttttttcaccttttaaacaaaaaattctttaaaatattttaatgcattcttttgaagaggtagatgtttggtacattttatggctcccagagcatatattcagttggtgcatgttgtggaagggggaattggaaattaaatgaaaacctatgactttggtcatgtcaatctgtaagacacatcagtaaaagggtattatgctctgttggttttgtttttttgttttgctttttttttttttttttcttttttgttttttggtgatgtggcttaaatgcaatagtttcttttttgggacatatttctgccaattaaagactagaagggcacaactttttttttaattaccatagagaagatacattaaaaaaaatcttctgatgttttgtagccataactaaattatggtaaaaatgtgcactattgtgaaaaggagcaacgtagttttgggttttttgttgtttgtttgttttgctttgttttttaagagattaaaatgtttctggataaggattagcttctcgaagtgtccatcattctgtgtagaagcttaaatatgtaatgtaaccaaactccagtattaaaaatctctcatgttgttttctttatacaaagcaagataacggcatataacactgccattacatggcaaaatgtttgctaccttagtttaaaaaacaatctcaaacaaaagacttgcttcaaggtgtttttaaatagcagtgattcagaattttttttaatgaaagtataattgcactaaccttcttcctgctgctctgattctgcatttgtggtacttgtgactacgttttttcaaatatagatagatttaagctgctaatttttttttttttagtaatcactactatatcatgtcttttactctgtttataatatcaagtattttcttaaagatatagatattaaaccttgtgctcatgcaacttagagtaacatatacagacaaatgattgcatgaggccatgtttatatgtgtgactaataaggcttgtcatgattaacataatccaggtatgtcatttctgaagagaatagtcatcaaatttatatctcgaagattttaattaaggaattgcttattgttgagcttagcaaattaataacactatttctgtcactaattattttgaggccttttagtactaaaattttaacctgtgttctaagtagaaactgatttaacccaagtaatgcagctttgattgatttcagcattcgttgctttgctatttttacaaaacagcattgattgaagcaagtcttggttttactaaggtagggtagcatttgctattggtaaagagaataaatacacttaatttcacaatacattgttatatgtaccccagttgttgttagtggggactatgatactgtaataatatttttaaaaatttacatcaagagaggcagtcattcacgatggttttgtgccagctctttttagggttttggatcacattagagatatttagaacatattaccctgtgacttacgtaggaaacctaatatgctgagtatctggcacttgaattcctgcttttattgctggaggtccacatctgtggttgacctctgttattgtttaaaaaaaataaataaaaattaaaaaaatctgtgcaataattttaaaatgtgctcccaggaatagacacaaatgttttgagtatcttttaagctgcattttcctttagtgatgcatttgtcaattgcactgaatttaaatctgaaagtcagaggtgattattgatagtacttttgtattttgatatggacagtttattcatttgcatacagttattgactttttcccagctgattaaaagatagtcaagaaattctgcaatatagctgccaaaatagacagctacatttttatgatattgtcatcttttctgttttttttttcttttttttctttagctattttacttaagcataatagccacaataggacatataaaagattataaatacagagctttattatcctgacgtcttgggtcttttaagtatatacttttctgaaaggtatccattttgtaggcttgggttcttcatgagcatacgattgtttatttttgctgctgttctcaacatcatcattgcctgctgatgtgccacgatgctgctccaatagacagcaataagattgtctctaatttgagcagtaacatgattgcaagagaccaagtttcacagcttgtaaagttctgtatttgggattcttgcttatttttccgcctgtgtttttctgagaacttattcctgatgatcaattgaatccagtagtttttctatgctatttgttgttgtataagctactgtaagaaacttatcataaggaaaaatagaaaggaaaacttgaatcaatactcattgattaaaatggaataaagaaagagcagctgccacttttaaacaacataaaggaatatctttttttgtctccgtgtaggaaatcccataagttcttatatttgttccagttcccatttcctgccattgaccagataacatcattgactttcaaatgacttttagaagtgataactcttaatttcctaatagatactagattgtattgaattctgttttaattattctctaggtaagtatgttttaggattaaataccttttacagatactgaaagtgcctccttttgtggtgtaaaaaacaaattatggtgcaaaaagtaatcactagattgaaatacatgaaggttttttgctttttgacatacgaaaatgtcaagagaaaggccaaagatttgtactttttcacttacaaagcactcctttttcccttaaacttctttctgtcaaattagatttaatgagagagtactatttttaaggagctatctgtttatgtagaatgattttgttaagagtaatgtaaactattattgagtagaggcctaaagaggactgtgcatttttgctatttaaaggaatcacaaatgatcatacttaagtgagcaaaaatgacaagttttactagctaagtagagaaataaatctcaaatgcagcgctacaattttcattatcttaagtacattgtacatttctacagaacctgtgattattctcgcatgataaggatggtacttgcatatggtgaattactactgttgacagtttccgcagaaatcctatttcagtggaccaacattgtggcatggcagcaaatgccaacattttgtggaatagcagcaaatctacaagagaccctggttggtttttcgttttgttttctttgttttttcccccttctcctgaatcagcagggatggaaggagggtagggaagttatgaattactccttccagtagtagctctgaagtgtcacatttaatatcagttttttttaaacatgattctagttaaatgtagaagagagaagaaagaggaagtgttcacttttttaatacactgatttagaaatttgatgtcttatatcagtagttctgaggtattgatagcttgctttatttctgcctttacgttgacagtgttgaagcagggtgaataactagggcatatattttttttttttttgtaagctgtttcatgatgttttctttggaatttccggataagttcaggaaaacattctgcatgttgtatctagtctgatgtacttatccatctcattacaaacaaaaacacacagactgcatttgtagctctgtaatccttgaatacggaagtaaattttcttctttcctgactttgacattgtagctatactgtttccatttttgtttttacaaatcctttgggtctaattctgtgagcctacctatagcactggattaaaatgtctgcatcatttctttagttatccagttaactttaaaactgttgtaaaagtgtaaaccagcccatgacaggtttttgtacatgttaaagaacttcattgttcagttttcatgattattgtgtaaggaagactgatgtagatgttctgtgctgtcctggaccatgttaattacacttacgacgtattttagttccacatcacaatgatttgtccccagtgacccttttatcctttctaggcacatttcttgttgttgttgttgttgcagttcccctttgcattgtattgctttgacaactgtaatttgaatcagatctgaaagaggtccagaataaaatatattttgatattatgttggctgtgtacatatataaaacctttgatgtctatgtagtttatatagactatttactagtcaggtaaagagagagggatggtatttcttgtttacagtttgtttacattttaattgcttttacttctccagtgttctattgtagaataaacctttttttccaagttagccttcataacctataacacattcattctctcccatactggtgttactgattaataactgccatcagaacccaaaccactgtttttcataaacgtattgtttcccaagatatatactttaagcccataataaaattacaaattttactatttttattacttcttgcaggagataagatttttttaaatgaaggggttatttactatttttattaaagtataatagagcatctaatcagctaagggattgtaatttttaattcttttgaaaaataaatattgtatttaaaagacgttatttcacagaagctgaaaaagagaccttagataacatttgtttggttagccacacggttgagcacaaaacaatgtgtagatgtgttgaagattagggcaggaggctcaacttctcggtgacctttttttgcttcacaacaagccaattatagttgaatcattttctctcttagctagttgttactacaaactttataagaaaaacaactagacaccttctagttttaattaataccaactcctttagagttagagactttttaaaaagaatcattgagcatattttcttttttttttttttaagaatttacactctctaggtcttctatttttcctgtttatttccttaaacagaaataaattcaagcatagttttatgttttattagaaataagccactgcagttgctagaactgacatgctttcattttcaaggggttaacttttattgcatggcatagattattagtaatatcctgcattgtatacttttccaaaaagggttggactcctaaggattagaatccttataagcttgagggaaagctgaaactaatttgaacagtaatagaagggattatttttaatttcatagttaacactttacaatggattagatttattacctagtataatccgtagcagatcagatcaaagtttactgttttaccaatatattcatttgaaaaaatacagtggaggaaaagacactttagatggtagttttatggtgcttttctctgctgtaccaaagtgctttgtcatcaatgaaatgttaaccctatgctactttttctgcatgcttcttaaatgtcatcttaatgcttaattgtcctaacttgtaatatttttgtattaaatttttttaggagttccttgtaatttctttacaatttaaaatatattaaacacaaagtgtttagtaaagtaca

SEQ ID NO: 192412 - DNA, 588 bp, Homo sapiens
  Payload ID: 17999
  Gene Name: transducin (beta)-like 1 X-linked receptor 1
  ENST ID: ENST00000450267
  CDS Start-End: 229-588
ggggaatttccttgtgcctccattcccgggaggggggagcggcgttggaggccaccgtttccagatgaggaaactgaggccttggactagaacagaggtctcctgactcagtccaggactctttctattacatcatgcggcctgatatttgtctttatggaactcagcaacatcacatacaggggttatatcctgtgttgtgacctcatggtttaagtgggaataaagatgagtataagcagtgatgaggtcaacttcttggtatatagatacttgcaagagtcaggattttctcattcagcatttacctttggtatagaaagccatatcagtcagtccaatataaatggtgccctcgtcccacccgctgcattgatttctatcatccagaaaggtctacagtatgtagaagcagaagttagtattaatgaggatggtaccttgtttgatggtcgaccaatagagtctctgtccctgatagatgccgtaatgcctgatgtagtacaaacaagacaacaagcttatagagataagcttgcacagcaacaggcagcagctgctgcagctgccgcagctgcagccagccaa

SEQ ID NO: 192413 - DNA, 4101 bp, Homo sapiens
  Payload ID: 17999
  Gene Name: transducin (beta)-like 1 X-linked receptor 1
  Uniprot ID: Q9BZK7
  ENST ID: ENST00000457928
  CDS Start-End: 398-1942
ctccccccgccgccggccgcgtgcgcccccgcccctccccccgcggcgggagcacctccgctcgccacctggggacccgcgccgcgctccccgcccccgcccgcccggcgcccatcccccgcgccctccgctcgctggggttataattgcctctcaccccccggaggggttattttgggggtggttggaggcggtggcggcggcggcgaggaggggaatttccttgtgcctccattcccgggaggggggagcggcgttggaggccaccgtttccagcatcaacaacagcaacttgtgattggcggtgaccggatattcagttgcacatccccacatcaatgcactgccaatgggttatatcctgtgttgtgacctcatggtttaagtgggaataaagatgagtataagcagtgatgaggtcaacttcttggtatatagatacttgcaagagtcaggattttctcattcagcatttacctttggtatagaaagccatatcagtcagtccaatataaatggtgccctcgtcccacccgctgcattgatttctatcatccagaaaggtctacagtatgtagaagcagaagttagtattaatgaggatggtaccttgtttgatggtcgaccaatagagtctctgtccctgatagatgccgtaatgcctgatgtagtacaaacaagacaacaagcttatagagataagcttgcacagcaacaggcagcagctgctgcagctgccgcagctgcagccagccaacaaggatctgcaaaaaatggagaaaacacagcaaatggggaggagaatggagcacatactatagcaaataatcatactgatatgatggaagtggatggggatgttgaaatccctcctaataaagctgttgtgttgcggggccatgaatctgaagtttttatctgtgcctggaaccctgttagtgatctcctagcatcagggtctggagactcaacagcaagaatatggaatcttagtgagaacagcaccagtggctctacacagttagtacttagacattgtatacgagaaggagggcaagatgttccaagcaacaaggatgtcacatctctagattggaatagtgaaggtacacttctagcaactggttcctatgatgggtttgccagaatatggactaaagatggtaaccttgctagcaccttagggcagcataaaggccctatatttgcattaaaatggaataagaaaggaaatttcatcctaagtgctggagtagacaagactacaattatttgggacgcacatactggtgaagccaagcaacagtttccttttcattcagcaccagcattggatgttgattggcagagcaacaacacctttgcttcttgtagtacagatatgtgcattcatgtctgtaaattaggacaagacagacctattaaaacattccaaggacatacgaatgaagtaaatgctatcaaatgggacccaactggcaatctcttggcctcctgttctgacgacatgactttaaagatatggagtatgaaacaagacaattgtgtccatgatttgcaagcacataataaagaaatttatactatcaaatggagtccaacaggaccagggactaataatccaaatgccaaccttatgttagcaagtgcatcctttgattctactgttaggttatgggatgtagaccgagggatatgcatccataccttgacaaaacaccaagagcctgtgtacagtgtagctttcagtcctgatggcaggtatctggcaagtggttcttttgacaaatgtgtacacatctggaacacgcagacaggtgctctagttcacagctataggggaacaggtggaatatttgaagtttgctggaatgcagcaggagacaaagttggagccagtgcatcagatggttcagtttgtgtattagaccttcggaaatagcgctactagttggaagccatggaccgactatgaatgtgtacatagccaaaatgactgtccctgacccatgtactgctatagtcccacttgaaccatggccagtccactacagccaaatctaaaagaaatatatacatacagtgtatataaacaaaattgcaccctgaagatgacagagttttgtcacagcttgtgaattctgttcaccaagtgctggaatctaatctgctgtgcccctaaaatagcatttagaagttttggatatgaaaaacagaagagagaaaaatatacattataaaagcagaacatacatgtaccagtttttggatactaaatgacagccttgtttctcccctttgaatcagcagacaccatggattatattctttttttcccttcagtagtgagcagtttgtatgtacagagaaaatggacttacaaaaacttgcagcagtagtttgttcttgctttaaaatttcgtttttggtttagattatggatgcatgaagtaagggagtgaatcagtttcttgtttatatttttttcaccttttaaacaaaaaattctttaaaatattttaatgcattcttttgaagaggtagatgtttggtacattttatggctcccagagcatatattcagttggtgcatgttgtggaagggggaattggaaattaaatgaaaacctatgactttggtcatgtcaatctgtaagacacatcagtaaaagggtattatgctctgttggttttgtttttttgttttgctttttttttttttttttcttttttgttttttggtgatgtggcttaaatgcaatagtttcttttttgggacatatttctgccaattaaagactagaagggcacaactttttttttaattaccatagagaagatacattaaaaaaaatcttctgatgttttgtagccataactaaattatggtaaaaatgtgcactattgtgaaaaggagcaacgtagttttgggttttttgttgtttgtttgttttgctttgttttttaagagattaaaatgtttctggataaggattagcttctcgaagtgtccatcattctgtgtagaagcttaaatatgtaatgtaaccaaactccagtattaaaaatctctcatgttgttttctttatacaaagcaagataacggcatataacactgccattacatggcaaaatgtttgctaccttagtttaaaaaacaatctcaaacaaaagacttgcttcaaggtgtttttaaatagcagtgattcagaattttttttaatgaaagtataattgcactaaccttcttcctgctgctctgattctgcatttgtggtacttgtgactacgttttttcaaatatagatagatttaagctgctaatttttttttttttagtaatcactactatatcatgtcttttactctgtttataatatcaagtattttcttaaagatatagatattaaaccttgtgctcatgcaacttagagtaacatatacagacaaatgattgcatgaggccatgtttatatgtgtgactaataaggcttgtcatgattaacataatccaggtatgtcatttctgaagagaatagtcatcaaatttatatctcgaagattttaattaaggaattgcttattgttgagcttagcaaattaataacactatttctgtcactaattattttgaggccttttagtactaaaattttaacctgtgttctaagtagaaactgatttaacccaagtaatgcagctttgattgatttcagcattcgttgctttgctatttttacaaaacagcattgattgaagcaagtcttggttttactaaggtagggtagcatttgctattggtaaagagaataaatacacttaatttcacaatacattgttatatgtaccccagttgttgttagtggggactatgatactgtaataatatttttaaaaatttacatcaagagaggcagtcattcacgatggttttgtgccagctctttttagggttttggatcacattagagatatttagaacatattaccctgtgacttacgtaggaaacctaatatgctgagtatctggcacttgaattcctgcttttattgctggaggtccacatctgtggttgacctctgttattgtttaaaaaaaa

SEQ ID NO: 192414 - DNA, 592 bp, Homo sapiens
  Payload ID: 17999
  Gene Name: transducin (beta)-like 1 X-linked receptor 1
  ENST ID: ENST00000413084
  CDS Start-End: 494-592
tattttgggggtggttggaggcggtggcggcggcggcgaggaggggaatttccttgtgcctccattcccgggaggggggagcggcgttggaggccaccgtttccagcatcaacaacagcaacttgtgattggcggtgaccggatattcagttgcacatccccacatcaatgcactgccaatgatgaggaaactgaggccttggactagaacagaggtctcctgactcagtccaggactctttctattacatcatgcggcctgatatttgtctttatggaactcagcaacatcacatacaggtagagacggggtttcaccgtgttagccaggatggtctcaatctcctgacctcgtgatctgtccgccttggcctcccaaaggtttgggattacagacgtgagccaccgcacccagccgatattgttttattttaatcaaggcaaaactggttatatcctgtgttgtgacctcatggtttaagtgggaataaagatgagtataagcagtgatgaggtcaacttcttggtatatagatacttgcaagagtcaggattttctcattcagcatttacctttggtatagaaagccat

SEQ ID NO: 192415 - DNA, 567 bp, Homo sapiens
  Payload ID: 17999
  Gene Name: transducin (beta)-like 1 X-linked receptor 1
  ENST ID: ENST00000630833
  CDS Start-End: 252-567
attcccgggaggggggagcggcgttggaggccaccgtttccaggtgtgggaataagtatctttggaagaccaggcactttatgcagtattgagctcaggaggcagtgagtgttaaggaatgggtgtaaaacatcaacaacagcaacttgtgattggcggtgaccggatattcagttgcacatccccacatcaatgcactgccaatgggttatatcctgtgttgtgacctcatggtttaagtgggaataaagatgagtataagcagtgatgaggtcaacttcttggtatatagatacttgcaagagtcaggattttctcattcagcatttacctttggtatagaaagccatatcagtcagtccaatataaatggtgccctcgtcccacccgctgcattgatttctatcatccagaaaggtctacagtatgtagaagcagaagttagtattaatgaggatggtaccttgtttgatggtcgaccaatagagtctctgtccctgatagatgccgtaatgcctgatgtagtacaaacaagacaacaagcttatagagataagcttgcacagc

SEQ ID NO: 192416 - DNA, 656 bp, Homo sapiens
  Payload ID: 17999
  Gene Name: transducin (beta)-like 1 X-linked receptor 1
  ENST ID: ENST00000630796
  CDS Start-End: 290-656
gggcgcgcggcagccgggccttgctccgggacgtgtttatttgtaacttagtgctttttatcgtcttaaggaggtatttggtggaggctctttgaagttgggttcaggagtgtagaattggcaaagttattgccagcttcctgcatcaacaacagcaacttgtgattggcggtgaccggatattcagttgcacatccccacatcaatgcactgccaatgatgaggaaactgaggccttggactagaacagaggtctcctgactcagtccaggactctttctattacatcatgcggcctgatatttgtctttatggaactcagcaacatcacatacagggattttctcattcagcatttacctttggtatagaaagccatatcagtcagtccaatataaatggtgccctcgtcccacccgctgcattgatttctatcatccagaaaggtctacagtatgtagaagcagaagttagtattaatgaggatggtaccttgtttgatggtcgaccaatagagtctctgtccctgatagatgccgtaatgcctgatgtagtacaaacaagacaacaagcttatagagataagcttgcacagcaacaggcagcagctgctgcagctgccgcagctgcagccagccaacaaggatctgcaaaaa

SEQ ID NO: 192417 - DNA, 4186 bp, Homo sapiens
  Payload ID: 17999
  Gene Name: transducin (beta)-like 1 X-linked receptor 1
  ENST ID: ENST00000631253
  CDS Start-End: 74-1498
acatccccacatcaatgcactgccaatgggttatatcctgtgttgtgacctcatggtttaagtgggaataaagatgagtataagcagtgatgaggtcaacttcttggtatatagatacttgcaagagtcaggattttctcattcagcatttacctttggtatagaaagccatatcagtcagtccaatataaatggtgccctcgtcccacccgctgcattgatttctatcatccagaaaggtctacagtatgtagaagcagaagttagtattaatgaggatggtaccttgtttgatggtcgaccaatagagtctctgtccctgatagatgccgtaatgcctgatgtagtacaaacaagacaacaagcttatagagataagcttgcacagcaacaggcagcagctgctgcagctgccgcagctgcagccagccaacaaggatctgcaaaaaatggagaaaacacagcaaatggggaggagaatggagcacatactatagcaaataatcatactgatatgatggaagtggatggggatgttgaaatccctcctaataaagctgttgtgttgcggggccatgaatctgaagtttttatctgtgcctggaaccctgttagtgatctcctagcatcagggtctggagactcaacagcaagaatatggaatcttagtgagaacagcaccagtggctctacacagttagtacttagacattgtatacgagaaggagggcaagatgttccaagcaacaaggatgtcacatctctagattggaatagtgaaggtacacttctagcaactggttcctatgatgggtttgccagaatatggactaaagatggtaaccttgctagcaccttagggcagcataaaggccctatatttgcattaaaatggaataagaaaggaaatttcatcctaagtgctggagtagacaagactacaattatttgggacgcacatactggtgaagccaagcaacagtttccttttcattcagcaccagcattggatgttgattggcagagcaacaacacctttgcttcttgtagtacagatatgtgcattcatgtctgtaaattaggacaagacagacctattaaaacattccaaggacatacgaatgaagtaaatgctatcaaatgggacccaactggcaatctcttggcctcctgttctgacgacatgactttaaagatatggagtatgaaacaagacaattgtgtccatgatttgcaagcacataataaagaaatttatactatcaaatggagtccaacaggaccagggactaataatccaaatgccaaccttatgttagcaagtgcatcctttgattctactgttaggttatgggatgtagaccgagggatatgcatccataccttgacaaaacaccaagagcctgtgtacagtgtagctttcagtcctgatggcaggtatctggcaagtggttcttttgacaaatgtgtacacatctggaacacgcaggtgctctagttcacagctataggggaacaggtggaatatttgaagtttgctggaatgcagcaggagacaaagttggagccagtgcatcagatggttcagtttgtgtattagaccttcggaaatagcgctactagttggaagccatggaccgactatgaatgtgtacatagccaaaatgactgtccctgacccatgtactgctatagtcccacttgaaccatggccagtccactacagccaaatctaaaagaaatatatacatacagtgtatataaacaaaattgcaccctgaagatgacagagttttgtcacagcttgtgaattctgttcaccaagtgctggaatctaatctgctgtgcccctaaaatagcatttagaagttttggatatgaaaaacagaagagagaaaaatatacattataaaagcagaacatacatgtaccagtttttggatactaaatgacagccttgtttctcccctttgaatcagcagacaccatggattatattctttttttcccttcagtagtgagcagtttgtatgtacagagaaaatggacttacaaaaacttgcagcagtagtttgttcttgctttaaaatttcgtttttggtttagattatggatgcatgaagtaagggagtgaatcagtttcttgtttatatttttttcaccttttaaacaaaaaattctttaaaatattttaatgcattcttttgaagaggtagatgtttggtacattttatggctcccagagcatatattcagttggtgcatgttgtggaagggggaattggaaattaaatgaaaacctatgactttggtcatgtcaatctgtaagacacatcagtaaaagggtattatgctctgttggttttgtttttttgttttgctttttttttttttttttcttttttgttttttggtgatgtggcttaaatgcaatagtttcttttttgggacatatttctgccaattaaagactagaagggcacaactttttttttaattaccatagagaagatacattaaaaaaaatcttctgatgttttgtagccataactaaattatggtaaaaatgtgcactattgtgaaaaggagcaacgtagttttgggttttttgttgtttgtttgttttgctttgttttttaagagattaaaatgtttctggataaggattagcttctcgaagtgtccatcattctgtgtagaagcttaaatatgtaatgtaaccaaactccagtattaaaaatctctcatgttgttttctttatacaaagcaagataacggcatataacactgccattacatggcaaaatgtttgctaccttagtttaaaaaacaatctcaaacaaaagacttgcttcaaggtgtttttaaatagcagtgattcagaattttttttaatgaaagtataattgcactaaccttcttcctgctgctctgattctgcatttgtggtacttgtgactacgttttttcaaatatagatagatttaagctgctaatttttttttttttagtaatcactactatatcatgtcttttactctgtttataatatcaagtattttcttaaagatatagatattaaaccttgtgctcatgcaacttagagtaacatatacagacaaatgattgcatgaggccatgtttatatgtgtgactaataaggcttgtcatgattaacataatccaggtatgtcatttctgaagagaatagtcatcaaatttatatctcgaagattttaattaaggaattgcttattgttgagcttagcaaattaataacactatttctgtcactaattattttgaggccttttagtactaaaattttaacctgtgttctaagtagaaactgatttaacccaagtaatgcagctttgattgatttcagcattcgttgctttgctatttttacaaaacagcattgattgaagcaagtcttggttttactaaggtagggtagcatttgctattggtaaagagaataaatacacttaatttcacaatacattgttatatgtaccccagttgttgttagtggggactatgatactgtaataatatttttaaaaatttacatcaagagaggcagtcattcacgatggttttgtgccagctctttttagggttttggatcacattagagatatttagaacatattaccctgtgacttacgtaggaaacctaatatgctgagtatctggcacttgaattcctgcttttattgctggaggtccacatctgtggttgacctctgttattgtttaaaaaaaataaataaaaattaaaaaaatctgtgcaataattttaaaatgtgctcccaggaatagacacaaatgttttgagtatcttttaagctgcattttcctttagtgatgcatttgtcaattgcactgaatttaaatctgaaagtcagaggtgattattgatagtacttttgtattttgatatggacagtttattcatttgcatacagttattgactttttcccagctgattaaaagatagtcaagaaattctgcaatatagctgccaaaatagacagctacatttttatgatattgtcatcttttctgttttttttttcttttttttctttagctattttacttaagcataatagccacaataggacatataaaagattataaatacagagctttattatcctgacgtcttgggtctt

SEQ ID NO: 192418 - DNA, 355 bp, Homo sapiens
  Payload ID: 17999
  Gene Name: transducin (beta)-like 1 X-linked receptor 1
  ENST ID: ENST00000626758
  CDS Start-End: 1-202
taataatccaaatgccaaccttatgttagcaagtggttcttttgacaaatgtgtacacatctggaacacgcagacaggtgctctagttcacagctataggggaacaggtggaatatttgaagtttgctggaatgcagcaggagacaaagttggagccagtgcatcagatggttcagtttgtgtattagaccttcggaaatagcgctactagttggaagccatggaccgactatgaatgtgtacatagccaaaatgactgtccctgacccatgtactgctatagtcccacttgaaccatggccagtccactacagccaaatctaaaagaaatatatacatacagtgtatataaaca

SEQ ID NO: 192419 - DNA, 568 bp, Homo sapiens
  Payload ID: 17999
  Gene Name: transducin (beta)-like 1 X-linked receptor 1
  ENST ID: ENST00000626672
  CDS Start-End: 232-568
ttattttgggggtggttggaggcggtggcggcggcggcgaggaggggaatttccttgtgcctccattcccgggaggggggagcggcgttggaggccaccgtttccagatattttcctcttctggaccctatctagaagaagtattccttagacaatttccggcttcttttctctcatgaagaggagggttatatcctgtgttgtgacctcatggtttaagtgggaataaagatgagtataagcagtgatgaggtcaacttcttggtatatagatacttgcaagagtcaggattttctcattcagcatttacctttggtatagaaagccatatcagtcagtccaatataaatggtgccctcgtcccacccgctgcattgatttctatcatccagaaaggtctacagtatgtagaagcagaagttagtattaatgaggatggtaccttgtttgatggtcgaccaatagagtctctgtccctgatagatgccgtaatgcctgatgtagtacaaacaagacaacaagcttatagagataagcttgcacagcaacaggcagcagctgctgcag

SEQ ID NO: 192420 - DNA, 2312 bp, Homo sapiens
  Payload ID: 18000
  Gene Name: transducin (beta)-like 1, Y-linked
  Uniprot ID: Q9BQ87
  ENST ID: ENST00000346432
  CDS Start-End: 553-2121
ccagtgcccccaattcgcgctcgggagtgaggagccgccaacaccccagctccgctgctgccgccaccgcagtgctctctagtcgccattggttacctaaactttccagtacccgcgacctttccgggactccgcggcggcggggcagaggcggcccaggggcggcacgcggctgctccggtgcgccgggctcttttcggccgccgcacggccgggcctcacaggctgccctcctgagagaggctcagaacacggccaggtacgcgccgccgccacagttgcgctgctagcgacgaggtgttttcctctgctggcacgccagaatccctggttcagcctggaaggcgaggggcaggactccccagacagtggcctcagtgtggcattgatgtcctaggttgtaaggtgctaaggctggtccccacagacggcttgccatttctatgactggatgctgagaagcctgctggttcagaggtccacacatgaagttaccataaagagggtggttccaacttcatcaatacctcatcgccatgaggtgaggctaagatgagcataaccagtgacgaggtgaactttctggtttatcggtatctccaggagtcaggtttttctcactcggctttcacgtttgggatcgagagccacatcagccagtccaacatcaatgggacactagtgccaccgtctgccctcatctccattctccagaagggactgcagtatgtagaggctgagataagcatcaacaaggatggcacagtgttcgacagccgccctatagagtccctgtccctgatagttgctgtgattcctgatgtggtgcagatgcggcagcaggcatttggagagaagctcactcagcagcaagccagtgcagcagccacagaggcatcagcaatggcaaaggcggcaaccatgaccccagctgctatttcccagcaaaatcctccaaagaaccgagaggccacagtgaacggggaagagaatggagcacatgaaatcaataatcactcaaagccaatggaaatagatggggatgttgagattccacccaacaaagccacagtccttcggggccacgagtctgaggtgttcatttgtgcctggaaccctgtcagtgatttgctagcctctggatctggagactcaactgcaaggatatggaacctgaatgagaatagcaacgggggctccacccagctcgtgttgagacattgtatacgagaaggggggcacgacgtcccaagtaataaagatgtcacctcactggactggaacagtgatggaacactattggctatgggttcatatgatggtttcgcaagaatatggacagaaaatggtaacctggccagcaccttaggccaacataaaggccccatcttcgctctgaaatggaacaaaaaggggaattatgttttgagtgctggtgtagacaaaacaacaataatttgggatgctcacacaggagaagccaaacagcagtttccttttcattcagcccccgcccttgatgtggactggcagaacaacatgacctttgcctcctgtagcacagacatgtgtatccatgtgtgcaggctcggctgtgaccacccagtcaaaaccttccagggacacacaaacgaggtcaatgccatcaaatgggatccttctggaatgttgctggcgtcctgctcggatgacatgacattgaagatctggagtatgaagcaggatgcatgcgtccacgatcttcaggctcacagcaaagagatctacaccatcaagtggagccccaccgggcctgccaccagcaacccaaactccagcatcatgttggcaagtgcttcatttgattctacagtgcgactgtgggatgtggagcaaggtgtctgcacccacacactcatgaagcatcaagagcctgtctacagtgtagctttcagccccgatggaaagtacttggctagtggatcctttgacaagtatgttcatatctggaatactcagagtggaagtctcgtccacagctaccaaggcactggcggtatcttcgaggtgtgctggaacgcccgaggagataaagtgggcgccagcgcgtctgatggctctgtgtgtgttctggatctgtgaaagtaaacacaaaatatagaaaaaaagaaaagaattctaatgacctgccttgaatgcatggggttgcagctctgttcaaacacaattctatcagctccaaaatgtgtgaacttgacttgtgttagagtatattctgaaaccaacttgtcccaggccacaggagtgtatatgtttcataatctttatcaaga

SEQ ID NO: 192421 - DNA, 2376 bp, Homo sapiens
  Payload ID: 18000
  Gene Name: transducin (beta)-like 1, Y-linked
  Uniprot ID: Q9BQ87
  ENST ID: ENST00000355162
  CDS Start-End: 617-2185
ccagtgcccccaattcgcgctcgggagtgaggagccgccaacaccccagctccgctgctgccgccaccgcagtgctctctagtcgccattggttacctaaactttccagtacccgcgacctttccgggactccgcggcggcggggcagaggcggcccaggggcggcacgcggctgctccggtgcgccgggctcttttcggccgccgcacggccgggcctcacaggctgccctcctgagagaggctcagaacacggccaggtacgcgccgccgccacagttgcgctgctagcgacgaggtgttttcctctgctggcacgccagaatccctggttcagcctggaaggcgaggggcaggactccccagacagtggcctcagtgtggggaatgccagctgttctcttaacagaagggcagtttttgaagaaatgaagcaggacttgatgtggattgtcataaactgtttctccctaaagaggctggtccccacagacggcttgccatttctatgactggatgctgagaagcctgctggttcagaggtccacacatgaagttaccataaagagggtggttccaacttcatcaatacctcatcgccatgaggtgaggctaagatgagcataaccagtgacgaggtgaactttctggtttatcggtatctccaggagtcaggtttttctcactcggctttcacgtttgggatcgagagccacatcagccagtccaacatcaatgggacactagtgccaccgtctgccctcatctccattctccagaagggactgcagtatgtagaggctgagataagcatcaacaaggatggcacagtgttcgacagccgccctatagagtccctgtccctgatagttgctgtgattcctgatgtggtgcagatgcggcagcaggcatttggagagaagctcactcagcagcaagccagtgcagcagccacagaggcatcagcaatggcaaaggcggcaaccatgaccccagctgctatttcccagcaaaatcctccaaagaaccgagaggccacagtgaacggggaagagaatggagcacatgaaatcaataatcactcaaagccaatggaaatagatggggatgttgagattccacccaacaaagccacagtccttcggggccacgagtctgaggtgttcatttgtgcctggaaccctgtcagtgatttgctagcctctggatctggagactcaactgcaaggatatggaacctgaatgagaatagcaacgggggctccacccagctcgtgttgagacattgtatacgagaaggggggcacgacgtcccaagtaataaagatgtcacctcactggactggaacagtgatggaacactattggctatgggttcatatgatggtttcgcaagaatatggacagaaaatggtaacctggccagcaccttaggccaacataaaggccccatcttcgctctgaaatggaacaaaaaggggaattatgttttgagtgctggtgtagacaaaacaacaataatttgggatgctcacacaggagaagccaaacagcagtttccttttcattcagcccccgcccttgatgtggactggcagaacaacatgacctttgcctcctgtagcacagacatgtgtatccatgtgtgcaggctcggctgtgaccacccagtcaaaaccttccagggacacacaaacgaggtcaatgccatcaaatgggatccttctggaatgttgctggcgtcctgctcggatgacatgacattgaagatctggagtatgaagcaggatgcatgcgtccacgatcttcaggctcacagcaaagagatctacaccatcaagtggagccccaccgggcctgccaccagcaacccaaactccagcatcatgttggcaagtgcttcatttgattctacagtgcgactgtgggatgtggagcaaggtgtctgcacccacacactcatgaagcatcaagagcctgtctacagtgtagctttcagccccgatggaaagtacttggctagtggatcctttgacaagtatgttcatatctggaatactcagagtggaagtctcgtccacagctaccaaggcactggcggtatcttcgaggtgtgctggaacgcccgaggagataaagtgggcgccagcgcgtctgatggctctgtgtgtgttctggatctgtgaaagtaaacacaaaatatagaaaaaaagaaaagaattctaatgacctgccttgaatgcatggggttgcagctctgttcaaacacaattctatcagctccaaaatgtgtgaacttgacttgtgttagagtatattctgaaaccaacttgtcccaggccacaggagtgtatatgtttcataatctttatcaaga

SEQ ID NO: 192422 - DNA, 2407 bp, Homo sapiens
  Payload ID: 18000
  Gene Name: transducin (beta)-like 1, Y-linked
  Uniprot ID: Q9BQ87
  ENST ID: ENST00000383032
  CDS Start-End: 648-2216
ccagtgcccccaattcgcgctcgggagtgaggagccgccaacaccccagctccgctgctgccgccaccgcagtgctctctagtcgccattggttacctaaactttccagtacccgcgacctttccgggactccgcggcggcggggcagaggcggcccaggggcggcacgcggctgctccggtgcgccgggctcttttcggccgccgcacggccgggcctcacaggctgccctcctgagagaggctcagaacacggccaggtacgcgccgccgccacagttgcgctgctagcgacgaggtgttttcctctgctggcacgccagaatccctggttcagcctggaaggcgaggggcaggactccccagacagtggcctcagtgtggcattgatgtcctaggttgtaaggtgctaaggggaatgccagctgttctcttaacagaagggcagtttttgaagaaatgaagcaggacttgatgtggattgtcataaactgtttctccctaaagaggctggtccccacagacggcttgccatttctatgactggatgctgagaagcctgctggttcagaggtccacacatgaagttaccataaagagggtggttccaacttcatcaatacctcatcgccatgaggtgaggctaagatgagcataaccagtgacgaggtgaactttctggtttatcggtatctccaggagtcaggtttttctcactcggctttcacgtttgggatcgagagccacatcagccagtccaacatcaatgggacactagtgccaccgtctgccctcatctccattctccagaagggactgcagtatgtagaggctgagataagcatcaacaaggatggcacagtgttcgacagccgccctatagagtccctgtccctgatagttgctgtgattcctgatgtggtgcagatgcggcagcaggcatttggagagaagctcactcagcagcaagccagtgcagcagccacagaggcatcagcaatggcaaaggcggcaaccatgaccccagctgctatttcccagcaaaatcctccaaagaaccgagaggccacagtgaacggggaagagaatggagcacatgaaatcaataatcactcaaagccaatggaaatagatggggatgttgagattccacccaacaaagccacagtccttcggggccacgagtctgaggtgttcatttgtgcctggaaccctgtcagtgatttgctagcctctggatctggagactcaactgcaaggatatggaacctgaatgagaatagcaacgggggctccacccagctcgtgttgagacattgtatacgagaaggggggcacgacgtcccaagtaataaagatgtcacctcactggactggaacagtgatggaacactattggctatgggttcatatgatggtttcgcaagaatatggacagaaaatggtaacctggccagcaccttaggccaacataaaggccccatcttcgctctgaaatggaacaaaaaggggaattatgttttgagtgctggtgtagacaaaacaacaataatttgggatgctcacacaggagaagccaaacagcagtttccttttcattcagcccccgcccttgatgtggactggcagaacaacatgacctttgcctcctgtagcacagacatgtgtatccatgtgtgcaggctcggctgtgaccacccagtcaaaaccttccagggacacacaaacgaggtcaatgccatcaaatgggatccttctggaatgttgctggcgtcctgctcggatgacatgacattgaagatctggagtatgaagcaggatgcatgcgtccacgatcttcaggctcacagcaaagagatctacaccatcaagtggagccccaccgggcctgccaccagcaacccaaactccagcatcatgttggcaagtgcttcatttgattctacagtgcgactgtgggatgtggagcaaggtgtctgcacccacacactcatgaagcatcaagagcctgtctacagtgtagctttcagccccgatggaaagtacttggctagtggatcctttgacaagtatgttcatatctggaatactcagagtggaagtctcgtccacagctaccaaggcactggcggtatcttcgaggtgtgctggaacgcccgaggagataaagtgggcgccagcgcgtctgatggctctgtgtgtgttctggatctgtgaaagtaaacacaaaatatagaaaaaaagaaaagaattctaatgacctgccttgaatgcatggggttgcagctctgttcaaacacaattctatcagctccaaaatgtgtgaacttgacttgtgttagagtatattctgaaaccaacttgtcccaggccacaggagtgtatatgtttcataatctttatcaaga

SEQ ID NO: 192423 - DNA, 5871 bp, Homo sapiens
  Payload ID: 18001
  Gene Name: transducin (beta)-like 1X-linked
  Uniprot ID: O60907
  ENST ID: ENST00000217964
  CDS Start-End: 641-2374
gggccggcggcgggggcggacccctggcggtcctcctggctggggtccgcgcgctcgcggcagctccccgtggaggtcactgtccgtgccagtccctcccgctgtcccgccctctcccgctgccgccgccgccgccgccgcgcccgcctcagcgcccccactccgcgcttgggagcgaggagccgccagcgcccccgccccgccgccgccgcagcgccctcaggccgccattcgccaccgaaactttccagcgcccgcgctctctccgggactcggcggcggcggggcgggggcggcccgggggcggcgcgcggctgctccggggcgccgggccctcttcggccgccgcacggccgggactcggaggctgccggctggagggaggttcggagcgcggccgggcgcgcggcgccgccacaagttgcgctgctcgcgacgagatttccgtgagggtggaagaaaatcataccatatcagatgcctcgcagagcaccaggcccaccgtgaaaggctggtccctgcagacggcttcccatttttatgaccggatgctgggaagcctgctggtccacaggtccatacatgaagtcaccataaggagccctggcctccttgcagaaacatcgaggtgacatgtagcatgaccgagctcgctggcgcctcttcatcgtgctgccaccgccctgcaggaagaggggccatgcagtcagtcttgcaccactttcaacgtttgcgagggagagagggtggttcccacttcatcaacacctcatcgccgcgaggtgaggctaagatgagcataaccagtgacgaggtgaactttctggtgtatcggtatctccaggagtcaggtttttcccactcggctttcacgtttgggattgagagccacatcagccagtccaacatcaatgggacgctagtgccaccggccgccctcatctccattctccagaagggcctgcagtatgtagaggccgagatcagtatcaacgaggatggcacagtgttcgacggccgccccatagagtccctgtcactgatagacgccgtgatgcccgacgtggtgcagacgcggcagcaggcattccgagagaagctcgctcagcagcaagccagtgcggcggcggcggcggctgcggccacggcagcagcgacagcagccaccacgacctcagccggcgtttcccaccaaaatccatcgaagaacagagaggccacggtgaatggggaagagaacagagcacattcagtcaataatcacgcgaagccaatggaaatagatggagaggttgagattccatccagcaaagccacagtccttcggggccatgagtctgaggtgttcatttgtgcctggaatcctgtcagtgatttgctagcctccggatctggagactcaactgcaaggatatggaacctgaatgagaatagcaacgggggctccacccagctcgtgttgaggcactgtatacgagaggggggccatgacgtcccgagtaacaaagacgtcacctcactggactggaataccaatggaacactcttggctacgggttcatatgacggttttgcaagaatatggacggaagatggtaacctggccagcaccttaggccaacataaaggccccatctttgccttgaaatggaaccgaaaggggaattacattttgagtgctggtgtagacaaaacaacaataatttgggatgcccacacaggagaagccaaacagcagtttccttttcattcagcccctgcccttgatgtggactggcagaacaacacgacctttgcctcctgtagcacagacatgtgtatccatgtgtgcaggctcggctgtgaccgcccagtcaaaaccttccagggacacacaaacgaggtcaacgccatcaaatgggatccgtctggaatgttgctggcatcctgctcggatgacatgacattgaagatctggagcatgaaacaggaggtgtgcatccatgatcttcaggctcacaataaagagatctacaccatcaagtggagccccactgggcccgccaccagcaacccaaactccaacatcatgttggcaagtgcttcgtttgattctacggtgcgactgtgggacatagaacgaggcgtctgcacccacacgctcacgaagcatcaggagcctgtctatagcgtagctttcagccctgatgggaagtacttggccagtggatccttcgacaagtgcgtccatatctggaatactcagagtggaaatcttgtccacagctaccgaggcactggcggcatcttcgaggtgtgctggaacgcccgaggagacaaagtgggtgccagcgcgtccgacggctctgtgtgtgttttggatctgcggaagtaaccacaaaatattatcgaaaaaagaaaagaattctaatgaccagccgtgaatgtgtagggttgcagctctattctccaaaactgtaggaacttgacttgcgttagagtgtactctgaaaccaactcgtctctggccgcaggagtctatatgttttcgtaatcttcatcaagaagtttttaaaaggcaagcaaaaacagaagcaaatcatatcaaacggggatagaatggtttccactgaggacattcagcctgggaaggaggaagtcaccagctcgaggcgtgtggattggtttccacccggaacaggctctgtgatggctgaatggaaagaaacgtaaaaagctgtgccaaaaaaaaagcaaaatgctgtgataaaccaaacagggaagggggaaaaaccctcctccttgggattttttttttttgttttccctaacaatttggacactacaattgctctcacaaaggaggttcaaagaccagtttgtaccgatgaaacgcgcaactttgtaatcccaacactttctattttctagaatcttctttgttcattgggtggtttttcagtcggctggaattctatcttctgggggccttccgtctgagatggaagctgtcttgggcttgttgtctcttccttctgttgctccctgcccctccccctgcctttccactctgtctggtgagctctgctttttcagtgcaccatcaagagatgcagccccgtggacatgaagacacaatctcccacggacagctttcccccttccgccctctcccaccctctcctccccttgcgctcgcgctcgcgctcgctttctcactggcgtgctctctttctctctctctctccctctgtacctttctcatagttgcttcagatcttaggtctcaagggcactttggcgcgtagtaagtgctttatgtaagaaggcagggcaggggggctttttacaggagaaaaaaaaatgacttataagagaaagagcctggagtatttttggaaaaaaaaataatatttttatgttaaaacaattttaaaatcttaaaatggccatcagacatagagagctttgtgtgattcatgttttaaaaagaaccgaagaagccacaggcagggcctgagggagcccctggctttcccctcagcctcaggaaaggtggtcaggaaaactctggctggacaagggtcagtcttcggggtcagcagcgagattgctctgcagccagtgagggaggtccccgccatgccggctggaagaagaacctcgcatcttttggtgtgtatgcaccttggcagccagcaggaaagcagcgaagagccgcgcgccctctggcctcaagggagcattggcagaaccataaggtactgcagaagccgtcgaaaccgactgctcggctggattaggcgtgttggctacatctttcccacaaccgtataacgaccgatggtcatttctccaagagcaggcttggcgagtccttgcagagctgacatagaggcgcccgcatgtcacttagtctaacgctgacagaaatgaatgcagaaggaagattttcagtcctgaacgtgaattatagaggtagaacgtcgctaataatttctgccatctttataatttctttgtctcacagaagactaggagaaagatcttttttaaataatctttttgctgtttttaaaaaattaaacaaggctttgtgttcctagaagagcttcatttcagtgaatctggtgacctccatctgcttgctgtcataacccgacacggacttatttttgtcattagcaagggggaaaaggccaaaggacaagggcctcttctcccattggttttcctgtgggcagaagggctgaggaagatggcccagcccgtgggggctgctgggtcaccagcagtgggtagggtgcaatctggtgtgtgttccagcagtgagacggtgttattgtgaaggtggcattcatctgcggagccaaaacccagccatcggggaagggtcagggcttctgtggaacttggaacgtgccaggaccacctgcaaaagccagggtgcgttgatcattctcagatcattgattggcctccacttgggtatgtgaattattcatgtcccagaagaccaaaaagtgctctggttctgagatgagtattttattcgtgttctgtttccgaaacacttagcaaagaaggtcacagtgatgtggagtcgccgcacccatctttgaagatagccagtgtccctggatgaggtgatgatttcccgtcccaaggactctgtgaagtttagagtacagtttgttggggtccaaaagacaccatctctaccccacccaaataaaaatgcactcatctctgtagaacatctgctgtcaaaggccagcctgtcgttagggcatggcttatgcttgacaaaccagtaacaactgtgggatggcgatggtgggatgtgtcgcaagcaattcactagacaatcttcacatgaatgtcggtagccagggtctctcccgagggatggctttagtcttgatgaatgtgaaccatgtcggaattgttaggtagaaacctgggctgggaggcctcggaccccaggctccatccctggcttccccagcctgcggccgcaagcaaaaccaagcgcgagatgcagctagcacccttcatatccatccccgttctcagcgggacaacaccatggacagccgttttcagagcctccagcatttgcacaccactactcaccctctctgctgctggcatgttggtagagtcatccctgtaatcaagaaatggcctgtggaatgttattgttcaacgttgtttacagctcttaaaacatggtgaggaatgcctaagtcttagtgaccaaacgtgaccttgaaagcagacatagcatgacagaccttcctagagtgtttggtcgggttcacagtgaccgagagtcaggtccagcacacacctgggaaagggatgctgccccaagggggaccaaaagggccggacgttacagggtgaaaccctctgacccctcgcgacaccgtaggacttgacttttgtttagtctttctaagaaatagatcatggagccaagtgaagtgcactttgtcaaatgtaagggtctgctttgttcttgttgcttttctgttttttaaccttttgttccgccatttaaaaaaagaaaaaaaaaaagcttatgtttcttgtcaaatgcagaaatgttccttccgccactcactgaagttttgcattctggcttgtgcagtttttattgtctgtgtcagacgtacagccagacatgttctctattggcatttttccgattctgttcagatgacagcgaccgccttttcattccccccgccacctgtactcaccctcacgctctttgaagaaaaaaaaaaaaatcaccttgtgtgttgtagctcatttgtttcaagagagaatcaacagatcatattcagtgtcttgaataaattgctctattttgatattagagaa

SEQ ID NO: 192424 - DNA, 4674 bp, Homo sapiens
  Payload ID: 18001
  Gene Name: transducin (beta)-like 1X-linked
  Uniprot ID: O60907
  ENST ID: ENST00000380961
  CDS Start-End: 478-2058
gcccagggagcccaggagcaacgaagggcaggctcaagggaaggccccaccatgtccttctggggggccttgaatggcaactgatacataataagacacaatctattctgctgattcacaattatggagactgtatttccgtgagggtggaagaaaatcataccatatcagatgcctcgcagagcaccaggcccaccgtgaaagctcctggcaaccactattccactccctgcttctttgaatttcacaacttgaggtagcttgtgtaagtggaattattttaaaagctggttcatgttaaagtgcttagaacagagcttggtgagcatccggtcaacagctggtccctgcagacggcttcccatttttatgaccggatgctgggaagcctgctggtccacaggtccatacatgaagtcaccataagagggtggttcccacttcatcaacacctcatcgccgcgaggtgaggctaagatgagcataaccagtgacgaggtgaactttctggtgtatcggtatctccaggagtcaggtttttcccactcggctttcacgtttgggattgagagccacatcagccagtccaacatcaatgggacgctagtgccaccggccgccctcatctccattctccagaagggcctgcagtatgtagaggccgagatcagtatcaacgaggatggcacagtgttcgacggccgccccatagagtccctgtcactgatagacgccgtgatgcccgacgtggtgcagacgcggcagcaggcattccgagagaagctcgctcagcagcaagccagtgcggcggcggcggcggctgcggccacggcagcagcgacagcagccaccacgacctcagccggcgtttcccaccaaaatccatcgaagaacagagaggccacggtgaatggggaagagaacagagcacattcagtcaataatcacgcgaagccaatggaaatagatggagaggttgagattccatccagcaaagccacagtccttcggggccatgagtctgaggtgttcatttgtgcctggaatcctgtcagtgatttgctagcctccggatctggagactcaactgcaaggatatggaacctgaatgagaatagcaacgggggctccacccagctcgtgttgaggcactgtatacgagaggggggccatgacgtcccgagtaacaaagacgtcacctcactggactggaataccaatggaacactcttggctacgggttcatatgacggttttgcaagaatatggacggaagatggtaacctggccagcaccttaggccaacataaaggccccatctttgccttgaaatggaaccgaaaggggaattacattttgagtgctggtgtagacaaaacaacaataatttgggatgcccacacaggagaagccaaacagcagtttccttttcattcagcccctgcccttgatgtggactggcagaacaacacgacctttgcctcctgtagcacagacatgtgtatccatgtgtgcaggctcggctgtgaccgcccagtcaaaaccttccagggacacacaaacgaggtcaacgccatcaaatgggatccgtctggaatgttgctggcatcctgctcggatgacatgacattgaagatctggagcatgaaacaggaggtgtgcatccatgatcttcaggctcacaataaagagatctacaccatcaagtggagccccactgggcccgccaccagcaacccaaactccaacatcatgttggcaagtgcttcgtttgattctacggtgcgactgtgggacatagaacgaggcgtctgcacccacacgctcacgaagcatcaggagcctgtctatagcgtagctttcagccctgatgggaagtacttggccagtggatccttcgacaagtgcgtccatatctggaatactcagagtggaaatcttgtccacagctaccgaggcactggcggcatcttcgaggtgtgctggaacgcccgaggagacaaagtgggtgccagcgcgtccgacggctctgtgtgtgttttggatctgcggaagtaaccacaaaatattatcgaaaaaagaaaagaattctaatgaccagccgtgaatgtgtagggttgcagctctattctccaaaactgtaggaacttgacttgcgttagagtgtactctgaaaccaactcgtctctggccgcaggagtctatatgttttcgtaatcttcatcaagaagtttttaaaaggcaagcaaaaacagaagcaaatcatatcaaacggggatagaatggtttccactgaggacattcagcctgggaaggaggaagtcaccagctcgaggcgtgtggattggtttccacccggaacaggctctgtgatggctgaatggaaagaaacgtaaaaagctgtgccaaaaaaaaagcaaaatgctgtgataaaccaaacagggaagggggaaaaaccctcctccttgggattttttttttttgttttccctaacaatttggacactacaattgctctcacaaaggaggttcaaagaccagtttgtaccgatgaaacgcgcaactttgtaatcccaacactttctattttctagaatcttctttgttcattgggtggtttttcagtcggctggaattctatcttctgggggccttccgtctgagatggaagctgtcttgggcttgttgtctcttccttctgttgctccctgcccctccccctgcctttccactctgtctggtgagctctgctttttcagtgcaccatcaagagatgcagccccgtggacatgaagacacaatctcccacggacagctttcccccttccgccctctcccaccctctcctccccttgcgctcgcgctcgcgctcgctttctcactggcgtgctctctttctctctctctctccctctgtacctttctcatagttgcttcagatcttaggtctcaagggcactttggcgcgtagtaagtgctttatgtaagaaggcagggcaggggggctttttacaggagaaaaaaaaatgacttataagagaaagagcctggagtatttttggaaaaaaaaataatatttttatgttaaaacaattttaaaatcttaaaatggccatcagacatagagagctttgtgtgattcatgttttaaaaagaaccgaagaagccacaggcagggcctgagggagcccctggctttcccctcagcctcaggaaaggtggtcaggaaaactctggctggacaagggtcagtcttcggggtcagcagcgagattgctctgcagccagtgagggaggtccccgccatgccggctggaagaagaacctcgcatcttttggtgtgtatgcaccttggcagccagcaggaaagcagcgaagagccgcgcgccctctggcctcaagggagcattggcagaaccataaggtactgcagaagccgtcgaaaccgactgctcggctggattaggcgtgttggctacatctttcccacaaccgtataacgaccgatggtcatttctccaagagcaggcttggcgagtccttgcagagctgacatagaggcgcccgcatgtcacttagtctaacgctgacagaaatgaatgcagaaggaagattttcagtcctgaacgtgaattatagaggtagaacgtcgctaataatttctgccatctttataatttctttgtctcacagaagactaggagaaagatcttttttaaataatctttttgctgtttttaaaaaattaaacaaggctttgtgttcctagaagagcttcatttcagtgaatctggtgacctccatctgcttgctgtcataacccgacacggacttatttttgtcattagcaagggggaaaaggccaaaggacaagggcctcttctcccattggttttcctgtgggcagaagggctgaggaagatggcccagcccgtgggggctgctgggtcaccagcagtgggtagggtgcaatctggtgtgtgttccagcagtgagacggtgttattgtgaaggtggcattcatctgcggagccaaaacccagccatcggggaagggtcagggcttctgtggaacttggaacgtgccaggaccacctgcaaaagccagggtgcgttgatcattctcagatcattgattggcctccacttgggtatgtgaattattcatgtcccagaagaccaaaaagtgctctggttctgagatgagtattttattcgtgttctgtttccgaaacacttagcaaagaaggtcacagtgatgtggagtcgccgcacccatctttgaagatagccagtgtccctggatgaggtgatgatttcccgtcccaaggactctgtgaagtttagagtacagtttgttggggtccaaaagacaccatctctaccccacccaaataaaaatgcactcatctctgtagaacatctgctgtcaaaggccagcctgtcgttagggcatggcttatgcttgacaaaccagtaacaactgtgggatggcgatggtgggatgtgtcgcaagcaattcactagacaatcttcacatgaatgtcggtagccagggtctctcccgagggatggctttagtcttgatgaatgtgaaccatgtcggaattgttaggtagaaacctgggctgggaggcctcggaccccaggctccatccctggcttccccagcct

SEQ ID NO: 192425 - DNA, 5596 bp, Homo sapiens
  Payload ID: 18001
  Gene Name: transducin (beta)-like 1X-linked
  Uniprot ID: O60907
  ENST ID: ENST00000407597
  CDS Start-End: 369-2102
attgcatgtaatacctcagcatcagtctgcacaagcccagggagcccaggagcaacgaagggcaggctcaagggaaggccccaccatgtccttctggggggccttgaatggcaactgatacataataagacacaatctattctgctgattcacaattatggagactgtatttccgtgagggtggaagaaaatcataccatatcagatgcctcgcagagcaccaggcccaccgtgaaaggctggtccctgcagacggcttcccatttttatgaccggatgctgggaagcctgctggtccacaggtccatacatgaagtcaccataaggagccctggcctccttgcagaaacatcgaggtgacatgtagcatgaccgagctcgctggcgcctcttcatcgtgctgccaccgccctgcaggaagaggggccatgcagtcagtcttgcaccactttcaacgtttgcgagggagagagggtggttcccacttcatcaacacctcatcgccgcgaggtgaggctaagatgagcataaccagtgacgaggtgaactttctggtgtatcggtatctccaggagtcaggtttttcccactcggctttcacgtttgggattgagagccacatcagccagtccaacatcaatgggacgctagtgccaccggccgccctcatctccattctccagaagggcctgcagtatgtagaggccgagatcagtatcaacgaggatggcacagtgttcgacggccgccccatagagtccctgtcactgatagacgccgtgatgcccgacgtggtgcagacgcggcagcaggcattccgagagaagctcgctcagcagcaagccagtgcggcggcggcggcggctgcggccacggcagcagcgacagcagccaccacgacctcagccggcgtttcccaccaaaatccatcgaagaacagagaggccacggtgaatggggaagagaacagagcacattcagtcaataatcacgcgaagccaatggaaatagatggagaggttgagattccatccagcaaagccacagtccttcggggccatgagtctgaggtgttcatttgtgcctggaatcctgtcagtgatttgctagcctccggatctggagactcaactgcaaggatatggaacctgaatgagaatagcaacgggggctccacccagctcgtgttgaggcactgtatacgagaggggggccatgacgtcccgagtaacaaagacgtcacctcactggactggaataccaatggaacactcttggctacgggttcatatgacggttttgcaagaatatggacggaagatggtaacctggccagcaccttaggccaacataaaggccccatctttgccttgaaatggaaccgaaaggggaattacattttgagtgctggtgtagacaaaacaacaataatttgggatgcccacacaggagaagccaaacagcagtttccttttcattcagcccctgcccttgatgtggactggcagaacaacacgacctttgcctcctgtagcacagacatgtgtatccatgtgtgcaggctcggctgtgaccgcccagtcaaaaccttccagggacacacaaacgaggtcaacgccatcaaatgggatccgtctggaatgttgctggcatcctgctcggatgacatgacattgaagatctggagcatgaaacaggaggtgtgcatccatgatcttcaggctcacaataaagagatctacaccatcaagtggagccccactgggcccgccaccagcaacccaaactccaacatcatgttggcaagtgcttcgtttgattctacggtgcgactgtgggacatagaacgaggcgtctgcacccacacgctcacgaagcatcaggagcctgtctatagcgtagctttcagccctgatgggaagtacttggccagtggatccttcgacaagtgcgtccatatctggaatactcagagtggaaatcttgtccacagctaccgaggcactggcggcatcttcgaggtgtgctggaacgcccgaggagacaaagtgggtgccagcgcgtccgacggctctgtgtgtgttttggatctgcggaagtaaccacaaaatattatcgaaaaaagaaaagaattctaatgaccagccgtgaatgtgtagggttgcagctctattctccaaaactgtaggaacttgacttgcgttagagtgtactctgaaaccaactcgtctctggccgcaggagtctatatgttttcgtaatcttcatcaagaagtttttaaaaggcaagcaaaaacagaagcaaatcatatcaaacggggatagaatggtttccactgaggacattcagcctgggaaggaggaagtcaccagctcgaggcgtgtggattggtttccacccggaacaggctctgtgatggctgaatggaaagaaacgtaaaaagctgtgccaaaaaaaaagcaaaatgctgtgataaaccaaacagggaagggggaaaaaccctcctccttgggattttttttttttgttttccctaacaatttggacactacaattgctctcacaaaggaggttcaaagaccagtttgtaccgatgaaacgcgcaactttgtaatcccaacactttctattttctagaatcttctttgttcattgggtggtttttcagtcggctggaattctatcttctgggggccttccgtctgagatggaagctgtcttgggcttgttgtctcttccttctgttgctccctgcccctccccctgcctttccactctgtctggtgagctctgctttttcagtgcaccatcaagagatgcagccccgtggacatgaagacacaatctcccacggacagctttcccccttccgccctctcccaccctctcctccccttgcgctcgcgctcgcgctcgctttctcactggcgtgctctctttctctctctctctccctctgtacctttctcatagttgcttcagatcttaggtctcaagggcactttggcgcgtagtaagtgctttatgtaagaaggcagggcaggggggctttttacaggagaaaaaaaaatgacttataagagaaagagcctggagtatttttggaaaaaaaaataatatttttatgttaaaacaattttaaaatcttaaaatggccatcagacatagagagctttgtgtgattcatgttttaaaaagaaccgaagaagccacaggcagggcctgagggagcccctggctttcccctcagcctcaggaaaggtggtcaggaaaactctggctggacaagggtcagtcttcggggtcagcagcgagattgctctgcagccagtgagggaggtccccgccatgccggctggaagaagaacctcgcatcttttggtgtgtatgcaccttggcagccagcaggaaagcagcgaagagccgcgcgccctctggcctcaagggagcattggcagaaccataaggtactgcagaagccgtcgaaaccgactgctcggctggattaggcgtgttggctacatctttcccacaaccgtataacgaccgatggtcatttctccaagagcaggcttggcgagtccttgcagagctgacatagaggcgcccgcatgtcacttagtctaacgctgacagaaatgaatgcagaaggaagattttcagtcctgaacgtgaattatagaggtagaacgtcgctaataatttctgccatctttataatttctttgtctcacagaagactaggagaaagatcttttttaaataatctttttgctgtttttaaaaaattaaacaaggctttgtgttcctagaagagcttcatttcagtgaatctggtgacctccatctgcttgctgtcataacccgacacggacttatttttgtcattagcaagggggaaaaggccaaaggacaagggcctcttctcccattggttttcctgtgggcagaagggctgaggaagatggcccagcccgtgggggctgctgggtcaccagcagtgggtagggtgcaatctggtgtgtgttccagcagtgagacggtgttattgtgaaggtggcattcatctgcggagccaaaacccagccatcggggaagggtcagggcttctgtggaacttggaacgtgccaggaccacctgcaaaagccagggtgcgttgatcattctcagatcattgattggcctccacttgggtatgtgaattattcatgtcccagaagaccaaaaagtgctctggttctgagatgagtattttattcgtgttctgtttccgaaacacttagcaaagaaggtcacagtgatgtggagtcgccgcacccatctttgaagatagccagtgtccctggatgaggtgatgatttcccgtcccaaggactctgtgaagtttagagtacagtttgttggggtccaaaagacaccatctctaccccacccaaataaaaatgcactcatctctgtagaacatctgctgtcaaaggccagcctgtcgttagggcatggcttatgcttgacaaaccagtaacaactgtgggatggcgatggtgggatgtgtcgcaagcaattcactagacaatcttcacatgaatgtcggtagccagggtctctcccgagggatggctttagtcttgatgaatgtgaaccatgtcggaattgttaggtagaaacctgggctgggaggcctcggaccccaggctccatccctggcttccccagcctgcggccgcaagcaaaaccaagcgcgagatgcagctagcacccttcatatccatccccgttctcagcgggacaacaccatggacagccgttttcagagcctccagcatttgcacaccactactcaccctctctgctgctggcatgttggtagagtcatccctgtaatcaagaaatggcctgtggaatgttattgttcaacgttgtttacagctcttaaaacatggtgaggaatgcctaagtcttagtgaccaaacgtgaccttgaaagcagacatagcatgacagaccttcctagagtgtttggtcgggttcacagtgaccgagagtcaggtccagcacacacctgggaaagggatgctgccccaagggggaccaaaagggccggacgttacagggtgaaaccctctgacccctcgcgacaccgtaggacttgacttttgtttagtctttctaagaaatagatcatggagccaagtgaagtgcactttgtcaaatgtaagggtctgctttgttcttgttgcttttctgttttttaaccttttgttccgccatttaaaaaaagaaaaaaaaaaagcttatgtttcttgtcaaatgcagaaatgttccttccgccactcactgaagttttgcattctggcttgtgcagtttttattgtctgtgtcagacgtacagccagacatgttctctattggcatttttccgattctgttcagatgacagcgaccgccttttcattccccccgccacctgtactcaccctcacgctctttgaagaaaaaaaaaaaaatcaccttgtgtgttgtagctcatttgtttcaagagagaatcaacagatcatattcagtgtcttgaataaattgctctattttgatattaga

SEQ ID NO: 192426 - DNA, 5451 bp, Homo sapiens
  Payload ID: 18001
  Gene Name: transducin (beta)-like 1X-linked
  Uniprot ID: O60907
  ENST ID: ENST00000424279
  CDS Start-End: 377-1957
attgcatgtaatacctcagcatcagtctgcacaagcccagggagcccaggagcaacgaagggcaggctcaagggaaggccccaccatgtccttctggggggccttgaatggcaactgatacataataagacacaatctattctgctgattcacaattatggagactgtatttccgtgagggtggaagaaaatcataccatatcagatgcctcgcagagcaccaggcccaccgtgaaaggctggtccctgcagacggcttcccatttttatgaccggatgctgggaagcctgctggtccacaggtccatacatgaagtcaccataagagggtggttcccacttcatcaacacctcatcgccgcgaggtgaggctaagatgagcataaccagtgacgaggtgaactttctggtgtatcggtatctccaggagtcaggtttttcccactcggctttcacgtttgggattgagagccacatcagccagtccaacatcaatgggacgctagtgccaccggccgccctcatctccattctccagaagggcctgcagtatgtagaggccgagatcagtatcaacgaggatggcacagtgttcgacggccgccccatagagtccctgtcactgatagacgccgtgatgcccgacgtggtgcagacgcggcagcaggcattccgagagaagctcgctcagcagcaagccagtgcggcggcggcggcggctgcggccacggcagcagcgacagcagccaccacgacctcagccggcgtttcccaccaaaatccatcgaagaacagagaggccacggtgaatggggaagagaacagagcacattcagtcaataatcacgcgaagccaatggaaatagatggagaggttgagattccatccagcaaagccacagtccttcggggccatgagtctgaggtgttcatttgtgcctggaatcctgtcagtgatttgctagcctccggatctggagactcaactgcaaggatatggaacctgaatgagaatagcaacgggggctccacccagctcgtgttgaggcactgtatacgagaggggggccatgacgtcccgagtaacaaagacgtcacctcactggactggaataccaatggaacactcttggctacgggttcatatgacggttttgcaagaatatggacggaagatggtaacctggccagcaccttaggccaacataaaggccccatctttgccttgaaatggaaccgaaaggggaattacattttgagtgctggtgtagacaaaacaacaataatttgggatgcccacacaggagaagccaaacagcagtttccttttcattcagcccctgcccttgatgtggactggcagaacaacacgacctttgcctcctgtagcacagacatgtgtatccatgtgtgcaggctcggctgtgaccgcccagtcaaaaccttccagggacacacaaacgaggtcaacgccatcaaatgggatccgtctggaatgttgctggcatcctgctcggatgacatgacattgaagatctggagcatgaaacaggaggtgtgcatccatgatcttcaggctcacaataaagagatctacaccatcaagtggagccccactgggcccgccaccagcaacccaaactccaacatcatgttggcaagtgcttcgtttgattctacggtgcgactgtgggacatagaacgaggcgtctgcacccacacgctcacgaagcatcaggagcctgtctatagcgtagctttcagccctgatgggaagtacttggccagtggatccttcgacaagtgcgtccatatctggaatactcagagtggaaatcttgtccacagctaccgaggcactggcggcatcttcgaggtgtgctggaacgcccgaggagacaaagtgggtgccagcgcgtccgacggctctgtgtgtgttttggatctgcggaagtaaccacaaaatattatcgaaaaaagaaaagaattctaatgaccagccgtgaatgtgtagggttgcagctctattctccaaaactgtaggaacttgacttgcgttagagtgtactctgaaaccaactcgtctctggccgcaggagtctatatgttttcgtaatcttcatcaagaagtttttaaaaggcaagcaaaaacagaagcaaatcatatcaaacggggatagaatggtttccactgaggacattcagcctgggaaggaggaagtcaccagctcgaggcgtgtggattggtttccacccggaacaggctctgtgatggctgaatggaaagaaacgtaaaaagctgtgccaaaaaaaaagcaaaatgctgtgataaaccaaacagggaagggggaaaaaccctcctccttgggattttttttttttgttttccctaacaatttggacactacaattgctctcacaaaggaggttcaaagaccagtttgtaccgatgaaacgcgcaactttgtaatcccaacactttctattttctagaatcttctttgttcattgggtggtttttcagtcggctggaattctatcttctgggggccttccgtctgagatggaagctgtcttgggcttgttgtctcttccttctgttgctccctgcccctccccctgcctttccactctgtctggtgagctctgctttttcagtgcaccatcaagagatgcagccccgtggacatgaagacacaatctcccacggacagctttcccccttccgccctctcccaccctctcctccccttgcgctcgcgctcgcgctcgctttctcactggcgtgctctctttctctctctctctccctctgtacctttctcatagttgcttcagatcttaggtctcaagggcactttggcgcgtagtaagtgctttatgtaagaaggcagggcaggggggctttttacaggagaaaaaaaaatgacttataagagaaagagcctggagtatttttggaaaaaaaaataatatttttatgttaaaacaattttaaaatcttaaaatggccatcagacatagagagctttgtgtgattcatgttttaaaaagaaccgaagaagccacaggcagggcctgagggagcccctggctttcccctcagcctcaggaaaggtggtcaggaaaactctggctggacaagggtcagtcttcggggtcagcagcgagattgctctgcagccagtgagggaggtccccgccatgccggctggaagaagaacctcgcatcttttggtgtgtatgcaccttggcagccagcaggaaagcagcgaagagccgcgcgccctctggcctcaagggagcattggcagaaccataaggtactgcagaagccgtcgaaaccgactgctcggctggattaggcgtgttggctacatctttcccacaaccgtataacgaccgatggtcatttctccaagagcaggcttggcgagtccttgcagagctgacatagaggcgcccgcatgtcacttagtctaacgctgacagaaatgaatgcagaaggaagattttcagtcctgaacgtgaattatagaggtagaacgtcgctaataatttctgccatctttataatttctttgtctcacagaagactaggagaaagatcttttttaaataatctttttgctgtttttaaaaaattaaacaaggctttgtgttcctagaagagcttcatttcagtgaatctggtgacctccatctgcttgctgtcataacccgacacggacttatttttgtcattagcaagggggaaaaggccaaaggacaagggcctcttctcccattggttttcctgtgggcagaagggctgaggaagatggcccagcccgtgggggctgctgggtcaccagcagtgggtagggtgcaatctggtgtgtgttccagcagtgagacggtgttattgtgaaggtggcattcatctgcggagccaaaacccagccatcggggaagggtcagggcttctgtggaacttggaacgtgccaggaccacctgcaaaagccagggtgcgttgatcattctcagatcattgattggcctccacttgggtatgtgaattattcatgtcccagaagaccaaaaagtgctctggttctgagatgagtattttattcgtgttctgtttccgaaacacttagcaaagaaggtcacagtgatgtggagtcgccgcacccatctttgaagatagccagtgtccctggatgaggtgatgatttcccgtcccaaggactctgtgaagtttagagtacagtttgttggggtccaaaagacaccatctctaccccacccaaataaaaatgcactcatctctgtagaacatctgctgtcaaaggccagcctgtcgttagggcatggcttatgcttgacaaaccagtaacaactgtgggatggcgatggtgggatgtgtcgcaagcaattcactagacaatcttcacatgaatgtcggtagccagggtctctcccgagggatggctttagtcttgatgaatgtgaaccatgtcggaattgttaggtagaaacctgggctgggaggcctcggaccccaggctccatccctggcttccccagcctgcggccgcaagcaaaaccaagcgcgagatgcagctagcacccttcatatccatccccgttctcagcgggacaacaccatggacagccgttttcagagcctccagcatttgcacaccactactcaccctctctgctgctggcatgttggtagagtcatccctgtaatcaagaaatggcctgtggaatgttattgttcaacgttgtttacagctcttaaaacatggtgaggaatgcctaagtcttagtgaccaaacgtgaccttgaaagcagacatagcatgacagaccttcctagagtgtttggtcgggttcacagtgaccgagagtcaggtccagcacacacctgggaaagggatgctgccccaagggggaccaaaagggccggacgttacagggtgaaaccctctgacccctcgcgacaccgtaggacttgacttttgtttagtctttctaagaaatagatcatggagccaagtgaagtgcactttgtcaaatgtaagggtctgctttgttcttgttgcttttctgttttttaaccttttgttccgccatttaaaaaaagaaaaaaaaaaagcttatgtttcttgtcaaatgcagaaatgttccttccgccactcactgaagttttgcattctggcttgtgcagtttttattgtctgtgtcagacgtacagccagacatgttctctattggcatttttccgattctgttcagatgacagcgaccgccttttcattccccccgccacctgtactcaccctcacgctctttgaagaaaaaaaaaaaaatcaccttgtgtgttgtagctcatttgtttcaagagagaatcaacagatcatattcagtgtcttgaataaattgctctattttgatattaga

SEQ ID NO: 192427 - DNA, 387 bp, Homo sapiens
  Payload ID: 18001
  Gene Name: transducin (beta)-like 1X-linked
  ENST ID: ENST00000452824
  CDS Start-End: 149-387
caacttgaggtagcttgtgctggtccctgcagacggcttcccatttttatgaccggatgctgggaagcctgctggtccacaggtccatacatgaagtcaccataaggagccctggcctccttgcagaaacatcgaggtgacatgtagcatgaccgagctcgctggcgcctcttcatcgtgctgccaccgccctgcaggaagaggggccatgcagtcagtcttgcaccactttcaacgtttgcgagggagagagggtggttcccacttcatcaacacctcatcgccgcgaggtgaggctaagatgagcataaccagtgacgaggtgaactttctggtgtatcggtatctccaggagtcaggtttttcccactcggctttcacgtttgg

SEQ ID NO: 192428 - DNA, 520 bp, Homo sapiens
  Payload ID: 18001
  Gene Name: transducin (beta)-like 1X-linked
  ENST ID: ENST00000441088
  CDS Start-End: 344-520
tctgcacaagcccagggagcccaggagcaacgaagggcaggctcaagggaaggccccaccatgtccttctggggggccttgaatggcaactgatacataataagacacaatctattctgctgattcacaattatggagactgtatttccgtgagggtggaagaaaatcataccatatcagatgcctcgcagagcaccaggcccaccgtgaaaggctggtccctgcagacggcttcccatttttatgaccggatgctgggaagcctgctggtccacaggtccatacatgaagtcaccataaggagccctggcctccttgcagaaacatcgaggtgacatgtagcatgaccgagctcgctggcgcctcttcatcgtgctgccaccgccctgcaggaagaggggccatgcagtcagtcttgcaccactttcaacgtttgcgagggagagagggtggttcccacttcatcaacacctcatcgccgcgaggtgaggctaagatgagcataaccagtgacgaggtg

SEQ ID NO: 192429 - DNA, 565 bp, Homo sapiens
  Payload ID: 18001
  Gene Name: transducin (beta)-like 1X-linked
  ENST ID: ENST00000415293
  CDS Start-End: 341-565
ccagggagcccaggagcaacgaagggcaggctcaagggaaggccccaccatgtccttctggggggccttgaatggcaactgatacataataagacacaatctattctgctgattcacaattatggagactgtatttccgtgagggtggaagaaaatcataccatatcagatgcctcgcagagcaccaggcccaccgtgaaaggctggtccctgcagacggcttcccatttttatgaccggatgctgggaagcctgctggtccacaggtccatacatgaagtcaccataagagggtggttcccacttcatcaacacctcatcgccgcgaggtgaggctaagatgagcataaccagtgacgaggtgaactttctggtgtatcggtatctccaggagtcaggtttttcccactcggctttcacgtttgggattgagagccacatcagccagtccaacatcaatgggacgctagtgccaccggccgccctcatctccattctccagaagggcctgcagtatgtagaggccgagatcagtatcaacgaggatggcacagtgttcgacggc

SEQ ID NO: 192430 - DNA, 496 bp, Homo sapiens
  Payload ID: 18001
  Gene Name: transducin (beta)-like 1X-linked
  ENST ID: ENST00000422314
  CDS Start-End: 363-496
gcgggggcggcccgggggcggcgcgcggctgctccggggcgccgggccctcttcggccgccgcacggccgggactcggaggctgccggctggagggaggttcggagcgcggccgggcgcgcggcgccgccacaagttgcgctgctcgcgacgagatttccgtgagggtggaagaaaatcataccatatcagatgcctcgcagagcaccaggcccaccgtgaaaggctggtccctgcagacggcttcccatttttatgaccggatgctgggaagcctgctggtccacaggtccatacatgaagtcaccataagagggtggttcccacttcatcaacacctcatcgccgcgaggtgaggctaagatgagcataaccagtgacgaggtgaactttctggtgtatcggtatctccaggagtcaggtttttcccactcggctttcacgtttgggattgagagccacatcagccagtccaacatcaatgggacgctagtgcc

SEQ ID NO: 192431 - DNA, 3161 bp, Homo sapiens
  Payload ID: 18002
  Gene Name: transducin (beta)-like 2
  Uniprot ID: Q9Y4P3
  ENST ID: ENST00000305632
  CDS Start-End: 243-1586
ccaggccccgcccctcgagcgccacaacagccgggccccaccccttgaggtgctttaacggccaggccccgccctgaaggcgttgtaacaaccaggctccgcccccaggcgctctaacggccaggcccagccgcttgaggctccccaacggccaggccgcgcccccgcgtgcgtgcgcggcccggcagagccgtgcgggcgcccgcgtactcactagctgaggtggcagtggttccaccaacatggagctctcgcagatgtcggagctcatggggctgtcggtgttgcttgggctgctggccctgatggcgacggcggcggtagcgcgggggtggctgcgcgcgggggaggagaggagcggccggcccgcctgccaaaaagcaaatggatttccacctgacaaatcttcgggatccaagaagcagaaacaatatcagcggattcggaaggagaagcctcaacaacacaacttcacccaccgcctcctggctgcagctctgaagagccacagcgggaacatatcttgcatggactttagcagcaatggcaaatacctggctacctgtgcagatgatcgcaccatccgcatctggagcaccaaggacttcctgcagcgagagcaccgcagcatgagagccaacgtggagctggaccacgccaccctggtgcgcttcagccctgactgcagagccttcatcgtctggctggccaacggggacaccctccgtgtcttcaagatgaccaagcgggaggatgggggctacaccttcacagccaccccagaggacttccctaaaaagcacaaggcgcctgtcatcgacattggcattgctaacacagggaagtttatcatgactgcctccagtgacaccactgtcctcatctggagcctgaagggtcaagtgctgtctaccatcaacaccaaccagatgaacaacacacacgctgctgtatctccctgtggcagatttgtagcctcgtgtggcttcaccccagatgtgaaggtttgggaagtctgctttggaaagaagggggagttccaggaggtggtgcgagccttcgaactaaagggccactccgcggctgtgcactcgtttgctttctccaacgactcacggaggatggcttctgtctccaaggatggtacatggaaactgtgggacacagatgtggaatacaagaagaagcaggacccctacttgctgaagacaggccgctttgaagaggcggcgggtgccgcgccgtgccgcctggccctctcccccaacgcccaggtcttggccttggccagtggcagtagtattcatctctacaatacccggcggggcgagaaggaggagtgctttgagcgggtccatggcgagtgtatcgccaacttgtcctttgacatcactggccgctttctggcctcctgtggggaccgggcggtgcggctgtttcacaacactcctggccaccgagccatggtggaggagatgcagggccacctgaagcgggcctccaacgagagcacccgccagaggctgcagcagcagctgacccaggcccaagagaccctgaagagcctgggtgccctgaagaagtgactctgggagggcccggcgcagaggattgaggaggagggatctggcctcctcatggcactgctgccatctttcctcccaggtggaagcctttcagaaggagtctcctggttttcttactggtggccctgcttcttcccattgaaactactcttgtctacttaggtctctctcttcttgctggctgtgactcctccctgactagtggccaaggtgcttttcttcctcccaggcccagtgggtggaatctgtccccacctggcactgaggagaatggtagagaggagaggagagagagagagaatgtgatttttggccttgtggcagcacatcctcacacccaaagaagtttgtaaatgttccagaacaacctagagaacacctgagtactaagcagcagttttgcaaggatgggagactgggatagcttcccatcacagaactgtgttccatcaaaaagacactaagggatttccttctgggcctcagttctatttgtaagatggagaataatcctctctgtgaactccttgcaaagatgatatgaggctaagagaatatcaagtccccaggtctggaagaaaagtagaaaagagtagtactattgtccaatgtcatgaaagtggtaaaagtgggaaccagtgtgctttgaaaccaaattagaaacacattccttgggaaggcaaagttttctgggacttgatcatacattttatatggttgggacttctctcttcgggagatgatatcttgtttaaggagacctcttttcagttcatcaagttcatcagatatttgagtgcccactctgtgcccaaataaatatgagctggggattaaatacgaataagacatggtttctgccatcaaagatggctggtgggagagagagatacacccttattaagtgctttgtgttagtttattcatagctattgttatatatgtcaaggcaagagaggaccagagcaggacagaggcaatgggtattgaagttgaaggggtacatttgataagagagtcggtattgagaagtttaaatttgtgaatttgaaggctgcgtgggtgtggcaggtaagggaaatgaggtatctgggaaggcttgagtgtaggcaaatttattcatcccaagtcaaactcttgatctctctcacgaaaactatgaccccccctggttgcccctgacctctcaatgttggaacaagccacaaccgtggagttatccttgatgactccccattcattatcccttctgtcccaccaccacagctgtcatctgttcaccagaacgttcttttggttacactccatgtgacatcctgaggctgttgcttctctccagcttttctgttaccatcctggtcctggctactgtcacctagtgggccactataatatggcttcctaatggatcttcctgcttcctctgttgcctcattacttttctatatagcagaatgatcttttgaaaatgtgaaccagatcacattattccctagttaaaaccccccaaggcttcccatcacacttggaataaaatccaaaagaatttttctaaaccaaaaatagtaaaaacaa

SEQ ID NO: 192432 - DNA, 2276 bp, Homo sapiens
  Payload ID: 18002
  Gene Name: transducin (beta)-like 2
  ENST ID: ENST00000424598
  CDS Start-End: 28-168
agctgaggtggcagtggttccaccaacatggagctctcgcagatgtcggagctcatggggctgtcggtgttgcttgggctgctggccctgatggcgacggcggcggtagcgcgggggtggctgcgcgcgggggaggagaggagcggccggcccgcctgtgggcagtaaatgcttatcagtgagtaactggagaacaacatggcccttccttataggccaaaaagcaaatggatttccacctgacaaatcttcgggatccaagaagcagaaacaatatcagcggattcggaaggagaagcctcaacaacacaacttcacccaccgcctcctggctgcagctctgaagagccacagcgggaacatatcttgcatggactttagcagcaatggcaaatacctggctacctgtgcagatgatcgcaccatccgcatctggagcaccaaggacttcctgcagcgagagcaccgcagcatgagagccaacgtggagctggaccacgccaccctggtgcgcttcagccctgactgcagagccttcatcgtctggctggccaacggggacaccctccgtgtcttcaagatgaccaagcgggaggatgggggctacaccttcacagccaccccagaggacttccctaaaaagcacaaggcgcctgtcatcgacattggcattgctaacacagggaagtttatcatgactgcctccagtgacaccactgtcctcatctggagcctgaagggtcaagtgctgtctaccatcaacaccaaccagatgaacaacacacacgctgctgtatctccctgtggcagatttgtagcctcgtgtggcttcaccccagatgtgaaggtttgggaagtctgctttggaaagaagggggagttccaggaggtggtgcgagccttcgaactaaagggccactccgcggctgtgcactcgtttgctttctccaacgactcacggaggatggcttctgtctccaaggatggtacatggaaactgtgggacacagatgtggaatacaagaagaagcaggacccctacttgctgaagacaggccgctttgaagaggcggcgggtgccgcgccgtgccgcctggccctctcccccaacgcccaggtcttggccttggccagtggcagtagtattcatctctacaatacccggcggggcgagaaggaggagtgctttgagcgggtccatggcgagtgtatcgccaacttgtcctttgacatcactggccgctttctggcctcctgtggggaccgggcggtgcggctgtttcacaacactcctggccaccgagccatggtggaggagatgcagggccacctgaagcgggcctccaacgagagcacccgccagaggctgcagcagcagctgacccaggcccaagagaccctgaagagcctgggtgccctgaagaagtgactctgggagggcccggcgcagaggattgaggaggagggatctggcctcctcatggcactgctgccatctttcctcccaggtggaagcctttcagaaggagtctcctggttttcttactggtggccctgcttcttcccattgaaactactcttgtctacttaggtctctctcttcttgctggctgtgactcctccctgactagtggccaaggtgcttttcttcctcccaggcccagtgggtggaatctgtccccacctggcactgaggagaatggtagagaggagaggagagagagagagaatgtgatttttggccttgtggcagcacatcctcacacccaaagaagtttgtaaatgttccagaacaacctagagaacacctgagtactaagcagcagttttgcaaggatgggagactgggatagcttcccatcacagaactgtgttccatcaaaaagacactaagggatttccttctgggcctcagttctatttgtaagatggagaataatcctctctgtgaactccttgcaaagatgatatgaggctaagagaatatcaagtccccaggtctggaagaaaagtagaaaagagtagtactattgtccaatgtcatgaaagtggtaaaagtgggaaccagtgtgctttgaaaccaaattagaaacacattccttgggaaggcaaagttttctgggacttgatcatacattttatatggttgggacttctctcttcgggagatgatatcttgtttaaggagacctcttttcagttcatcaagttcatcagatatttgagtgcccactctgtgcccaaataaatatgagctggggattaaatacgaataa

SEQ ID NO: 192433 - DNA, 834 bp, Homo sapiens
  Payload ID: 18002
  Gene Name: transducin (beta)-like 2
  ENST ID: ENST00000437521
  CDS Start-End: 61-180
cggcctcctcgtggtccgacctgcggtttgggcccgcggctggtggggcccggcgactccatgggcctcagtttctcctctgggcccaggagcttttttcctgttggaattggggagcatctgcagtcatttaccacatgccagctttgtgactcaattaagtatcttttacaaaagtgactggctccactcccccgcacaggactcaacagatgttgacttctcatccccgagttctttcaggccaaaaagcaaatggatttccacctgacaaatcttcgggatccaagaagcagaaacaatatcagcggattcggaaggagaagcctcaacaacacaacttcacccaccgcctcctggctgcagctctgaagagccacagcgggaacatatcttgcatggactttagcagcaatggcaaatacctggctacctgtgcagatgatcgcaccatccgcatctggagcaccaaggacttcctgcagcgagagcaccgcagcatgagagccaacgtggagctggaccacgccaccctggtgcgcttcagccctgactgcagagccttcatcgtctggctggccaacggggacaccctccgtgtcttcaagatgaccaagcgggaggatgggggctacaccttcacagccaccccagaggacttccctaaaaagcacaaggcgcctgtcatcgacattggcattgctaacacagggaagtttatcatgactgcctccagtgacaccactgtcctcatctggagcctgaagggtcaagtgctgtctaccatcaacaccaaccagatgaacaacacacacgctgctgtatctccctgtg

SEQ ID NO: 192434 - DNA, 1423 bp, Homo sapiens
  Payload ID: 18002
  Gene Name: transducin (beta)-like 2
  ENST ID: ENST00000433464
  CDS Start-End: 51-374
gtgcgggcgcccgcgtactcactagctgaggtggcagtggttccaccaacatggagctctcgcagatgtcggagctcatggggctgtcggtgttgcttgggctgctggccctgatggcgacggcggcggtagcgcgggggtggctgcgcgcgggggaggagaggagcggccggcccgcctgccaaaaagcaaatggatttccacctgacaaatcttcgggatccaagaagcagaaacaatatcagcggattcggaaggagaagcctcaacaacacaacttcacccaccgcctcctggctgcagctctgaagatgatcgcaccatccgcatctggagcaccaaggacttcctgcagcgagagcaccgcagcatgagagccaacgtggagctggaccacgccaccctggtgcgcttcagccctgactgcagagccttcatcgtctggctggccaacggggacaccctccgtgtcttcaagatgaccaagcgggaggatgggggctacaccttcacagccaccccagaggacttccctaaaaagcacaaggcgcctgtcatcgacattggcattgctaacacagggaagtttatcatgactgcctccagtgacaccactgtcctcatctggagcctgaagggtcaagtgctgtctaccatcaacaccaaccagatgaacaacacacacgctgctgtatctccctgtggcagatttgtagcctcgtgtggcttcaccccagatgtgaaggtttgggaagtctgctttggaaagaagggggagttccaggaggtggtgcgagccttcgaactaaagggccactccgcggctgtgcactcgtttgctttctccaacgactcacggaggatggcttctgtctccaaggatggtacatggaaactgtgggacacagatgtggaatacaagaagaagcaggacccctacttgctgaagacaggccgctttgaagaggcggcgggtgccgcgccgtgccgcctggccctctcccccaacgcccaggtcttggccttggccagtggcagtagtattcatctctacaatacccggcggggcgagaaggaggagtgctttgagcgggtccatggcgagtgtatcgccaacttgtcctttgacatcactggccgctttctggcctcctgtggggaccgggcggtgcggctgtttcacaacactcctggccaccgagccatggtggaggagatgcagggccacctgaagcgggcctccaacgagagcacccgccagaggctgcagcagcagctgacccaggcccaagagaccctgaagagcctgggtgccctgaagaagtgactctgggagggcccggcgcagaggattgaggaggagggatctggcctcctcatggcactgctgccatctttcctcccaggtggaagcctttcagaa

SEQ ID NO: 192435 - DNA, 673 bp, Homo sapiens
  Payload ID: 18002
  Gene Name: transducin (beta)-like 2
  ENST ID: ENST00000458466
  CDS Start-End: 51-182
gtgcgggcgcccgcgtactcactagctgaggtggcagtggttccaccaacatggagctctcgcagatgtcggagctcatggggctgtcggtgttgcttgggctgctggccctgatggcgacggcggcggtagcgcgggggtggctgcgcgcgggggaggagaggagcggccggcccgcctagacggggacccgccttgccgggttaggcgcacctcctggggcgggactggctccaacctgggccccttactgcggctttctctgtggccgaggccaggccgtccccggggtggccaggagagcaccgtaaactcttcagcctgctccgtggccgcgatctcggaaaaagcaccaattctgtgatgtgcagcagcatttactgggcatctatgaccctgtgataggctttggggtctttttctgtaaggagtccagtaaaggagaagtacatctgtattatgaacacctaaatatggcccaggagcttttttcctgttggaattggggagcatctgcagtcatttaccacatgccagctttgtgactcaattaagtatcttttacaaaagtgactggctccactcccccgcacaggactcaacagatgttgacttctcatccccgagttctttcaggccaaaaagcaaatggatttccacctgacaaatcttc

SEQ ID NO: 192436 - DNA, 1717 bp, Homo sapiens
  Payload ID: 18002
  Gene Name: transducin (beta)-like 2
  ENST ID: ENST00000417008
  CDS Start-End: 6-137
ccaacatggagctctcgcagatgtcggagctcatggggctgtcggtgttgcttgggctgctggccctgatggcgacggcggcggtagcgcgggggtggctgcgcgcgggggaggagaggagcggccggcccgcctagccacagcgggaacatatcttgcatggactttagcagcaatggcaaatacctggctacctgtgcagatgatcgcaccatccgcatctggagcaccaaggacttcctgcagcgagagcaccgcagcatgagagccaacgtggagctggaccacgccaccctggtgcgcttcagccctgactgcagagccttcatcgtctggctggccaacggggacaccctccgtgtcttcaagatgaccaagcgggaggatgggggctacaccttcacagccaccccagaggacttccctaaaaagcacaaggcgcctgtcatcgacattggcattgctaacacagggaagtttatcatgactgcctccagtgacaccactgtcctcatctggagcctgaagggtcaagtgctgtctaccatcaacaccaaccagatgaacaacacacacgctgctgtatctccctgtggcagatttgtagcctcgtgtggcttcaccccagatgtgaaggtttgggaagtctgctttggaaagaagggggagttccaggaggtggtgcgagccttcgaactaaagggccactccgcggctgtgcactcgtttgctttctccaacgactcacggaggatggcttctgtctccaaggatggtacatggaaactgtgggacacagatgtggaatacaagaagaagcaggacccctacttgctgaagacaggccgctttgaagaggcggcgggtgccgcgccgtgccgcctggccctctcccccaacgcccaggtcttggccttggccagtggcagtagtattcatctctacaatacccggcggggcgagaaggaggagtgctttgagcgggtccatggcgagtgtatcgccaacttgtcctttgacatcactggccgctttctggcctcctgtggggaccgggcggtgcggctgtttcacaacactcctggccaccgagccatggtggaggagatgcagggccacctgaagcgggcctccaacgagagcacccgccagaggctgcagcagcagctgacccaggcccaagagaccctgaagagcctgggtgccctgaagaagtgactctgggagggcccggcgcagaggattgaggaggagggatctggcctcctcatggcactgctgccatctttcctcccaggtggaagcctttcagaaggagtctcctggttttcttactggtggccctgcttcttcccattgaaactactcttgtctacttaggtctctctcttcttgctggctgtgactcctccctgactagtggccaaggtgcttttcttcctcccaggcccagtgggtggaatctgtccccacctggcactgaggagaatggtagagaggagaggagagagagagagaatgtgatttttggccttgtggcagcacatcctcacacccaaagaagtttgtaaatgttccagaacaacctagagaacacctgagtactaagcagcagttttgcaaggatgggagactgggatagcttcccatcacagaactgtgttccatcaaaaagacactaagggatttccttctgggcctcagttctatttgtaag

SEQ ID NO: 192437 - DNA, 1109 bp, Homo sapiens
  Payload ID: 18002
  Gene Name: transducin (beta)-like 2
  ENST ID: ENST00000435792
  CDS Start-End: 128-292
aacggccaggcccagccgcttgaggctccccaacggccaggccgcgcccccgcgtgcgtgcgcggcccggcagagccgtgcgggcgcccgcgtactcactagctgaggtggcagtggttccaccaacatggagctctcgcagatgtcggagctcatggggctgtcggtgttgcttgggctgctggccctgatggcgacggcggcggtagcgcgggggtggctgcgcgcgggggaggagaggagcggccggcccgcctggtcttgctctgtcactcaggatggaatgcagtagtgttgtgatcatagcttactgcagcctcgaactcctgggctcaaatgatccaaagcattgggattacaggcatgagccaccatacccagccagccaaagcctctgtttttgcccatatcacactcattctcctccagaagacaagggccatatctggttaatctcctgctgttccactcaatgcctggctcatcataggtgggcagtaaatgcttatcagtgagtaactggagaacaacatggcccttccttataggccaaaaagcaaatggatttccacctgacaaatcttcgggatccaagaagcagaaacaatatcagcggattcggaaggagaagcctcaacaacacaacttcacccaccgcctcctggctgcagctctgaagagccacagcgggaacatatcttgcatggactttagcagcaatggcaaatacctggctacctgtgcagatgatcgcaccatccgcatctggagcaccaaggacttcctgcagcgagagcaccgcagcatgagagccaacgtggagctggaccacgccaccctggtgcgcttcagccctgactgcagagccttcatcgtctggctggccaacggggacaccctccgtgtcttcaagatgaccaagcgggaggatgggggctacaccttcacagccaccccagaggacttccctaaaaagcacaaggcgcctgtcatcgacattggcattgctaacacagggaagtttatcatgactgcctccagtgacaccactgtcctcatctggagcctgaagggtcaagtgctgtctaccatcaacaccaaccagatga

SEQ ID NO: 192438 - DNA, 2209 bp, Homo sapiens
  Payload ID: 18002
  Gene Name: transducin (beta)-like 2
  ENST ID: ENST00000450285
  CDS Start-End: 42-572
cccgcgtactcactagctgaggtggcagtggttccaccaacatggagctctcgcagatgtcggagctcatggggctgtcggtgttgcttgggctgctggccctgatggcgacggcggcggtagcgcgggggtggctgcgcgcgggggaggagaggagcggccggcccgcctgccaaaaagcaaatggatttccacctgacaaatcttcgggatccaagaagcagaaacaatatcagcggattcggaaggagaagcctcaacaacacaacttcacccaccgcctcctggctgcagctctgaagagccacagcgggaacatatcttgcatggactttagcagcaatggcaaatacctggctacctgtgcagatgatcgcaccatccgcatctggagcaccaaggacttcctgcagcgagagcaccgcagcatgagagccaacgtggagctggaccacgccaccctgagccttcatcgtctggctggccaacggggacaccctccgtgtcttcaagatgaccaagcgggaggatgggggctacaccttcacagccaccccagaggacttccctaaaaagcacaaggcgcctgtcatcgacattggcattgctaacacagggaagtttatcatgactgcctccagtgacaccactgtcctcatctggagcctgaagggtcaagtgctgtctaccatcaacaccaaccagatgaacaacacacacgctgctgtatctccctgtggcagatttgtagcctcgtgtggcttcaccccagatgtgaaggtttgggaagtctgctttggaaagaagggggagttccaggaggtggtgcgagccttcgaactaaagggccactccgcggctgtgcactcgtttgctttctccaacgactcacggaggatggcttctgtctccaaggatggtacatggaaactgtgggacacagatgtggaatacaagaagaagcaggacccctacttgctgaagacaggccgctttgaagaggcggcgggtgccgcgccgtgccgcctggccctctcccccaacgcccaggtcttggccttggccagtggcagtagtattcatctctacaatacccggcggggcgagaaggaggagtgctttgagcgggtccatggcgagtgtatcgccaacttgtcctttgacatcactggccgctttctggcctcctgtggggaccgggcggtgcggctgtttcacaacactcctggccaccgagccatggtggaggagatgcagggccacctgaagcgggcctccaacgagagcacccgccagaggctgcagcagcagctgacccaggcccaagagaccctgaagagcctgggtgccctgaagaagtgactctgggagggcccggcgcagaggattgaggaggagggatctggcctcctcatggcactgctgccatctttcctcccaggtggaagcctttcagaaggagtctcctggttttcttactggtggccctgcttcttcccattgaaactactcttgtctacttaggtctctctcttcttgctggctgtgactcctccctgactagtggccaaggtgcttttcttcctcccaggcccagtgggtggaatctgtccccacctggcactgaggagaatggtagagaggagaggagagagagagagaatgtgatttttggccttgtggcagcacatcctcacacccaaagaagtttgtaaatgttccagaacaacctagagaacacctgagtactaagcagcagttttgcaaggatgggagactgggatagcttcccatcacagaactgtgttccatcaaaaagacactaagggatttccttctgggcctcagttctatttgtaagatggagaataatcctctctgtgaactccttgcaaagatgatatgaggctaagagaatatcaagtccccaggtctggaagaaaagtagaaaagagtagtactattgtccaatgtcatgaaagtggtaaaagtgggaaccagtgtgctttgaaaccaaattagaaacacattccttgggaaggcaaagttttctgggacttgatcatacattttatatggttgggacttctctcttcgggagatgatatcttgtttaaggagacctcttttcagttcatcaagttcatcagatatttgagtgcccactctgtgcccaaataaatatgagctggggattaaatacgaataa

SEQ ID NO: 192439 - DNA, 1196 bp, Homo sapiens
  Payload ID: 18002
  Gene Name: transducin (beta)-like 2
  ENST ID: ENST00000426966
  CDS Start-End: 71-298
gtgcgcggcccggcagagccgtgcgggcgcccgcgtactcactagctgaggtggcagtggttccaccaacatggagctctcgcagatgtcggagctcatggggctgtcggtgttgcttgggctgctggccctgatggcgacggcggcggtagcgcgggggtggctgcgcgcgggggaggagaggagcggccggcccgcctggcccaggagcttttttcctgttggaattggggagcatctgcagtcatttaccacatgccagctttgtgactcaattaagtatcttttacaaaagtgactggctccactcccccgcacaggactcaacagatgttgacttctcatccccgagttctttcaggccaaaaagcaaatggatttccacctgacaaatcttcgggatccaagaagcagaaacaatatcagcggattcggaaggagaagcctcaacaacacaacttcacccaccgcctcctggctgcagctctgaagagccacagcgggaacatatcttgcatggactttagcagcaatggcaaatacctggctacctgtgcagatgatcgcaccatccgcatctggagcaccaaggacttcctgcagcgagagcaccgcagcatgagagccaacgtggagctggaccacgccaccctggtgcgcttcagccctgactgcagagccttcatcgtctggctggccaacggggacaccctccgtgtcttcaagatgaccaagcgggaggatgggggctacaccttcacagccaccccagaggacttccctaaaaagcacaaggcgcctgtcatcgacattggcattgctaacacagggaagtttatcatgactgcctccagtgacaccactgtcctcatctggagcctgaagggtcaagtgctgtctaccatcaacaccaaccagatgaacaacacacacgctgctgtatctccctgtggcagatttgtagcctcgtgtggcttcaccccagatgtgaaggtttgggaagtctgctttggaaagaagggggagttccaggaggtggtgcgagccttcgaactaaagggccactccgcggctgtgcactcgtttgctttctccaacgactcacggaggatggcttctgtctccaaggatggtacatggaaactgtgggacacagatgtggaatacaagaagaagcaggacccctacttgctgaa

SEQ ID NO: 192440 - DNA, 1573 bp, Homo sapiens
  Payload ID: 18002
  Gene Name: transducin (beta)-like 2
  ENST ID: ENST00000432538
  CDS Start-End: 26-1261
gcggctggtggggcccggcgactccatgggcctcagtttctcctctggccaaaaagcaaatggatttccacctgacaaatcttcgggatccaagaagcagaaacaatatcagcggattcggaaggagaagcctcaacaacacaacttcacccaccgcctcctggctgcagctctgaagagccacagcgggaacatatcttgcatggactttagcagcaatggcaaatacctggctacctgtgcagatgatcgcaccatccgcatctggagcaccaaggacttcctgcagcgagagcaccgcagcatgagagccaacgtggagctggaccacgccaccctggtgcgcttcagccctgactgcagagccttcatcgtctggctggccaacggggacaccctccgtgtcttcaagatgaccaagcgggaggatgggggctacaccttcacagccaccccagaggacttccctaaaaagcacaaggcgcctgtcatcgacattggcattgctaacacagggaagtttatcatgactgcctccagtgacaccactgtcctcatctggagcctgaagggtcaagtgctgtctaccatcaacaccaaccagatgaacaacacacacgctgctgtatctccctgtggcagatttgtagcctcgtgtggcttcaccccagatgtgaaggtttgggaagtctgctttggaaagaagggggagttccaggaggtggtgcgagccttcgaactaaagggccactccgcggctgtgcactcgtttgctttctccaacgactcacggaggatggcttctgtctccaaggatggtacatggaaactgtgggacacagatgtggaatacaagaagaagcaggacccctacttgctgaagacaggccgctttgaagaggcggcgggtgccgcgccgtgccgcctggccctctcccccaacgcccaggtcttggccttggccagtggcagtagtattcatctctacaatacccggcggggcgagaaggaggagtgctttgagcgggtccatggcgagtgtatcgccaacttgtcctttgacatcactggccgctttctggcctcctgtggggaccgggcggtgcggctgtttcacaacactcctggccaccgagccatggtggaggagatgcagggccacctgaagcgggcctccaacgagagcacccgccagaggctgcagcagcagctgacccaggcccaagagaccctgaagagcctgggtgccctgaagaagtgactctgggagggcccggcgcagaggattgaggaggagggatctggcctcctcatggcactgctgccatctttcctcccaggtggaagcctttcagaaggagtctcctggttttcttactggtggccctgcttcttcccattgaaactactcttgtctacttaggtctctctcttcttgctggctgtgactcctccctgactagtggccaaggtgcttttcttcctcccaggcccagtgggtggaatctgtccccacctggcactgaggagaatggtagagaggagaggagagagagagagaatgtgatttttg

SEQ ID NO: 192441 - DNA, 576 bp, Homo sapiens
  Payload ID: 18002
  Gene Name: transducin (beta)-like 2
  ENST ID: ENST00000452125
  CDS Start-End: 44-238
gacctgcggtttgggcccgcggctggtggggcccggcgactccatgggcctcagtttctcctctggtaacgtgagcttcgcttccagagacggggacccgccttgccgggccaaaaagcaaatggatttccacctgacaaatcttcgggatccaagaagcagaaacaatatcagcggattcggaaggagaagcctcaacaacacaacttcacccaccgcctcctggctgcagctctgaagagccacagcgggaacatatcttgcatggactttagcagcaatggcaaatacctggctacctgtgcagatgatcgcaccatccgcatctggagcaccaaggacttcctgcagcgagagcaccgcagcatgagagccaacgtggagctggaccacgccaccctggtgcgcttcagccctgactgcagagccttcatcgtctggctggccaacggggacaccctccgtgtcttcaagatgaccaagcgggaggatgggggctacaccttcacagccaccccagaggacttccctaaaaagcacaaggcgcctgtcatcgacattggcattgctaacaca

SEQ ID NO: 192442 - DNA, 494 bp, Homo sapiens
  Payload ID: 18002
  Gene Name: transducin (beta)-like 2
  ENST ID: ENST00000479892
  CDS Start-End: 205-494
ccaggccccgcccctcgagcgccacaacagccgggccccaccccttgaggccaaaaagcaaatggatttccacctgacaaatcttcgggatccaagaagcagaaacaatatcagcggattcggaaggagaagcctcaacaacacaacttcacccaccgcctcctggctgcagctctgaagagccacagcgggaacatatcttgcatggactttagcagcaatggcaaatacctggctacctgtgcagatgatcgcaccatccgcatctggagcaccaaggacttcctgcagcgagagcaccgcagcatgagagccaacgtggagctggaccacgccaccctggtgcgcttcagccctgactgcagagccttcatcgtctggctggccaacggggacaccctccgtgtcttcaagatgaccaagcgggaggatgggggctacaccttcacagccaccccagaggacttccctaaaaagcacaaggcgcctgtcat

SEQ ID NO: 192443 - DNA, 2165 bp, Homo sapiens
  Payload ID: 18002
  Gene Name: transducin (beta)-like 2
  ENST ID: ENST00000610724
  CDS Start-End: 12-1352
gttccaccaacatggagctctcgcagatgtcggagctcatggggctgtcggtgttgcttgggctgctggccctgatggcgacggcggcggtagcgcgggggtggctgcgcgcgggggaggagaggagcggccggcccgcctgccaaaaagcaaatggatttccacctgacaaatcttcgggatccaagaagcagaaacaatatcagcggattcggaaggagaagcctcaacaacacaacttcacccaccgcctcctggctgcagctctgaagagccacagcgggaacatatcttgcatggactttagcagcaatggcaaatacctggctacctgtgcagatgatcgcaccatccgcatctggagcaccaaggacttcctgcagcgagagcaccgcagcatgagagccaacgtggagctggaccacgccaccctggtgcgcttcagccctgactgcagagccttcatcgtctggctggccaacggggacaccctccgtgtcttcaagatgaccaagcgggaggatgggggctacaccttcacagccaccccagaggacttccctaaaaagcacaaggcgcctgtcatcgacattggcattgctaacacagggaagtttatcatgactgcctccagtgacaccactgtcctcatctggagcctgaagggtcaagtgctgtctaccatcaacaccaaccagatgaacaacacacacgctgctgtatctccctgtggcagatttgtagcctcgtgtggcttcaccccagatgtgaaggtttgggaagtctgctttggaaagaagggggagttccaggaggtggtgcgagccttcgaactaaagggccactccgcggctgtgcactcgtttgctttctccaacgactcacggaggatggcttctgtctccaaggatggtacatggaaactgtgggacacagatgtggaatacaagaagaagcaggacccctacttgctgaagacaggccgctttgaagaggcggcgggtgccgcgccgtgccgcctggccctctcccccaacgcccaggtcttggccttggccagtggcagtagtattcatctctacaatacccggcggggcgagaaggaggagtgctttgagcgggtccatggcgagtgtatcgccaacttgtcctttgacatcactggccgctttctggcctcctgtggggaccgggcggtgcggctgtttcacaacactcctggccaccgagccatggtggaggagatgcagggccacctgaagcgggcctccaacgagagcacccgccagaggctgcagcagcagctgacccaggcccaagtgactctgggagggcccggcgcagaggattgaggaggagggatctggcctcctcatggcactgctgccatctttcctcccaggtggaagcctttcagaaggagtctcctggttttcttactggtggccctgcttcttcccattgaaactactcttgtctacttaggtctctctcttcttgctggctgtgactcctccctgactagtggccaaggtgcttttcttcctcccaggcccagtgggtggaatctgtccccacctggcactgaggagaatggtagagaggagaggagagagagagagaatgtgatttttggccttgtggcagcacatcctcacacccaaagaagtttgtaaatgttccagaacaacctagagaacacctgagtactaagcagcagttttgcaaggatgggagactgggatagcttcccatcacagaactgtgttccatcaaaaagacactaagggatttccttctgggcctcagttctatttgtaagatggagaataatcctctctgtgaactccttgcaaagatgatatgaggctaagagaatatcaagtccccaggtctggaagaaaagtagaaaagagtagtactattgtccaatgtcatgaaagtggtaaaagtgggaaccagtgtgctttgaaaccaaattagaaacacattccttgggaaggcaaagttttctgggacttgatcatacattttatatggttgggacttctctcttcgggagatgatatcttgtttaaggagacctcttttcagttcatcaagttcatcagatatttgagtgcccactctgtgcccaaataaatatgagctggggattaaatacg

SEQ ID NO: 192444 - DNA, 2091 bp, Homo sapiens
  Payload ID: 18003
  Gene Name: transducin (beta)-like 3
  ENST ID: ENST00000332704
  CDS Start-End: 1-2091
ggcctggcaagagggcagcgttacccgcctgtggaaggcgatacacacggcccccgtggccaccatggccttcgaccccacctccactctgctagccacaggtggctgtgatggggccgtgcgcgtctgggacatcgtgcggcactacgggacacaccacttccgaggctcgcccggtgtcgtgcacctagtggccttccacccggaccctacacgcctgctgctcttctcctcggccacggatgccgccatccgcgtgtggtcactgcaggaccggtcatgcctggctgtgctgactgcccactacagcgccgtcacctcactggccttcagcgccgacggccacaccatgctcagctccggccgtgacaagatatgtatcatctgggaccttcagagctgccaggccacgaggaccgtgcctgtgtttgagagcgtggaggctgctgtgctgttgccagaggagccagtgtcccagctgggtgtgaagtccccagggctgtactttctgacagctggcgaccaaggcactctgcgcgtgtgggaggcagcttctgggcagtgtgtgtacacgcaggcccagccgccgggccctgggcaggagctgacccactgcaccctggcacacaccgccggcgtggtcctcaccgccaccgccgaccacaacctgttgctctacgaggctcgctccctgcggctgcagaaacagttcgctggctacagtgaggaggttttggatgtccggtttcttgggcccgaggactcccacgttgtcgtggcctccaatagcccctgcctaaaagtgtttgagctgcagacgtcagcctgccagatcctccacggccacacggatatcgtcctggccctggatgtgttccggaaggggtggctctttgccagctgtgccaaggatcagagcgtccgtatctggagaatgaacaaggctggccaggtgatgctgaaggagtccttcctggtgacaggcagccaggactgcactgtgaagctgtggcctcttcccaaagccttgctgtccaagaacacagccccagacaacggccctatcctcctgcaggcccagaccactcagcgctgccatgataaggacatcaacagcgtggctattgcccccaacgacaagctgctggccacaggctcacaggaccgcacggccaagctctgggccctgccacagtgccagctgctgggtgtcttctcaggccaccggcgtggcctctggtgcgtccagttctctcccatggaccaggtgctggccacggcctcagctgatggcaccatcaagctctgggcactccaggacttcagctgtctcaagacatttgaggggcacgatgcttctgtgctgaaggtggcctttgtgagccgtggcacgcagctgctgtccagcggttcggatggcctcgtgaagctctggaccatcaagaacaacgagtgtgtgcggacgctggatgcccacgaggacaaggtctgggggctgcactgcagccggctggacgaccacgccctcactggggccagtgactcccgagtcatcctctggaaggatgtgaccgaggcggagcaggcagaggagcaggccaggcaagaggagcaggtggtcaggcagcaagagctggacaacctgctgcatgagaagcggtacctgcgggcgctgggcctggccatctccctggatcggccccacaccgtgctgactgtcatccaggccatccggagggaccctgaggcctgcgagaagctggaagccaccatgctccgactgcggcgcgaccagaaagaggccctgctgcgcttctgcgtcacgtggaacaccaactcgcggcactgccacgaggcccaggccgtgctgggtgtgctcttgaggcgagaggcccccgaggagctgctggcctacgaaggcgtgcgggcagcgcttgaggccctgctgccctacactgagcggcactttcagcggctcagcaggaccctccaggccgccgctttcttggacttcctgtggcacaacatgaagctccctgtgccggccgccgcccccaccccctgggaaacccataaaggcgcactgcccta

SEQ ID NO: 192445 - DNA, 518 bp, Homo sapiens
  Payload ID: 18003
  Gene Name: transducin (beta)-like 3
  ENST ID: ENST00000561907
  CDS Start-End: 95-328
ggcgttctgtgaagagttcggtgctaacctccctcacgcggcggtggctgccgggaccctagcaggtttcagctggagcggcggcggcggcaacatggcagagaccgcggccggagtgggccgcttcaagaccaactatgctgtggagcgcaaaattgagcctttctacaagggcggaaaagcacagacctctctgtccccagctggaccagactggccagcacctcttctgcgtctgtggcaccagagtcaacattctggaagtggcctcgggggccgtgctgcggagtctggagcaggaggaccaggaggacatcactgcctttgacctcagccctgacaacgaggtgctggtgacagccagtcgggcattgctgctggctcagtgggcctggcaagagggcagcgttacccgcctgtggaaggcgatacacacggcccccgtggccaccatggccttcgaccccacctccactctgctagccacaggtggctgtgatggggccgtgcgcgtctgg

SEQ ID NO: 192446 - DNA, 6803 bp, Homo sapiens
  Payload ID: 18003
  Gene Name: transducin (beta)-like 3
  Uniprot ID: Q12788
  ENST ID: ENST00000568546
  CDS Start-End: 129-2555
gcgcggtgacgccatcgcagcgcgccgggagtgtggcgttctgtgaagagttcggtgctaacctccctcacgcggcggtggctgccgggaccctagcaggtttcagctggagcggcggcggcggcaacatggcagagaccgcggccggagtgggccgcttcaagaccaactatgctgtggagcgcaaaattgagcctttctacaagggcggaaaagcacagctggaccagactggccagcacctcttctgcgtctgtggcaccagagtcaacattctggaagtggcctcgggggccgtgctgcggagtctggagcaggaggaccaggaggacatcactgcctttgacctcagccctgacaacgaggtgctggtgacagccagtcgggcattgctgctggctcagtgggcctggcaagagggcagcgttacccgcctgtggaaggcgatacacacggcccccgtggccaccatggccttcgaccccacctccactctgctagccacaggtggctgtgatggggccgtgcgcgtctgggacatcgtgcggcactacgggacacaccacttccgaggctcgcccggtgtcgtgcacctagtggccttccacccggaccctacacgcctgctgctcttctcctcggccacggatgccgccatccgcgtgtggtcactgcaggaccggtcatgcctggctgtgctgactgcccactacagcgccgtcacctcactggccttcagcgccgacggccacaccatgctcagctccggccgtgacaagatatgtatcatctgggaccttcagagctgccaggccacgaggaccgtgcctgtgtttgagagcgtggaggctgctgtgctgttgccagaggagccagtgtcccagctgggtgtgaagtccccagggctgtactttctgacagctggcgaccaaggcactctgcgcgtgtgggaggcagcttctgggcagtgtgtgtacacgcaggcccagccgccgggccctgggcaggagctgacccactgcaccctggcacacaccgccggcgtggtcctcaccgccaccgccgaccacaacctgttgctctacgaggctcgctccctgcggctgcagaaacagttcgctggctacagtgaggaggttttggatgtccggtttcttgggcccgaggactcccacgttgtcgtggcctccaatagcccctgcctaaaagtgtttgagctgcagacgtcagcctgccagatcctccacggccacacggatatcgtcctggccctggatgtgttccggaaggggtggctctttgccagctgtgccaaggatcagagcgtccgtatctggagaatgaacaaggctggccaggtgatgtgcgtggctcagggttccggtcacacacacagtgtgggcaccgtctgctgctctaggctgaaggagtccttcctggtgacaggcagccaggactgcactgtgaagctgtggcctcttcccaaagccttgctgtccaagaacacagccccagacaacggccctatcctcctgcaggcccagaccactcagcgctgccatgataaggacatcaacagcgtggctattgcccccaacgacaagctgctggccacaggctcacaggaccgcacggccaagctctgggccctgccacagtgccagctgctgggtgtcttctcaggccaccggcgtggcctctggtgcgtccagttctctcccatggaccaggtgctggccacggcctcagctgatggcaccatcaagctctgggcactccaggacttcagctgtctcaagacatttgaggggcacgatgcttctgtgctgaaggtggcctttgtgagccgtggcacgcagctgctgtccagcggttcggatggcctcgtgaagctctggaccatcaagaacaacgagtgtgtgcggacgctggatgcccacgaggacaaggtctgggggctgcactgcagccggctggacgaccacgccctcactggggccagtgactcccgagtcatcctctggaaggatgtgaccgaggcggagcaggcagaggagcaggccaggcaagaggagcaggtggtcaggcagcaagagctggacaacctgctgcatgagaagcggtacctgcgggcgctgggcctggccatctccctggatcggccccacaccgtgctgactgtcatccaggccatccggagggaccctgaggcctgcgagaagctggaagccaccatgctccgactgcggcgcgaccagaaagaggccctgctgcgcttctgcgtcacgtggaacaccaactcgcggcactgccacgaggcccaggccgtgctgggtgtgctcttgaggcgagaggcccccgaggagctgctggcctacgaaggcgtgcgggcagcgcttgaggccctgctgccctacactgagcggcactttcagcggctcagcaggaccctccaggccgccgctttcttggacttcctgtggcacaacatgaagctccctgtgccggccgccgcccccaccccctgggaaacccataaaggcgcactgccctagccggtccggcctctctccagtccatcctgaacccctggaaaacccataaaggccgctctcctggccggctctgtctctctggactgcagtccagccccccaccctggccaacaccctacctagccagccagaagggcactggagctgatggtctcggccctgccacgcccatcccgcaccctggcctggcagagatccagcccgcggctccgcacgcttagacggtgggggtcatgcagaacaagctttactcagaggaacagcaaatggccccctcccatccctgctggccagggagatccgccctccccgctcctccccagccctgggatggcgcggtccatcccctcatcgggatcctcgcgctcactgctccgtcgtggggtgcggcacagagtccacgcaccctcgagggcggccctggcgccgtgggcgccgctccagggccctgcgtgtgacggtgcagcagcggctctggatggcgcccggcgaaggtcgggtgggcacggtggggggaggggcggtggcctgggagggttcagggaagccccgggcctcacccgccgggtcgtctcctccacggaaccccgtcccgctcaggagagcgcccagcccttccggccgcagcagcaccgcggggagtaggcccgcccggtcgccgtacctgcgaggggcggggtgtggttagggccccgcccgcctcggctagcctgccctgcccacgcccgctcccgcgtacctgcatagccaccagccgcggtctgacgtttccaacacgcgcacgcgcgcccccgcgggcacggacagctcatctgcgcggctgctctcgtaggcgcgggaagcacagaactggggacctggtgggagtgggtgtttggagtcaccgcggggccacagaggacgaggcccgcccgcacccttctccacattctccttgcttgagtctgctgacggcggggccgctctaagaccggttcggggcttcctctaggtgcggagaccaagcacgggctcctggcccgccctgcccgcggtgcttctggcccagtcttgccacacggtcaagccgcagtggtggcgtgaggggtggggttaggcgcataccgctgctccctagggacgggcctccctcccggccttggcccggggccgcctcctccaggtagggcgctggaaaccaggcggtctgccggtcttcgttctccaccagccaccagcctgtgcgcaagaagcgggcagggactcaaatctcgaggctccctcgggtccaggagcagaggagcaaatccctgggttcttggggggccctacctgaggggtgccgcagcagcacgtccaggctctcctgggcctgcgcctgaaaaggcctatcccgcgtgtcctgggtacagaagggctgcaggcagcgcaggctctgagcctccagactgtggatggagaggcggcccgcagcgcgagaaagaggctgctcctctggggtgggcaggatcacccggctgggaagggcagcccgtacgagtgagaggtaggcggatggggagggtgaaactgggggcgccaccccggcaagaccgccagcctcccactctctgcccctattcgctggctgttcccccccaccctggacctctcccagctccaaacgccgctgcatgctgggagtttggggcgagtcaggcacctgccgggtggcagcgcgggctccaggtccaggggttgcggtgcgaagaagccagtgatcgtcgggctccgtgccacgcgctctgcagtcgccagcagcctccgagaataggtttccaacagctgcaggcgcgccaggccgcggctcgtgcgccccacgcgtcccaacagtggtgcatcttaaggcaccacaaaaacgtactgtgatacgccgctttgggcttcactggtccctggcgcccccaggcaagccaccgccttccccgctcccgtacccaggctggcctgaccgagaagctttgggagaacgcggtcagatctccgcagcaggcccgcctccaccgggaaggtctccttgagggtcttctgagggcgggaaccagggcattggtcttccagagcccactgtgcacccttgagagggcggggtccctcacccggatggcaggggctgggagcttcagcagggacgaagggcctccagtgggagtcactgatgggaggcagtccagtgggaggcagccgcgtggggaagccgccaccgcggcatcagggtggcccagggtcactcaccttgagctgcctgaattcgtcccaactcctgcgcacgaaggtgtcgctgccgtctgaccagcgcacagagaaggcaaacgtctgggggacaaaaagttgggagtgccgtggaggtgctggtccaggcacccccttcctatcccttggggccactaaggacccagccaggtcttacttggagcctcttgatctgcaccagggctgccccttgcactgaaactgggtatcgggggcctgccatggctgtggcttccaggctgcagattcctgaaatgggcgaggacccttctgcctccccgtgcttgagagggctctgggggacccagaaaaccccctgggatagaatcctggcaacacctcaagcctgtggggtccttgtggagccgccccagctgagtcctttgcagctttcttgctgtcccccaagcccacgatctgggggcaggagcacagggattgggggacttccaggcagagctgctgggaggaagaagaagaatgagctttccagccctggaggcgtgcaagactgaagaaggggcgaagggtaggcgggactgctgcctggggccctcctgcctgcctctggccacaggaggagggaggagaaggcagggctaatcaaagcgccacctgtcctgcccacctctctggattcccctaccctgtgaggtaattgccctgccagggtgcgcccaacaactttgaactggcctggggatttctgtgcagaaccaaggactcagtgcttacagctttaagtgctttgtctgacttaatcctaatgctggaggaaaggtctcttaatgtccccaactcatagaggaggaaatgtgtgttaaatgcgtaattattgtgagctgttctatacatgctgggggaggggcagacctcacaggctcaccccaggggttcccctgcagtgaggagacttggggtaggagaaagagggcccatctgtgcagtcactggcatttggtgggtgggggtggtggtcagggaagtggtcactagggctgttttgagaaccacctctcaattcacgatttgccatgacttactgcaaacatggcctgggcagaggctcgcccaggtgccccacctctctggctgcttccttatagttcgggcttcggaagccacattcaaccctggcacacagtggtttttcctcgtgctggggccaccagttctgtgttgggatgcacctactccagccccttcagggagcagtcagcctctaaggcatccctccaggaagctgccctggctgcaacaaagggcctttgtgtgtctgtcccaccagcactctctctcatgccctcaagctgtccctggtcttggcatgggcaatgaacacctgctcacatagggctgatttgcagggttcccccagccagctgtcaccttctccctgtctcagctgagggcccagctgacctggtggggtccagcgtgtgaacccaggggagaccttgctcccctggaagacaggagaagctggggaggatttattcacaagcagaggcctagagggattctgaggccacctgcctaccccagctgacagctcctgccccacaccccatcagccctgcatggtttccactttttcctcccctaccctcttttcttgcctgaatagtacaccccaccctccatctgtatgctcctcacttgcccctacaaaatccactccaaggacagacacagtgcctcacctgtaatccaagtactttgggaggccgaggcagggggattgcttgagctcaggagttcgagaccagtctgggcaacatgttgagacctccatctgtgccccccaaaaatacaaaaattagctgggcgtggtggcgtgtgcctgtagtctacttgggaggctgaggtgggagatcacttgagcctaagcagtcgcggctgcagtgaacaagatcgcgccactgcactccaccctgggtaacggaacaagaccctgtctcaaaaaaaaaaaagaaa

SEQ ID NO: 192447 - DNA, 2472 bp, Homo sapiens
  Payload ID: 18003
  Gene Name: transducin (beta)-like 3
  ENST ID: ENST00000615855
  CDS Start-End: 399-1955
cggcggtggctgccgggaccctagcaggtttcagctggagcggcggcggcggcaacatggcagagaccgcggccggagtgggccgcttcaagaccaactatgctgtggagcgcaaaattgagcctttctacaagggcggaaaagcacagctggaccagactggccagcacctcttctgcgtctgtggcaccagagtcaacattctggaagtggcctcgggggccgtgctgcggagtctggagcaggaggaccaggaggacatcactgcctttgacctcagccctgacaacgaggtgctggtgacagccagtcgggcattgctgctggctcagtgggcctggcaagagggcagcgttacccgcctgtggaaggcgatacacacggcccccgtggccaccatggccttcgaccccacctccactctgctagccacaggtggctgtgatggggccgtgcgcgtctgggacatcgtgcggcactacgggacacaccacttccgaggctcgcccggtgtcgtgcacctagtggccttccacccggaccctacacgcctgctgctcttctcctcggccacggatgccgccatccgcgtgtggtcactgcaggaccggtcatgcctggctgtgctgactgcccactacagcgccgtcacctcactggccttcagcgccgacggccacaccatgctcagctccggccgtgacaagatatgtatcatctgggaccttcagagctgccaggccacgaggaccgtgcctgtgtttgagagcgtggaggctgctgtgctgttgccagaggagccagtgtcccagctgggtgtgaagtccccagggctgtactttctgacagctggcgaccaaggcactctgcgcgtgtgggaggcagcttctgggcagtgtgtgtacacgcaggcccagccgccgggccctgggcaggagctgacccactgcaccctggcacacaccgccggcgtggtcctcaccgccaccgccgaccacaacctgttgctctacgaggctcgctccctgcggctgcagaaacagttcgctggctacagtgaggaggttttggatgtccggtttcttgggcccgaggactcccacgttgtcgtggcctccaatagcccctgcctaaaagtgtttgagctgcagacgtcagcctgccagatcctccacggccacacggatatcgtcctggccctggatgtgttccggaaggggtggctctttgccagctgtgccaaggatcagagcgtccgtatctggagaatgaacaaggctggccaggtgatgtgcgtggctcagggttccggtcacacacacagtgtgggcaccgtctgctgctctaggctgaaggagtccttcctggtgacaggcagccaggactgcactgtgaagctgtggcctcttcccaaagccttgctgtccaagaacacagccccagacaacggccctatcctcctgcaggcccagaccactcagcgctgccatgataaggacatcaacagcgtggctattgcccccaacgacaagctgctggccacaggctcacaggaccgcacggccaagctctgggccctgccacagtgccagctgctgggtgtcttctcaggccaccgggtggcctctggtgcgtccagttctctcccatggaccaggtgctggccacggcctcagctgatggcaccatcaagctctgggcactccaggacttcagctgtctcaagacatttgaggggcacgatgctttgtctgaaggtggcctttgtgagccgtggcacgcagctgctgtccagcggttcggatggcctcgtgaagctctggaccatcaagaacaacgagtgtgtgcggacgctggatgcccacgaggacaaggtctgggggctgcacgccggctggacgaccacgccctcactggggccagtgactcccgagtcatcctctggaaggatgtgaccgaggcggagcaggcagaggagcaggccaggcaagaggagcaggtggtcaggcagcaagagctggacaacctgctgcatgagaagcggtacctgcgggcgctgggcctggccatctccctggatcggccccacaccgtgctgactgtcatccaggccatccggagggaccctgaggcctgcgagaagctggaagccaccatgctccgactgcggcgcgaccagaaaggccctgctgcgcttctgcgtcacgtggaacaccaactcgcggcactgccacgaggcccaggccgtgctgggtgtgctcttgaggcgagaggcccccgaggagctgctggcctacgaaggcgtgcgggcagcgcttgaggccctgctgccctacactgagcggcactttcagcggctcagcaggaccctccaggccgccgctttcttggacttcctgtggcacaacatgaagctccctgtgccggccgccgcccccaccccctgggaaacccataaaggcgcactgccct

SEQ ID NO: 192448 - DNA, 1115 bp, Homo sapiens
  Payload ID: 18004
  Gene Name: transducin-like enhancer of split 1 (E(sp1) homolog, Drosophila)
  ENST ID: ENST00000376463
  CDS Start-End: 79-513
gaggaattccagttcctgcaggcgcagtatcacagccttaaattggaatgtgagaaactggcaagtgaaaagacagaaatgcagaggcactatgtgatgtattatgaaatgtcatatggattaaacattgaaatgcacaaacagactgaaatcgccaagagattgaatacgatttgtgcacaagtcatcccatttctgtctcaggaacatcaacaacaggtggcccaggctgttgaacgtgccaaacaggtgaccatggcagaattgaatgccatcatcgggcagcagcagttgcaagctcagcatctttctcatggccacggacccccagttccccttacgcctcacccttcgggacttcagcctcctggaatcccgcccctcgggggcagtgccggccttcttgcgctgtctagtgctctgagtgggcagtctcacttggcaataaaagatgacaagaagcaccacgatgcagagcaccacagaggtgagaggccgggcaagccagattaggactttgtcctcatactcttacagtgctgcaaagttgtgtgcatcgctaaagagagccccaacctatacagagagcaaacaatgagataagaggaactgtcgcaaagctttccactgaaacacaggtcaccctggaagtttgcagggtttgctgtgggcatctgtagatttctcgatctcgttagattgcaggcatcttgacatcttggcaactgcctagttaatgccagtggcctgtaccatattatggaaaactgttaactgcttaattgggtaattttcaaagaaagtaatgttgttaaatggggcgaaataagaagttaaatttgaaagtgaatgtgttcaaatgaaaggtttgataattgcatctgttactacttagtttcataggctttaattctagtatgcattaaatattgggcaaaattgcacttgactaattttttgaagaaaagtaatttattctgtcaagaaataaaaaaataggctttgtgtatggttaaactgtaaatcttatgtttacaaaatactgtaattttcaggaaatcactgtattaggaatgtgcaatgacttatataaataaaagccatttttaaaactg

SEQ ID NO: 192449 - DNA, 2350 bp, Homo sapiens
  Payload ID: 18004
  Gene Name: transducin-like enhancer of split 1 (E(sp1) homolog, Drosophila)
  ENST ID: ENST00000376472
  CDS Start-End: 27-2336
acagagccccggccgccgccagagcgatgttcccgcagagccggcacccgacgccgcaccaggctgcaggccagcccttcaagttcactatcccggagtccctggaccggattaaagaggaattccagttcctgcaggcgcagtatcacagccttaaattggaatgtgagaaactggcaagtgaaaagacagaaatgcagaggcactatgtgatgtattatgaaatgtcatatggattaaacattgaaatgcacaaacagactgaaatcgccaagagattgaatacgatttgtgcacaagtcatcccatttctgtctcaggaacatcaacaacaggtggcccaggctgttgaacgtgccaaacaggtgaccatggcagaattgaatgccatcatcgggcagcagcagttgcaagctcagcatctttctcatggccacggacccccagttccccttacgcctcacccttcgggacttcagcctcctggaatcccgcccctcgggggcagtgccggccttcttgcgctgtctagtgctctgagtgggcagtctcacttggcaataaaagatgacaagaagcaccacgatgcagagcaccacagagacagagagccgggcacaagtaattccctcctggtcccagacagtctaagaggcacagataaacgcagaaatggacctgaattttccaatgacatcaagaaaaggaaggtggatgataaggactccagccactatgacagtgatggtgacaaaagcgatgacaacttagttgtggatgtgtctaatgaggacccttcttctccgcgagcaagccctgcccactcgccccgggaaaatggaatcgacaaaaatcgcctgctaaagaaggatgcttctagcagtccagcttccacggcctcctcggcaagttccacttctttgaaatccaaagaaatgagcttgcatgaaaaagccagcacgcctgttctgaaatccagcacaccaacgcctcggagcgacatgccaacgccgggcaccagcgccactccaggcctccgtccaggtctcggcaagcctccagccatagaccccctcgttaaccaagcggcagctggcttgaggacacccctggcagtgcccggcccatatcctgctccttttgggatggtcccccacgctggcatgaacggcgagctgaccagcccaggcgctgcctacgccagtttacacaacatgtcgccccagatgagcgccgcagcccgcggccgccgtggtggctacgggcgctcccccatggtggggtttgatcctccccctcacatgagagtacctaccattcctccaaacctggcaggaatccctggggggaaacctgcatactccttccacgttactgcagacggtcagatgcagcctgtcccttttccccccgacgccctcatcggacccggaatcccccggcatgctcgccagatcaacaccctcaaccacggggaggtggtgtgcgctgtgaccatcagcaaccccacgagacacgtgtacacaggcgggaagggctgcgtcaaggtctgggacatcagccaccctggcaataagagccctgtctcccagctcgactgtctgaacagagacaattatatccgttcctgtaaattgctacccgatggctgcactctcatagtgggaggggaagccagtactttgtccatttgggacctggcggctccaaccccgcgcatcaaggcggagctgacgtcctcggcccccgcctgctacgccctggccatcagccccgattccaaggtctgcttctcatgctgcagcgacggcaacatcgctgtgtgggatctgcacaaccagacactagtgaggcaattccagggccacacagacggagccagctgtattgacatttctaatgatggcaccaagctctggacgggtggtttggacaacacagtcaggtcctgggacctgcgcgaggggcggcagctgcagcagcacgacttcacctcccagatcttctccctggggtactgccccaccggggagtggctggcagtgggcatggagagcagcaatgtggaggtgctgcacgtgaacaagcctgacaagtaccagctgcacctgcatgagagctgcgtgctgtccctgaaatttgcttactgtggtaaatggtttgtgagtactggaaaagataacctcctcaatgcttggcggaccccctatggagccagcatattccagtccaaagagtcctcgtcagtgcttagctgtgacatctctgtggatgataagtacatagtcactggctcgggggacaagaaggctacagtctatgaagtcatctactgaaaacattatgtggt

SEQ ID NO: 192450 - DNA, 666 bp, Homo sapiens
  Payload ID: 18004
  Gene Name: transducin-like enhancer of split 1 (E(sp1) homolog, Drosophila)
  ENST ID: ENST00000376484
  CDS Start-End: 59-442
gcatgaaaaagccagcacgcctgttctgaaatccagcacaccaacgcctcggagcgacatgccaacgccgggcaccagcgccactccaggcctccgtccaggtctcggcaagcctccagccatagaccccctcgttaaccaagcggcagctggcttgaggacacccctggcagtgcccggcccatatcctgctccttttgggatggtcccccacgctggcatgaacggcgagctgaccagcccaggcgctgcctacgccagtttacacaacatgtcgccccagatgagcgccgcagccgccgcggccgccgtggtggcctacgggcgctcccccatggtggggtttgatcctccccctcacatgagagtacctaccattcctccaaacctggcaggaatccctggggggaaaccgagccttgttcctgccccagcacattgagaagtttggaaacgtgtaattgatagaggaagttaggtcctagaactcagaatcttaaatgttgactttggctggaatacttcctcatttatcaacttaggtcatctgtttcttgttttctttgcttgtaatcttcttttacatatccattttaagaagttttgtatttgcctttaaaaaaaataaatgaaaatagagtgtatgcctctaaataaggaaacaaa

SEQ ID NO: 192451 - DNA, 3893 bp, Homo sapiens
  Payload ID: 18004
  Gene Name: transducin-like enhancer of split 1 (E(sp1) homolog, Drosophila)
  Uniprot ID: Q04724
  ENST ID: ENST00000376499
  CDS Start-End: 1066-3378
tttgcccgccggggagggtggccgattggcggagcgcactcctgctgttttccccaccatctcgtggatgtcgtccctcgggtggtgagagaactttgcagtgggctggagcgccctttgcggagaagcacacgaaggtgaaggaaggaaagaaagaagaccgaggaagaaggagctcggaagaagggtccggagcggccggtccggccgtgcagggcgagtgcgcccgaggcgcggcgccctgatgctccccgggctcgaggagcattgggcacttgcgggactgctctcggtggagtagccccgtcgggcccggagggtttgtgcaaccgcggagaacaccgagtgctggtcgcacggggcgtgccgagccgcctcccggcgcgccctccgcactttccccgcctcgtcatccgtcgctccccggccaggagcctccgctgcgtcttcaacctcgctcccctttgcgtcccgggagcctgcgagcacccggccgaaggcgcagccgaatcttgcgggagtcgccccgaaagcgtcgggtttgtgtggggttagcgggggccgccgcgccacctgcacctcgcccgccgccgcctcggggaaagcccgaagaggaggcggaccaggagaagagcaaagaaaagcagtccgtctggatttgtttgcccaggactggcgccgcgcacgcggatcgccgaggggagtgcggtcggagtcaccgcgcccccgcctccccgcccgggcagctgaggccgggggttggagcgctgcccccgcgcacagtccccgagcgcccgacgtctccgcgcaggttcttgaagcagctgggcctggggcgcccactaatgtggccctgagggccggagcccgcaccgacgggagcgggagccggagcagctgcgggcgccgagtggccggtgcgcccggcggagcgcgcgtgcgtggccagcgcgctccccgcttctgcttggctttccggcttaattttcctcggcgggattaaagttggaaattgaccggagaattgagttgccggggaacagagccccggccgccgccagagcgatgttcccgcagagccggcacccgacgccgcaccaggctgcaggccagcccttcaagttcactatcccggagtccctggaccggattaaagaggaattccagttcctgcaggcgcagtatcacagccttaaattggaatgtgagaaactggcaagtgaaaagacagaaatgcagaggcactatgtgatgtattatgaaatgtcatatggattaaacattgaaatgcacaaacagactgaaatcgccaagagattgaatacgatttgtgcacaagtcatcccatttctgtctcaggaacatcaacaacaggtggcccaggctgttgaacgtgccaaacaggtgaccatggcagaattgaatgccatcatcgggcagcagcagttgcaagctcagcatctttctcatggccacggacccccagttccccttacgcctcacccttcgggacttcagcctcctggaatcccgcccctcgggggcagtgccggccttcttgcgctgtctagtgctctgagtgggcagtctcacttggcaataaaagatgacaagaagcaccacgatgcagagcaccacagagacagagagccgggcacaagtaattccctcctggtcccagacagtctaagaggcacagataaacgcagaaatggacctgaattttccaatgacatcaagaaaaggaaggtggatgataaggactccagccactatgacagtgatggtgacaaaagcgatgacaacttagttgtggatgtgtctaatgaggacccttcttctccgcgagcaagccctgcccactcgccccgggaaaatggaatcgacaaaaatcgcctgctaaagaaggatgcttctagcagtccagcttccacggcctcctcggcaagttccacttctttgaaatccaaagaaatgagcttgcatgaaaaagccagcacgcctgttctgaaatccagcacaccaacgcctcggagcgacatgccaacgccgggcaccagcgccactccaggcctccgtccaggtctcggcaagcctccagccatagaccccctcgttaaccaagcggcagctggcttgaggacacccctggcagtgcccggcccatatcctgctccttttgggatggtcccccacgctggcatgaacggcgagctgaccagcccaggcgctgcctacgccagtttacacaacatgtcgccccagatgagcgccgcagccgccgcggccgccgtggtggcctacgggcgctcccccatggtggggtttgatcctccccctcacatgagagtacctaccattcctccaaacctggcaggaatccctggggggaaacctgcatactccttccacgttactgcagacggtcagatgcagcctgtcccttttccccccgacgccctcatcggacccggaatcccccggcatgctcgccagatcaacaccctcaaccacggggaggtggtgtgcgctgtgaccatcagcaaccccacgagacacgtgtacacaggcgggaagggctgcgtcaaggtctgggacatcagccaccctggcaataagagccctgtctcccagctcgactgtctgaacagagacaattatatccgttcctgtaaattgctacccgatggctgcactctcatagtgggaggggaagccagtactttgtccatttgggacctggcggctccaaccccgcgcatcaaggcggagctgacgtcctcggcccccgcctgctacgccctggccatcagccccgattccaaggtctgcttctcatgctgcagcgacggcaacatcgctgtgtgggatctgcacaaccagacactagtgaggcaattccagggccacacagacggagccagctgtattgacatttctaatgatggcaccaagctctggacgggtggtttggacaacacagtcaggtcctgggacctgcgcgaggggcggcagctgcagcagcacgacttcacctcccagatcttctccctggggtactgccccaccggggagtggctggcagtgggcatggagagcagcaatgtggaggtgctgcacgtgaacaagcctgacaagtaccagctgcacctgcatgagagctgcgtgctgtccctgaaatttgcttactgtggtaaatggtttgtgagtactggaaaagataacctcctcaatgcttggcggaccccctatggagccagcatattccagtccaaagagtcctcgtcagtgcttagctgtgacatctctgtggatgataagtacatagtcactggctcgggggacaagaaggctacagtctatgaagtcatctactgaaaacattatgtggtttaacgtttatagttgaattgggccaaaatgtttcgaatttatagaaatagaaaagttgtaactttaaaagagaaaaaaaattacaaacacctgtttccaaaccttgacagaaaactactttgagtctacaaagaggaggcgacaagtccatcagcagaaagtcacctgtctacatagaccaaatggagcaccaaggccaagcggacagaggggccatgggttgtaggattgaggaacggaatctgccgactcacatgacagcccattctttctttctgggtgatctggggatcacgccttgcccaagtgtgagattacctttctgttccttgcagttcacctcactttccgtcctttgtagagcagtggtgtctccaatgaacttgtttcctggttttgcatcttgtgaaatgtttttttgtatttttgttgaaggttaaacatttgtataaattgtaaatatatttggtttattacagtaaaggctttagtaccaataa

SEQ ID NO: 192452 - DNA, 936 bp, Homo sapiens
  Payload ID: 18004
  Gene Name: transducin-like enhancer of split 1 (E(sp1) homolog, Drosophila)
  ENST ID: ENST00000418319
  CDS Start-End: 209-936
gggccggagcccgcaccgacgggagcgggagccggagcagctgcgggcgccgagtggccggtgcgcccggcggagcgcgcgtgcgtggccagcgcgctccccgcttctgcttggctttccggcttaattttcctcggcgggattaaagttggaaattgaccggagaattgagttgccggggaacagagccccggccgccgccagagcgatgttcccgcagagccggcacccgacgccgcaccaggctgcaggccagcccttcaagttcactatcccggagtccctggaccggattaaagaggaattccagttcctgcaggcgcagtatcacagccttaaattggaatgtgagaaactggcaagtgaaaagacagaaatgcagaggcactatgtgatgtattatgaaatgtcatatggattaaacattgaaatgcacaaacagactgaaatcgccaagagattgaatacgatttgtgcacaagtcatcccatttctgtctcaggaacatcaacaacaggtggcccaggctgttgaacgtgccaaacaggtgaccatggcagaattgaatgccatcatcggggtacgtggcctaccaggtctacctcctacacagcagcagttgcaagctcagcatctttctcatggccacggacccccagttccccttacgcctcacccttcgggacttcagcctcctggaatcccgcccctcgggggcagtgccggccttcttgcgctgtctagtgctctgagtgggcagtctcacttggcaataaaagatgacaagaagcaccacgatgcagagcaccacagagacagagagccgggcacaagtaattccctcctggtcccagacagtctaagaggcacagataaacgcagaaatggacctgaattttccaatgacatcaagaaaaggaaggtggatgataagga

SEQ ID NO: 192453 - DNA, 2705 bp, Homo sapiens
  Payload ID: 18005
  Gene Name: transducin-like enhancer of split 2
  Uniprot ID: Q04725
  ENST ID: ENST00000262953
  CDS Start-End: 264-2495
tcgccgcgctcccgccccggccgctgcccctgcccgccccgctcgccccgcgcaccccaacccggggaggggctcccacgaccccgggcgcgcgcgcttgggggcgcgccagggactccagggtcccttgccccgcgccgcttctccctcctccctctttcttcgggcagcctccccaccaccccacttcagcctcccccactcttgccgcctccatatcatcaagctctggtggcgcctggggggcttttcggatcggcaggatgtacccccagggaaggcacccgaccccgctccagtccggccagcccttcaagttctcgatcttggagatctgcgaccgcatcaaagaagaattccagtttcttcaggctcaataccacagcctcaagctagaatgtgagaagctggccagcgagaagacggaaatgcagcgacattatgtcatgtattatgagatgtcgtacgggctcaacattgaaatgcataagcaggcggagattgtgaagcgtctgagcggtatctgcgctcagattatccccttcctgacccaggagcatcagcagcaggtgctccaggccgtagaacgcgccaagcaggtcaccgtgggggagctgaacagcctcatcgggcagcagctccagccgctgtcccaccacgcaccccctgtgcccctcaccccccgcccagccgggctggtgggcggcagtgctacggggctgcttgctctgtctggagccctggctgcccaggctcagctggcggcggctgtcaaggaggaccgtgcgggcgtggaggccgaggggtccagagtggagagagccccgagcaggagtgcatctccctcgccccctgagagtctcgtggaggaggagcgaccgagtggccctggtggtggcgggaagcagagagcagatgagaaggagccatcaggaccttatgaaagcgacgaagacaagagtgattacaatctggtggtggacgaggaccaaccctcagagccccccagcccggctaccaccccctgcggaaaggtacccatctgcattcctgcccgtcgggacctggtggacagtccagcctccttggcctctagccttggctcaccgctgcctagagccaaggagctcatcctgaatgaccttcccgccagcactcctgcctccaaatcctgtgactcctccccgccccaggacgcttccacccccgggcccagctcggccagtcacctctgccagcttgctgccaagccagcaccttccacggacagcgtcgccctgaggagccccctgactctgtccagtcccttcaccacgtccttcagcctgggctcccacagcactctcaacggagacctctccgtgcccagctcctacgtcagcctccacctgtccccccaggtcagcagctctgtggtgtacggacgctcccccgtgatggcatttgagtctcatccccatctccgagggtcatccgtctcttcctccctacccagcatccctgggggaaagccggcctactccttccacgtgtctgcggacgggcagatgcagccggttcccttcccctcggatgcactggtaggcgcgggcatcccgcggcacgcccggcagctgcacacgctggcccatggcgaggtggtctgcgcggtcaccatcagcggctccacacagcatgtgtacacgggcggcaagggctgtgtgaaggtgtgggacgtgggccagcctggggccaagacgcccgtggcccagctcgactgcctgaaccgagacaactacattcgttcctgcaagttgctgccggatggccggagtctgatcgtgggcggtgaggccagcaccttgtccatttgggacctggcggcgcccaccccccgtatcaaggccgagctgacttcctcagccccagcctgctacgccctggccgtcagccccgacgccaaggtttgcttctcctgctgcagcgatggcaacattgtggtctgggacctgcagaatcagactatggtcaggcagttccagggccacacggacggcgccagctgcattgatatttccgattacggcactcggctctggacagggggcctggacaacacggtgcgctgctgggacctgcgggagggccgccagctgcagcagcatgacttcagctcccagattttctccctgggccactgccctaaccaggactggctggcggtcggaatggagagtagcaacgtggagatcctgcacgtccgcaagccggagaaataccagctgcacctccacgagagctgcgtgctgtccctgaagtttgcctcctgcggacggtggtttgtgagcaccgggaaggacaacctgctcaacgcctggaggacgccgtacggggccagcattttccagtccaaggagtcgtcctcagtcctgagttgtgacatctccagaaataacaaatacatcgtgacaggctcgggggacaagaaggccaccgtgtatgaggtggtctactgagacatgaccccccttcctgtacccgaagtccagactcccaggggaatcagcagccaggacagacatcctagcagccgcctcccagccctgcctaggaaccgtacatcccatctgctctctggccaacggcttcacaccttcccctgctgcatgtgggggccgatgggcaggggacctcggtggaaataaaatgtatctatcacatccgca

SEQ ID NO: 192454 - DNA, 2238 bp, Homo sapiens
  Payload ID: 18005
  Gene Name: transducin-like enhancer of split 2
  Uniprot ID: Q04725
  ENST ID: ENST00000443826
  CDS Start-End: 207-2072
agaaaagccatttccgactccagactggtccccgctccccgcaagcccccccccccgctcccacgaccccgctccagtccggccagcccttcaagttctcgatcttggagatctgcgaccgcatcaaagaagaattccagtttcttcaggctcaataccacagcctcaagctagaatgtgagaagctggccagcgagaagacggaaatgcagcgacattatgtcatgtattatgagatgtcgtacgggctcaacattgaaatgcataagcaggcggagattgtgaagcgtctgagcggtatctgcgctcagattatccccttcctgacccaggagcatcagcagcaggtgctccaggccgtagaacgcgccaagcaggtcaccgtgggggagctgaacagcctcatcgggagtgcatctccctcgccccctgagagtctcgtggaggaggagcgaccgagtggccctggtggtggcgggaagcagagagcagatgagaaggagccatcaggaccttatgaaagcgacgaagacaagagtgattacaatctggtggtggacgaggaccaaccctcagagccccccagcccggctaccaccccctgcggaaaggtacccatctgcattcctgcccgtcgggacctggtggacagtccagcctccttggcctctagccttggctcaccgctgcctagagccaaggagctcatcctgaatgaccttcccgccagcactcctgcctccaaatcctgtgactcctccccgccccaggacgcttccacccccgggcccagctcggccagtcacctctgccagcttgctgccaagccagcaccttccacggacagcgtcgccctgaggagccccctgactctgtccagtcccttcaccacgtccttcagcctgggctcccacagcactctcaacggagacctctccgtgcccagctcctacgtcagcctccacctgtccccccaggtcagcagctctgtggtgtacggacgctcccccgtgatggcatttgagtctcatccccatctccgagggtcatccgtctcttcctccctacccagcatccctgggggaaagccggcctactccttccacgtgtctgcggacgggcagatgcagccggttcccttcccctcggatgcactggtaggcgcgggcatcccgcggcacgcccggcagctgcacacgctggcccatggcgaggtggtctgcgcggtcaccatcagcggctccacacagcatgtgtacacgggcggcaagggctgtgtgaaggtgtgggacgtgggccagcctggggccaagacgcccgtggcccagctcgactgcctgaaccgagacaactacattcgttcctgcaagttgctgccggatggccggagtctgatcgtgggcggtgaggccagcaccttgtccatttgggacctggcggcgcccaccccccgtatcaaggccgagctgacttcctcagccccagcctgctacgccctggccgtcagccccgacgccaaggtttgcttctcctgctgcagcgatggcaacattgtggtctgggacctgcagaatcagactatggtcaggcagttccagggccacacggacggcgccagctgcattgatatttccgattacggcactcggctctggacagggggcctggacaacacggtgcgctgctgggacctgcgggagggccgccagctgcagcagcatgacttcagctcccagattttctccctgggccactgccctaaccaggactggctggcggtcggaatggagagtagcaacgtggagatcctgcacgtccgcaagccggagaaataccagctgcacctccacgagagctgcgtgctgtccctgaagtttgcctcctgcggacggtggtttgtgagcaccgggaaggacaacctgctcaacgcctggaggacgccgtacggggccagcattttccagtccaaggagtcgtcctcagtcctgagttgtgacatctccagaaataacaaatacatcgtgacaggctcgggggacaagaaggccaccgtgtatgaggtggtctactgagacatgaccccccttcctgtacccgaagtccagactcccaggggaatcagcagccaggacagacatcctagcagccgcctcccagccctgcctaggaaccgtacatcccatctgctctctggccaacggcttcacaccttcccctgctgcatgtgggggccgatgg

SEQ ID NO: 192455 - DNA, 2406 bp, Homo sapiens
  Payload ID: 18005
  Gene Name: transducin-like enhancer of split 2
  Uniprot ID: Q04725
  ENST ID: ENST00000426948
  CDS Start-End: 1-2121
atggtgcaatcacggctcactgcaacctccgcctcccaagattctcctgcttcaggattacagaccccgctccagtccggccagcccttcaagttctcgatcttggagatctgcgaccgcatcaaagaagaattccagtttcttcaggctcaataccacagcctcaagctagaatgtgagaagctggccagcgagaagacggaaatgcagcgacattatgtcatgtattatgagatgtcgtacgggctcaacattgaaatgcataagcaggcggagattgtgaagcgtctgagcggtatctgcgctcagattatccccttcctgacccaggagcatcagcagcaggtgctccaggccgtagaacgcgccaagcaggtcaccgtgggggagctgaacagcctcatcgggcagcagcagctccagccgctgtcccaccacgcaccccctgtgcccctcaccccccgcccagccgggctggtgggcggcagtgctacggggctgcttgctctgtctggagccctggctgcccaggctcagctggcggcggctgtcaaggaggaccgtgcgggcgtggaggccgaggggtccagagtggagagagccccgagcaggagtgcatctccctcgccccctgagagtctcgtggaggaggagcgaccgagtggccctggtggtggcgggaagcagagagcagatgagaaggagccatcaggaccttatgaaagcgacgaagacaagagtgattacaatctggtggtggacgaggaccaaccctcagagccccccagcccggctaccaccccctgcggaaaggtacccatctgcattcctgcccgtcgggacctggtggacagtccagcctccttggcctctagccttggctcaccgctgcctagagccaaggagctcatcctgaatgaccttcccgccagcactcctgcctccaaatcctgtgactcctccccgccccaggacgcttccacccccgggcccagctcggccagtcacctctgccagcttgctgccaagccagcaccttccacggacagcgtcgccctgaggagccccctgactctgtccagtcccttcaccacgtccttcagcctgggctcccacagcactctcaacggagacctctccgtgcccagctcctacgtcagcctccacctgtccccccaggtcagcagctctgtggtgtacggacgctcccccgtgatggcatttgagtctcatccccatctccgagggtcatccgtctcttcctccctacccagcatccctgggggaaagccggcctactccttccacgtgtctgcggacgggcagatgcagccggttcccttcccctcggatgcactggtaggcgcgggcatcccgcggcacgcccggcagctgcacacgctggcccatggcgaggtggtctgcgcggtcaccatcagcggctccacacagcatgtgtacacgggcggcaagggctgtgtgaaggtgtgggacgtgggccagcctggggccaagacgcccgtggcccagctcgactgcctgaaccgagacaactacattcgttcctgcaagttgctgccggatggccggagtctgatcgtgggcggtgaggccagcaccttgtccatttgggacctggcggcgcccaccccccgtatcaaggccgagctgacttcctcagccccagcctgctacgccctggccgtcagccccgacgccaaggtttgcttctcctgctgcagcgatggcaacattgtggtctgggacctgcagaatcagactatggtcaggcagttccagggccacacggacggcgccagctgcattgatatttccgattacggcactcggctctggacagggggcctggacaacacggtgcgctgctgggacctgcgggagggccgccagctgcagcagcatgacttcagctcccagattttctccctgggccactgccctaaccaggactggctggcggtcggaatggagagtagcaacgtggagatcctgcacgtccgcaagccggagaaataccagctgcacctccacgagagctgcgtgctgtccctgaagtttgcctcctgcgtccaaggagtcgtcctcagtcctgagttgtgacatctccagaaataacaaatacatcgtgacaggctcgggggacaagaaggccaccgtgtatgaggtggtctactgagacatgaccccccttcctgtacccgaagtccagactcccaggggaatcagcagccaggacagacatcctagcagccgcctcccagccctgcctaggaaccgtacatcccatctgctctctggccaacggcttcacaccttcccctgctgcatgtgggggccgatgggcaggggacctcggtggaaataaaatgtatctatcacatccgc

SEQ ID NO: 192456 - DNA, 2253 bp, Homo sapiens
  Payload ID: 18005
  Gene Name: transducin-like enhancer of split 2
  Uniprot ID: Q04725
  ENST ID: ENST00000455444
  CDS Start-End: 179-2044
ccccgctcgccccgcgcaccccaacccgcccccccagaccccgctccagtccggccagcccttcaagttctcgatcttggagatctgcgaccgcatcaaagaagaattccagtttcttcaggctcaataccacagcctcaagctagaatgtgagaagctggccagcgagaagacggaaatgcagcgacattatgtcatgtattatgagatgtcgtacgggctcaacattgaaatgcataagcaggcggagattgtgaagcgtctgagcggtatctgcgctcagattatccccttcctgacccaggagcatcagcagcaggtgctccaggccgtagaacgcgccaagcaggtcaccgtgggggagctgaacagcctcatcgggagtgcatctccctcgccccctgagagtctcgtggaggaggagcgaccgagtggccctggtggtggcgggaagcagagagcagatgagaaggagccatcaggaccttatgaaagcgacgaagacaagagtgattacaatctggtggtggacgaggaccaaccctcagagccccccagcccggctaccaccccctgcggaaaggtacccatctgcattcctgcccgtcgggacctggtggacagtccagcctccttggcctctagccttggctcaccgctgcctagagccaaggagctcatcctgaatgaccttcccgccagcactcctgcctccaaatcctgtgactcctccccgccccaggacgcttccacccccgggcccagctcggccagtcacctctgccagcttgctgccaagccagcaccttccacggacagcgtcgccctgaggagccccctgactctgtccagtcccttcaccacgtccttcagcctgggctcccacagcactctcaacggagacctctccgtgcccagctcctacgtcagcctccacctgtccccccaggtcagcagctctgtggtgtacggacgctcccccgtgatggcatttgagtctcatccccatctccgagggtcatccgtctcttcctccctacccagcatccctgggggaaagccggcctactccttccacgtgtctgcggacgggcagatgcagccggttcccttcccctcggatgcactggtaggcgcgggcatcccgcggcacgcccggcagctgcacacgctggcccatggcgaggtggtctgcgcggtcaccatcagcggctccacacagcatgtgtacacgggcggcaagggctgtgtgaaggtgtgggacgtgggccagcctggggccaagacgcccgtggcccagctcgactgcctgaaccgagacaactacattcgttcctgcaagttgctgccggatggccggagtctgatcgtgggcggtgaggccagcaccttgtccatttgggacctggcggcgcccaccccccgtatcaaggccgagctgacttcctcagccccagcctgctacgccctggccgtcagccccgacgccaaggtttgcttctcctgctgcagcgatggcaacattgtggtctgggacctgcagaatcagactatggtcaggcagttccagggccacacggacggcgccagctgcattgatatttccgattacggcactcggctctggacagggggcctggacaacacggtgcgctgctgggacctgcgggagggccgccagctgcagcagcatgacttcagctcccagattttctccctgggccactgccctaaccaggactggctggcggtcggaatggagagtagcaacgtggagatcctgcacgtccgcaagccggagaaataccagctgcacctccacgagagctgcgtgctgtccctgaagtttgcctcctgcggacggtggtttgtgagcaccgggaaggacaacctgctcaacgcctggaggacgccgtacggggccagcattttccagtccaaggagtcgtcctcagtcctgagttgtgacatctccagaaataacaaatacatcgtgacaggctcgggggacaagaaggccaccgtgtatgaggtggtctactgagacatgaccccccttcctgtacccgaagtccagactcccaggggaatcagcagccaggacagacatcctagcagccgcctcccagccctgcctaggaaccgtacatcccatctgctctctggccaacggcttcacaccttcccctgctgcatgtgggggccgatgggcaggggacctcggtggaaataaaatgtatctatcacatccgc

SEQ ID NO: 192457 - DNA, 841 bp, Homo sapiens
  Payload ID: 18005
  Gene Name: transducin-like enhancer of split 2
  ENST ID: ENST00000589364
  CDS Start-End: 1-841
cccaggagcatcagcagcaggtgctccaggccgtagaacgcgccaagcaggtcaccgtgggggagctgaacagcctcatcggggtcagcagctctgtggtgtacggacgctcccccgtgatggcatttgagtctcatccccatctccgagggtcatccgtctcttcctccctacccagcatccctgggggaaagccggcctactccttccacgtgtctgcggacgggcagatgcagccggttcccttcccctcggatgcactggtaggcgcgggcatcccgcggcacgcccggcagctgcacacgctggcccatggcgaggtggtctgcgcggtcaccatcagcggctccacacagcatgtgtacacgggcggcaagggctgtgtgaaggtgtgggacgtgggccagcctggggccaagacgcccgtggcccagctcgactgcctgaaccgagacaactacattcgttcctgcaagttgctgccggatggccggagtctgatcgtgggcggtgaggccagcaccttgtccatttgggacctggcggcgcccaccccccgtatcaaggccgagctgacttcctcagccccagcctgctacgccctggccgtcagccccgacgccaaggtttgcttctcctgctgcagcgatggcaacattgtggtctgggacctgcagaatcagactatggtcaggcagttccagggccacacggacggcgccagctgcattgatatttccgattacggcactcggctctggacagggggcctggacaacacggtgcgctgctgggacctgcgggagggccgccagctgcagcagcatgacttcagctccca

SEQ ID NO: 192458 - DNA, 389 bp, Homo sapiens
  Payload ID: 18005
  Gene Name: transducin-like enhancer of split 2
  ENST ID: ENST00000586422
  CDS Start-End: 18-377
ccagcgagaagacggaaatgcagcgacattatgtcatgtattatgagatgtcgtacgggctcaacattgaaatgcataagcaggcggagattgtgaagcgtctgagcggtatctgcgctcagattatccccttcctgacccaggagcatcagcagcaggtgctccaggccgtagaacgcgccaagcaggtcaccgtgggggagctgaacagcctcatcgggcagcagctccagccgctgtcccaccacgcaccccctgtgcccctcaccccccccctgcctaggaaccgtacatcccatctgctctctggccaacggcttcacaccttcccctgctgcatgtgggggccgatgggcaggggacctcggtggaaataaaatgtatctatc

SEQ ID NO: 192459 - DNA, 2344 bp, Homo sapiens
  Payload ID: 18005
  Gene Name: transducin-like enhancer of split 2
  ENST ID: ENST00000590536
  CDS Start-End: 110-2344
ctctttcttcgggcagcctccccaccaccccacttcagcctcccccactcttgccgcctccatatcatcaagctctggtggcgcctggggggcttttcggatcggcaggatgtacccccagggaaggcacccgaccccgctccagtccggccagcccttcaagttctcgatcttggagatctgcgaccgcatcaaagaagaattccagtttcttcaggctcaataccacagcctcaagctagaatgtgagaagctggccagcgagaagacggaaatgcagcgacattatgtcatgtattatgagatgtcgtacgggctcaacattgaaatgcataagcaggcggagattgtgaagcgtctgagcggtatctgcgctcagattatccccttcctgacccaggagcatcagcagcaggtgctccaggccgtagaacgcgccaagcaggtcaccgtgggggagctgaacagcctcatcgggcagcagcagctccagccgctgtcccaccacgcaccccctgtgcccctcaccccccgcccagccgggctggtgggcggcagtgctacggggctgcttgctctgtctggagccctggctgcccaggctcagctggcggcggctgtcaaggaggaccgtgcgggcgtggaggccgaggggtccagagtggagagagccccgagcaggagtgcatctccctcgccccctgagagtctcgtggaggaggagcgaccgagtggccctggtggtggcgggaagcagagagcagatgagaaggagccatcaggaccttatgaaagcgacgaagacaagagtgattacaatctggtggtggacgaggaccaaccctcagagccccccagcccggctaccaccccctgcggaaaggtacccatctgcattcctgcccgtcgggacctggtggacagtccagcctccttggcctctagccttggctcaccgctgcctagagccaaggagctcatcctgaatgaccttcccgccagcactcctgcctccaaatcctgtgactcctccccgccccaggacgcttccacccccgggcccagctcggccagtcacctctgccagcttgctgccaagccagcaccttccacggacagcgtcgccctgaggagccccctgactctgtccagtcccttcaccacgtccttcagcctgggctcccacagcactctcaacggagacctctccgtgcccagctcctacgtcagcctccacctgtccccccaggtcagcagctctgtggtgtacggacgctcccccgtgatggcatttgagtctcatccccatctccgagggtcatccgtctcttcctccctacccagcatccctgggggaaagccggcctactccttccacgtgtctgcggacgggcagatgcagccggttcccttcccctcggatgcactggtaggcgcgggcatcccgcggcacgcccggcagctgcacacgctggcccatggcgaggtggtctgcgcggtcaccatcagcggctccacacagcatgtgtacacgggcggcaagggctgtgtgaaggtgtgggacgtgggccagcctggggccaagacgcccgtggcccagctcgactgcctgaaccgagacaactacattcgttcctgcaagttgctgccggatggccggagtctgatcgtgggcggtgaggccagcaccttgtccatttgggacctggcggcgcccaccccccgtatcaaggccgagctgacttcctcagccccagcctgctacgccctggccgtcagccccgacgccaaggtttgcttctcctgctgcagcgatggcaacattgtggtctgggacctgcagaatcagactatggtcaggcagttccagggccacacggacggcgccagctgcattgatatttccgattacggcactcggctctggacagggggcctggacaacacggtgcgctgctgggacctgcgggagggccgccagctgcagcagcatgacttcagctcccagattttctccctgggccactgccctaaccaggactggctggcggtcggaatggagagtagcaacgtggagatcctgcacgtccgcaagccggagaaataccagctgcacctccacgagagctgcgtgctgtccctgaagtttgcctcctgcggacggtggtttgtgagcaccgggaaggacaacctgctcaacgcctggaggacgccgtacggggccagcattttccagtccaaggagtcgtcctcagtcctgagttgtgacatctccagaaataacaaatacatcgtgacaggctcgggggacaagaaggccaccgtgtatgaggtggtctactga

SEQ ID NO: 192460 - DNA, 393 bp, Homo sapiens
  Payload ID: 18005
  Gene Name: transducin-like enhancer of split 2
  ENST ID: ENST00000591457
  CDS Start-End: 1-393
tacagaccccgctccagtccggccagcccttcaagttctcgatcttggagatctgcgaccgcatcaaagaagaattccagtttcttcaggctcaataccacagcctcaagctagaatgtgagaagctggccagcgagaagacggaaatgcagcgacattatgtcatgtattatgagatgtcgtacgggctcaacattgaaatgcataagcagagtgcatctccctcgccccctgagagtctcgtggaggaggagcgaccgagtggccctggtggtggcgggaagcagagagcagatgagaaggagccatcaggaccttatgaaagcgacgaagacaagagtgattacaatctggtggtggacgaggaccaaccctcagagccccccagcccgg

SEQ ID NO: 192461 - DNA, 559 bp, Homo sapiens
  Payload ID: 18005
  Gene Name: transducin-like enhancer of split 2
  ENST ID: ENST00000587137
  CDS Start-End: 140-559
cccttgccccgcgccgcttctccctcctccctctttcttcgggcagcctccccaccaccccacttcagcctcccccactcttgccgcctccatatcatcaagctctggtggcgcctggggggcttttcggatcggcaggatgtacccccagggaaggcacccgaccccgctccagtccggccagcccttcaagttctcgatcttggagatctgcgaccgcatcaaagaagaattccagtttcttcaggctcaataccacagcctcaagctagaatgtgagaagctggccagcgagaagacggaaatgcagcgacattatgtcatgtattatgagatgtcgtacgggctcaacattgaaatgcataagcaggcggagattgtgaagcgtctgagcggtatctgcgctcagattatccccttcctgacccaggagagtgcatctccctcgccccctgagagtctcgtggaggaggagcgaccgagtggccctggtggtggcgggaagcagagagcagatgagaaggagccatcaggaccttatgaaagcgacgaagacaag

SEQ ID NO: 192462 - DNA, 2483 bp, Homo sapiens
  Payload ID: 18005
  Gene Name: transducin-like enhancer of split 2
  Uniprot ID: Q04725
  ENST ID: ENST00000591529
  CDS Start-End: 85-2205
gaaaattgtactgagaattagaacttctgcaagggctcaagagtgtcagctagtaataataataataacaatagctgaagtgcaatggtgcaatcacggctcactgcaacctccgcctcccaagattctcctgcttcaggattacagaccccgctccagtccggccagcccttcaagttctcgatcttggagatctgcgaccgcatcaaagaagaattccagtttcttcaggctcaataccacagcctcaagctagaatgtgagaagctggccagcgagaagacggaaatgcagcgacattatgtcatgtattatgagatgtcgtacgggctcaacattgaaatgcataagcaggcggagattgtgaagcgtctgagcggtatctgcgctcagattatccccttcctgacccaggagcatcagcagcaggtgctccaggccgtagaacgcgccaagcaggtcaccgtgggggagctgaacagcctcatcgggcagcagcagctccagccgctgtcccaccacgcaccccctgtgcccctcaccccccgcccagccgggctggtgggcggcagtgctacggggctgcttgctctgtctggagccctggctgcccaggctcagctggcggcggctgtcaaggaggaccgtgcgggcgtggaggccgaggggtccagagtggagagagccccgagcaggagtgcatctccctcgccccctgagagtctcgtggaggaggagcgaccgagtggccctggtggtggcgggaagcagagagcagatgagaaggagccatcaggaccttatgaaagcgacgaagacaagagtgattacaatctggtggtggacgaggaccaaccctcagagccccccagcccggctaccaccccctgcggaaaggtacccatctgcattcctgcccgtcgggacctggtggacagtccagcctccttggcctctagccttggctcaccgctgcctagagccaaggagctcatcctgaatgaccttcccgccagcactcctgcctccaaatcctgtgactcctccccgccccaggacgcttccacccccgggcccagctcggccagtcacctctgccagcttgctgccaagccagcaccttccacggacagcgtcgccctgaggagccccctgactctgtccagtcccttcaccacgtccttcagcctgggctcccacagcactctcaacggagacctctccgtgcccagctcctacgtcagcctccacctgtccccccaggtcagcagctctgtggtgtacggacgctcccccgtgatggcatttgagtctcatccccatctccgagggtcatccgtctcttcctccctacccagcatccctgggggaaagccggcctactccttccacgtgtctgcggacgggcagatgcagccggttcccttcccctcggatgcactggtaggcgcgggcatcccgcggcacgcccggcagctgcacacgctggcccatggcgaggtggtctgcgcggtcaccatcagcggctccacacagcatgtgtacacgggcggcaagggctgtgtgaaggtgtgggacgtgggccagcctggggccaagacgcccgtggcccagctcgactgcctgaaccgagacaactacattcgttcctgcaagttgctgccggatggccggagtctgatcgtgggcggtgaggccagcaccttgtccatttgggacctggcggcgcccaccccccgtatcaaggccgagctgacttcctcagccccagcctgctacgccctggccgtcagccccgacgccaaggtttgcttctcctgctgcagcgatggcaacattgtggtctgggacctgcagaatcagactatggtcaggcagttccagggccacacggacggcgccagctgcattgatatttccgattacggcactcggctctggacagggggcctggacaacacggtgcgctgctgggacctgcgggagggccgccagctgcagcagcatgacttcagctcccagattttctccctgggccactgccctaaccaggactggctggcggtcggaatggagagtagcaacgtggagatcctgcacgtccgcaagccggagaaataccagctgcacctccacgagagctgcgtgctgtccctgaagtttgcctcctgcgtccaaggagtcgtcctcagtcctgagttgtgacatctccagaaataacaaatacatcgtgacaggctcgggggacaagaaggccaccgtgtatgaggtggtctactgagacatgaccccccttcctgtacccgaagtccagactcccaggggaatcagcagccaggacagacatcctagcagccgcctcccagccctgcctaggaaccgtacatcccatctgctctctggccaacggcttcacaccttcccctgctgcatgtgggggccgatgggcaggggacctcggtggaaataaaatgtatctatca

SEQ ID NO: 192463 - DNA, 600 bp, Homo sapiens
  Payload ID: 18005
  Gene Name: transducin-like enhancer of split 2
  ENST ID: ENST00000592584
  CDS Start-End: 66-600
gaaaagccatttccgactccagactggtccccgctccccgcaagcccccccccccgctcccacggatgtacccccagggaaggcacccgaccccgctccagtccggccagcccttcaagttctcgatcttggagatctgcgaccgcatcaaagaagaattccagtttcttcaggctcaataccacagcctcaagctagaatgtgagaagctggccagcgagaagacggaaatgcagcgacattatgtcatgtattatgagatgtcgtacgggctcaacattgaaatgcataagcaggcggagattgtgaagcgtctgagcggtatctgcgctcagattatccccttcctgacccaggagcatcagcagcaggtgctccaggccgtagaacgcgccaagcaggtcaccgtgggggagctgaacagcctcatcgggcagcagcagctccagccgctgtcccaccacgcaccccctgtgcccctcaccccccgcccagccgggctggtgggcggcagtgctacggggctgcttgctctgtctggagccctggctgcccaggctcagctggcggcggctgtcaaggaggaccgtgcgggcgtgg

SEQ ID NO: 192464 - DNA, 5207 bp, Homo sapiens
  Payload ID: 18006
  Gene Name: transducin-like enhancer of split 3
  Uniprot ID: Q04726
  ENST ID: ENST00000317509
  CDS Start-End: 1103-3385
gctctcgcggcagttcagacctcgtgctcgtccccttcgcctgtctgtgtgtggtatccgtaggtccggggcacttttttttttggtgtgtgtgtgtgtgcgtgcgcgcgtgtgtgtgtgttgggtgtgtgtgttttgggggtttgccggggcgcggagaggagagccgggccgaggggaaggaaggaagccgtagagctccccggtctcgggctgcgtctcccctccagcgctctcctgcctgtgcgctccgacgcggcagcggcggtggcgctgagcgctcctcggtggggacgcggtgctcaagctgggagcagcgagaaccctttgcggaggcttcccgtgcccgctggacttaggatgccagggcgtttgatttgcacctactgagcccggagttcctccccggccctgggaagggcttgcagcggcggcggcggcggcggcagcggcagtagcagacggaacagcaggctctcctctccgagggggggcgtcgaagcgcccgcgccgggctcccgccctcaccctccggcgctcctgcggccccaagccaccacctcgtagcccgcctccttcctcttctcgccgcgagccccaggcccggacgcctctaggatcggacccgcgcgccccggatgcttggggctgccccggcgcgcccccctacaggcgcgacccgctgagtgacccggagggggcccgagctcgccccaggaggggcccccggcctcgggaccccgcgccggacctgctggggagccgacgatgtccgcgcagtcccaggcattgacgcgctcgacgcagcccagggaaggcggccggccgctgcccgccgagccctaggcgcacaaagcccgcgcccgccgcccggccccggcgcccgccgacgactttgccgcctgctccgcggctctttgtctccacttggggcgggcgcccgactctgggatttcgctgcgagaacgagctgggggggccgggggcgagctctcggtttcccggccgccccccgctcgggctcggctcccccctcccccgcacctccccggcccgggctctcggcgcttccacgctctcggaatcacgacccctccctgccatgtatccgcagggcagacatccggctccccatcaacccgggcagccgggatttaaattcacggtggctgagtcttgtgacaggatcaaagacgaattccagttcctgcaagctcagtatcacagcctcaaagtggagtacgacaagctggcaaacgagaagacggagatgcagcgccattatgtgatgtactatgagatgtcctatggcttgaacattgaaatgcacaagcagacagagattgcgaagagactgaacacaattttagcacagatcatgcctttcctgtcacaagagcaccagcagcaggtggcgcaggcagtggagcgcgccaagcaggtcaccatgacggagctgaacgccatcatcgggcagcagcagctccaggcgcagcacctctcccatgccacacacggccccccggtccagttgccaccccacccgtcaggtctccagcctccaggaatccccccagtgacagggagcagctccgggctgctggcactgggcgccctgggcagccaggcccatctgacggtgaaggatgagaagaaccaccatgaactcgatcacagagagagagaatccagtgcgaataactctgtgtcaccctcggaaagcctccgggccagtgagaagcaccggggctctgcggactacagcatggaagccaagaagcggaaggcggaggagaaggacagcttgagccgatacgacagtgatggagacaagagtgatgatctggtggtggatgtttccaatgaggaccccgcaacgccccgggtcagcccggcacactcccctcctgaaaatgggctggacaaggcccgtagcctgaaaaaagatgcccccaccagccctgcctcggtggcctcttccagtagcacaccttcctccaagaccaaagaccttggtcataacgacaaatcctccacccctgggctcaagtccaacacaccaaccccaaggaacgacgccccaactccaggcaccagcacgaccccagggctcaggtcgatgccggcctcggctctgcgcacgcccatctccatcaccagctcctatgcggcgcccttcgccatgatgagccaccatgagatgaacggctccctcaccagtcctggcgcctacgccggcctccacaacatcccaccccagatgagcgccgccgccgctgctgcagccgctgcctatggccgatcgccaatggtgagctttggagctgttggttttgaccctcaccccccgatgcgggccacaggcctcccctcaagcctggcctccattcctggaggaaaaccagcgtactcattccatgtgagtgctgatgggcagatgcagcccgtgcccttcccccacgacgccctggcaggccccggcatcccgaggcacgcccggcagatcaacacactcagccacggggaggtggtgtgtgccgtgaccatcagcaaccccacgaggcacgtctacacaggtggcaagggctgcgtgaagatctgggacatcagccagccaggcagcaagagccccatctcccagctggactgcctgaacagggacaattacatccgctcctgcaagctgctccctgatgggcgcacgctcatcgtgggcggcgaggccagcacgctcaccatctgggacctggcctcgcccacgccccgcatcaaggccgagctgacgtcctcggctcccgcctgttatgccctggccattagccctgacgccaaagtctgcttctcctgctgcagcgatgggaacattgctgtctgggacctgcacaaccagaccctggtcaggcagttccagggccacacagatggggccagctgcatagacatctcccatgatggcaccaaactgtggacagggggcctggacaacacggtgcgctcctgggacctgcgggagggccgacagctacagcagcatgacttcacttcccagatcttctcgctgggctactgccccactggggagtggctggctgtgggcatggagagcagcaacgtggaggtgctgcaccacaccaagcctgacaagtaccagctgcacctgcacgagagctgcgtgctctccctcaagttcgcctactgcggcaagtggttcgtgagcactgggaaagataaccttctcaacgcctggaggacgccttatggagccagcatattccagtctaaagaatcctcgtctgtcttgagttgtgacatttcagcggatgacaaatacattgtaacaggctctggtgacaagaaggccacagtttatgaggtcatctactaaacaagaactccagcagggctgtcaaactctgggagaaaccgactcggctctgacagggagacccccaggcgaggggccccgaggatggcggaggatgggccgcaggcagccgagcgttcagggctgcgctccggccggctgagagggcacgtgccccgtcacagtctggactcctgggcctggattgatgtgtctcacagactcggaagggttctgctcctcctcctccccctgaacaatgctggcagttgctacaaatagatttattggaggcttatggctccggttcccccacagacccgctcatgagtctctgtttgttcttcccttttcttttgccctgtccctcaccttgggtcgggggtgctggagtggaccacaatgttgtgctgggggatgggggggtctctctttgccgattgtgcagtgcacaagatttgtgaaaaatgtaaataacagactcctattgcggactgatcagtgggagaggaggccccttcccaccggaaactctgagtgtgtatttcgcctgctgtatttgtaatccactcgtggtggtggcttttttttttttttttttttaaataaacagatgctctcacctgggaagaggagacagggaggggaaccaattgaagaaagaggagaaaagtcttagagtgtggaaaaggcaaccaggttggccgtaaggtgcctgctggaatgcgtgtgcctccacacgggtctgggcatccggactgataaccagccggccagactgagggatggaaggcactgagatgggggcccgtccaggcggacacccgcagaaatggagctttctgtggtctcttgcactctggctgcctcttgccctctctgtgtctctctttcttggtctctccctctctcctcctcagcctggtctttctctttggtgcacacttagttattgttgtgagcaatggaagttcaaaggaactccctctccagctcttctgaatcttgggacacagcctaaaaaggacaaaaagttagaagacagcatagcaactcagctcagggagctaccagagaaaaatagcaactgatgtgggtgctttttttttttttttaatttgaataaaaagaattagaagtgatgtccttttataaaatgccttctcccccttcccgcctacagtctcttcctctccccttagaggggggaaagtgtataaacctacagggttgtgagtctgaaaagaggatccccctcacccccaccctgggcagagcagtgggggttggggggtgggagagggggacacagatcctggcacactgtggatatttcttgcagattgcagtctcttgtggcccaaacaggttaggtagactatcgcctctggcaggtgccaccttttggtaccaacatgttctgaggtgttaggatttgggttgggttttttttgtttgttttttttttccttttggtctttttttttttctccttttaaagaaaagctaaaggccgctgtgagtcctggtggcaggctctccatggatgtagcatatcgaagataatttttatactgcatttttatggattattttgtaatgtgtgattccgtctgctgaggaggtgggaggggctccagggaaagccacccaccttcagtgaggttgctccccagctgagcgcaccgggcatgggatgtggaggctggcgacacaccctgtgcctctccaaggctgggcgcgtggggcgtccagagtctctctgggtctcagatgtccatctgccacctcttgttaaggctctagccagaagggagggtgagggtagaagaaagttattccc

SEQ ID NO: 192465 - DNA, 2356 bp, Homo sapiens
  Payload ID: 18006
  Gene Name: transducin-like enhancer of split 3
  Uniprot ID: Q04726
  ENST ID: ENST00000451782
  CDS Start-End: 47-2356
ggctctcggcgcttccacgctctcggaatcacgacccctccctgccatgtatccgcagggcagacatccggctccccatcaacccgggcagccgggatttaaattcacggtggctgagtcttgtgacaggatcaaagacgaattccagttcctgcaagctcagtatcacagcctcaaagtggagtacgacaagctggcaaacgagaagacggagatgcagcgccattatgtgatgtactatgagatgtcctatggcttgaacattgaaatgcacaagcagacagagattgcgaagagactgaacacaattttagcacagatcatgcctttcctgtcacaagagcaccagcagcaggtggcgcaggcagtggagcgcgccaagcaggtcaccatgacggagctgaacgccatcatcgggcagcagcagctccaggcgcagcacctctcccatgccacacacggccccccggtccagttgccaccccacccgtcaggtctccagcctccaggaatccccccagtgacagggagcagctccgggctgctggcactgggcgccctgggcagccaggcccatctgacggtgaaggatgagaagaaccaccatgaactcgatcacagagagagagaatccagtgcgaataactctgtgtcaccctcggaaagcctccgggccagtgagaagcaccggggctctgcggactacagcatggaagccaagaagcggaaggcggaggagaaggacagcttgagccgatacgacagtgatggagacaagagtgatgatctggtggtggatgtttccaatgaggaccccgcaacgccccgggtcagcccggcacactcccctcctgaaaatgggctggacaaggcccgtagcctgaaaaaagatgcccccaccagccctgcctcggtggcctcttccagtagcacaccttcctccaagaccaaagaccttggtcataacgacaaatcctccacccctgggctcaagtccaacacaccaaccccaaggaacgacgccccaactccaggcaccagcacgaccccagggctcaggtcgatgccgggtaaacctccgggcatggacccgatagcctcggctctgcgcacgcccatctccatcaccagctcctatgcggcgcccttcgccatgatgagccaccatgagatgaacggctccctcaccagtcctggcgcctacgccggcctccacaacatcccaccccagatgagcgccgccgccgctgctgcagccgctgcctatggccgatcgccaatggtgagctttggagctgttggttttgaccctcaccccccgatgcgggccacaggcctcccctcaagcctggcctccattcctggaggaaaaccagcgtactcattccatgtgagtgctgatgggcagatgcagcccgtgcccttcccccacgacgccctggcaggccccggcatcccgaggcacgcccggcagatcaacacactcagccacggggaggtggtgtgtgccgtgaccatcagcaaccccacgaggcacgtctacacaggtggcaagggctgcgtgaagatctgggacatcagccagccaggcagcaagagccccatctcccagctggactgcctgaacagggacaattacatccgctcctgcaagctgctccctgatgggcgcacgctcatcgtgggcggcgaggccagcacgctcaccatctgggacctggcctcgcccacgccccgcatcaaggccgagctgacgtcctcggctcccgcctgttatgccctggccattagccctgacgccaaagtctgcttctcctgctgcagcgatgggaacattgctgtctgggacctgcacaaccagaccctggtcaggcagttccagggccacacagatggggccagctgcatagacatctcccatgatggcaccaaactgtggacagggggcctggacaacacggtgcgctcctgggacctgcgggagggccgacagctacagcagcatgacttcacttcccagatcttctcgctgggctactgccccactggggagtggctggctgtgggcatggagagcagcaacgtggaggtgctgcaccacaccaagcctgacaagtaccagctgcacctgcacgagagctgcgtgctctccctcaagttcgcctactgcggcaagtggttcgtgagcactgggaaagataaccttctcaacgcctggaggacgccttatggagccagcatattccagtctaaagaatcctcgtctgtcttgagttgtgacatttcagcggatgacaaatacattgtaacaggctctggtgacaagaaggccacagtttatgaggtcatctactaa

SEQ ID NO: 192466 - DNA, 2657 bp, Homo sapiens
  Payload ID: 18006
  Gene Name: transducin-like enhancer of split 3
  Uniprot ID: Q04726
  ENST ID: ENST00000440567
  CDS Start-End: 74-2362
atttaagcatctatcatggcagggtaaacgaggcagtttatctggcacctccattttgcttgttgctacctttatggctccccatcaacccgggcagccgggatttaaattcacggtggctgagtcttgtgacaggatcaaagacgaattccagttcctgcaagctcagtatcacagcctcaaagtggagtacgacaagctggcaaacgagaagacggagatgcagcgccattatgtgatgtactatgagatgtcctatggcttgaacattgaaatgcacaagcagacagagattgcgaagagactgaacacaattttagcacagatcatgcctttcctgtcacaagagcaccagcagcaggtggcgcaggcagtggagcgcgccaagcaggtcaccatgacggagctgaacgccatcatcgggcagcagcagctccaggcgcagcacctctcccatgccacacacggccccccggtccagttgccaccccacccgtcaggtctccagcctccaggaatccccccagtgacagggagcagctccgggctgctggcactgggcgccctgggcagccaggcccatctgacggtgaaggatgagaagaaccaccatgaactcgatcacagagagagagaatccagtgcgaataactctgtgtcaccctcggaaagcctccgggccagtgagaagcaccggggctctgcggactacagcatggaagccaagaagcggaaggcggaggagaaggacagcttgagccgatacgacagtgatggagacaagagtgatgatctggtggtggatgtttccaatgaggaccccgcaacgccccgggtcagcccggcacactcccctcctgaaaatgggctggacaaggcccgtagcctgaaaaaagatgcccccaccagccctgcctcggtggcctcttccagtagcacaccttcctccaagaccaaagaccttggtcataacgacaaatcctccacccctgggctcaagtccaacacaccaaccccaaggaacgacgccccaactccaggcaccagcacgaccccagggctcaggtcgatgccgggtaaacctccgggcatggacccgatagcctcggctctgcgcacgcccatctccatcaccagctcctatgcggcgcccttcgccatgatgagccaccatgagatgaacggctccctcaccagtcctggcgcctacgccggcctccacaacatcccaccccagatgagcgccgccgccgctgctgcagccgctgcctatggccgatcgccaatggtgagctttggagctgttggttttgaccctcaccccccgatgcgggccacaggcctcccctcaagcctggcctccattcctggaggaaaaccagcgtactcattccatgtgagtgctgatgggcagatgcagcccgtgcccttcccccacgacgccctggcaggccccggcatcccgaggcacgcccggcagatcaacacactcagccacggggaggtggtgtgtgccgtgaccatcagcaaccccacgaggcacgtctacacaggtggcaagggctgcgtgaagatctgggacatcagccagccaggcagcaagagccccatctcccagctggactgcctgaacagggacaattacatccgctcctgcaagctgctccctgatgggcgcacgctcatcgtgggcggcgaggccagcacgctcaccatctgggacctggcctcgcccacgccccgcatcaaggccgagctgacgtcctcggctcccgcctgttatgccctggccattagccctgacgccaaagtctgcttctcctgctgcagcgatgggaacattgctgtctgggacctgcacaaccagaccctggtcaggcagttccagggccacacagatggggccagctgcatagacatctcccatgatggcaccaaactgtggacagggggcctggacaacacggtgcgctcctgggacctgcgggagggccgacagctacagcagcatgacttcacttcccagatcttctcgctgggctactgccccactggggagtggctggctgtgggcatggagagcagcaacgtggaggtgctgcaccacaccaagcctgacaagtaccagctgcacctgcacgagagctgcgtgctctccctcaagttcgcctactgcggcaagtggttcgtgagcactgggaaagataaccttctcaacgcctggaggacgccttatggagccagcatattccagtctaaagaatcctcgtctgtcttgagttgtgacatttcagcggatgacaaatacattgtaacaggctctggtgacaagaaggccacagtttatgaggtcatctactaaacaagaactccagcagggctgtcaaactctgggagaaaccgactcggctctgacagggagacccccaggcgaggggccccgaggatggcggaggatgggccgcaggcagccgagcgttcagggctgcgctccggccggctgagagggcacgtgccccgtcacagtctggactcctgggcctggattgatgtgtctcacagactcggaagggttctgctcctcctcctccccctgaacaatgctggcagttgctacaaatagatttattggaggcttatggctccggttcccccac

SEQ ID NO: 192467 - DNA, 2464 bp, Homo sapiens
  Payload ID: 18006
  Gene Name: transducin-like enhancer of split 3
  ENST ID: ENST00000539550
  CDS Start-End: 70-2169
aatataacgttctgttgagatgagaggaacgctcgcccttgtcagctcttaaaccgctcttactatgagatgtcctatggcttgaacattgaaatgcacaagcagacagagattgcgaagagactgaacacaattttagcacagatcatgcctttcctgtcacaagagcaccagcagcaggtggcgcaggcagtggagcgcgccaagcaggtcaccatgacggagctgaacgccatcatcggggtacgtggactccccaatctgcctcttacccagcagcagctccaggcgcagcacctctcccatgccacacacggccccccggtccagttgccaccccacccgtcaggtctccagcctccaggaatccccccagtgacagggagcagctccgggctgctggcactgggcgccctgggcagccaggcccatctgacggtgaaggatgagaagaaccaccatgaactcgatcacagagagagagaatccagtgcgaataactctgtgtcaccctcggaaagcctccgggccagtgagaagcaccggggctctgcggactacagcatggaagccaagaagcggaaggcggaggagaaggacagcttgagccgatacgacagtgatggagacaagagtgatgatctggtggtggatgtttccaatgaggaccccgcaacgccccgggtcagcccggcacactcccctcctgaaaatgggctggacaaggcccgtagcctgaaaaaagatgcccccaccagccctgcctcggtggcctcttccagtagcacaccttcctccaagaccaaagaccttggtcataacgacaaatcctccacccctgggctcaagtccaacacaccaaccccaaggaacgacgccccaactccaggcaccagcacgaccccagggctcaggtcgatgccggcctcggctctgcgcacgcccatctccatcaccagctcctatgcggcgcccttcgccatgatgagccaccatgagatgaacggctccctcaccagtcctggcgcctacgccggcctccacaacatcccaccccagatgagcgccgccgccgctgctgcagccgctgcctatggccgatcgccaatggttggttttgaccctcaccccccgatgcgggccacaggcctcccctcaagcctggcctccattcctggaggaaaaccagcgtactcattccatgtgagtgctgatgggcagatgcagcccgtgcccttcccccacgacgccctggcaggccccggcatcccgaggcacgcccggcagatcaacacactcagccacggggaggtggtgtgtgccgtgaccatcagcaaccccacgaggcacgtctacacaggtggcaagggctgcgtgaagatctgggacatcagccagccaggcagcaagagccccatctcccagctggactgcctgaacagggacaattacatccgctcctgcaagctgctccctgatgggcgcacgctcatcgtgggcggcgaggccagcacgctcaccatctgggacctggcctcgcccacgccccgcatcaaggccgagctgacgtcctcggctcccgcctgttatgccctggccattagccctgacgccaaagtctgcttctcctgctgcagcgatgggaacattgctgtctgggacctgcacaaccagaccctggtcaggcagttccagggccacacagatggggccagctgcatagacatctcccatgatggcaccaaactgtggacagggggcctggacaacacggtgcgctcctgggacctgcgggagggccgacagctacagcagcatgacttcacttcccagatcttctcgctgggctactgccccactggggagtggctggctgtgggcatggagagcagcaacgtggaggtgctgcaccacaccaagcctgacaagtaccagctgcacctgcacgagagctgcgtgctctccctcaagttcgcctactgcggcaagtggttcgtgagcactgggaaagataaccttctcaacgcctggaggacgccttatggagccagcatattccagtctaaagaatcctcgtctgtcttgagttgtgacatttcagcggatgacaaatacattgtaacaggctctggtgacaagaaggccacagtttatgaggtcatctactaaacaagaactccagcagggctgtcaaactctgggagaaaccgactcggctctgacagggagacccccaggcgaggggccccgaggatggcggaggatgggccgcaggcagccgagcgttcagggctgcgctccggccggctgagagggcacgtgccccgtcacagtctggactcctgggcctggattgatgtgtctcacagactcggaagggttctgctcctcctcctccccctgaacaatgctggcagttgctacaaatagatttattggaggcttatggctccggttcccccac

SEQ ID NO: 192468 - DNA, 4294 bp, Homo sapiens
  Payload ID: 18006
  Gene Name: transducin-like enhancer of split 3
  ENST ID: ENST00000557919
  CDS Start-End: 774-2111
gcggaggcttcccgtgcccgctggacttaggatgccagggcgtttgatttgcacctactgagcccggagttcctccccggccctgggaagggcttgcagcggcggcggcggcggcggcagcggcagtagcagacggaacagcaggctctcctctccgagggggggcgtcgaagcgcccgcgccgggctcccgccctcaccctccggcgctcctgcggccccaagccaccacctcgtagcccgcctccttcctcttctcgccgcgagccccaggcccggacgcctctaggatcggacccgcgcgccccggatgcttggggctgccccggcgcgcccccctacaggcgcgacccgctgagtgacccggagggggcccgagctcgccccaggaggggcccccggcctcgggaccccgcgccggacctgctggggagccgacgatgtccgcgcagtcccaggcattgacgcgctcgacgcagcccagggaaggcggccggccgctgcccgccgagccctaggcgcacaaagcccgcgcccgccgcccggccccggcgcccgccgacgactttgccgcctgctccgcggctctttgtctccacttggggcgggcgcccgactctgggatttcgctgcgagaacgagctgggggggccgggggcgagctctcggtttcccggccgccccccgctcgggctcggctcccccctcccccgcacctccccggcccgggctctcggcgcttccacgctctcggaatcacgacccctccctgccatgtatccgcagggcagacatccggctccccatcaacccgggcagccgggatttaaattcacggtggctgagtcttgtgacaggatcaaagacgaattccagttcctgcaagctcagtatcacagcctcaaagtggagtacgacaagctggcaaacgagaagacggagatgcagcgccattatgtgatgtactatgagatgtcctatggcttgaacattgaaatgcacaagcagacagagattgcgaagagactgaacacaattttagcacagatcatgcctttcctgtcacaagagcaccagcagcaggtggcgcaggcagtggagcgcgccaagcaggtcaccatgacggagctgaacgccatcatcgggcagcagcagctccaggcgcagcacctctcccatgccacacacggccccccggtccagttgccaccccacccgtcaggtctccagcctccaggaatccccccagtgacagggagcagctccgggctgctggcactgggcgccctgggcagccaggcccatctgacggtgaaggatgagaagaaccaccatgaactcgatcacagagagagagaatccagtgcgaataactctgtgtcaccctcggaaagcctccgggccagtgagaagcaccggggctctgcggactacagcatggaagccaagaagcggaaggcggaggagaaggacagcttgagccgatacgacagtgatggagacaagagtgatgatctggtggtggatgtttccaatgaggaccccgcaacgccccgggtcagcccggcacactcccctcctgaaaatgggctggacaaggcccgtagcctgaaaaaagatgcccccaccagccctgcctcggtggcctcttccagtagcacaccttcctccaagaccaaagaccttggtcataacgacaaatcctccacccctgggctcaagtccaacacaccaaccccaaggaacgacgccccaactccaggcaccagcacgaccccagggctcaggtcgatgccgggtaaacctccgggcatggacccgatagcctcggctctgcgcacgcccatctccatcaccagctcctatgcggcgcccttcgccatgatgagccaccatgagatgaacggctccctcaccagtcctggcgcctacgccggcctccacaacatcccaccccagatgagcgccgccgccgctgctgcagccgctgcctatggccgatcgccaatggttggttttgaccctcaccccccgatgcgggccacaggcctcccctcaagcctggcctccattcctggaggaaaacccgtactcattccatgtgagtgctgatgggcagatgcagcccgtgcccttcccccacgacgccctggcaggccccggcatcccgaggcacgcccggcagatcaacacactcagccacggggaggtggtgtgtgccgtgaccatcagcaaccccacgaggcacgtctacacaggtggcaagggctgcgtgaagatctgggacatcagccagccaggcagcaagagccccatctcccagctggactgcctgaacagggacaattacatccgctcctgcaagctgctccctgatgggcgcacgctcatcgtgggcggcgaggccagcacgctcaccatctgggacctggcctcgcccacgccccgcatcaaggccgagctgacgtcctcggctcccgcctgttatgccctggccattagccctgacgccaaagtctgcttctcctgctgcagcgatgggaacattgctgtctgggacctgcacaaccagaccctggtcaggcagttccagggccacacagatggggccagctgcatagacatctcccatgatggcaccaaactgtggacagggggcctggacaacacggtgcgctcctgggacctgcgggagggccgacagctacagcagcatgacttcacttcccagatcttctcgctgggctactgccccactggggagtggctggctgtgggcatggagagcagcaacgtggaggtgctgcaccacaccaagcctgacaagtaccagctgcacctgcacgagagctgcgtgctctccctcaagttcgcctactgcggcaagtggttcgtgagcactgggaaagataaccttctcaacgcctggaggacgccttatggagccagcatattccagtctaaagaatcctcgtctgtcttgagttgtgacatttcagcggatgacaaatacattgtaacaggctctggtgacaagaaggccacagtttatgaggtcatctactaaacaagaactccagcagggctgtcaaactctgggagaaaccgactcggctctgacagggagacccccaggcgaggggccccgaggatggcggaggatgggccgcaggcagccgagcgttcagggctgcgctccggccggctgagagggcacgtgccccgtcacagtctggactcctgggcctggattgatgtgtctcacagactcggaagggttctgctcctcctcctccccctgaacaatgctggcagttgctacaaatagatttattggaggcttatggctccggttcccccacagacccgctcatgagtctctgtttgttcttcccttttcttttgccctgtccctcaccttgggtcgggggtgctggagtggaccacaatgttgtgctgggggatgggggggtctctctttgccgattgtgcagtgcacaagatttgtgaaaaatgtaaataacagactcctattgcggactgatcagtgggagaggaggccccttcccaccggaaactctgagtgtgtatttcgcctgctgtatttgtaatccactcgtggtggtggcttttttttttttttttttttaaataaacagatgctctcacctgggaagaggagacagggaggggaaccaattgaagaaagaggagaaaagtcttagagtgtggaaaaggcaaccaggttggccgtaaggtgcctgctggaatgcgtgtgcctccacacgggtctgggcatccggactgataaccagccggccagactgagggatggaaggcactgagatgggggcccgtccaggcggacacccgcagaaatggagctttctgtggtctcttgcactctggctgcctcttgccctctctgtgtctctctttcttggtctctccctctctcctcctcagcctggtctttctctttggtgcacacttagttattgttgtgagcaatggaagttcaaaggaactccctctccagctcttctgaatcttgggacacagcctaaaaaggacaaaaagttagaagacagcatagcaactcagctcagggagctaccagagaaaaatagcaactgatgtgggtgctttttttttttttttaatttgaataaaaagaattagaagtgatgtccttttataaaatgccttctcccccttcccgcctacagtctcttcctctccccttagaggggggaaagtgtataaacctacagggttgtgagtctgaaaagagg

SEQ ID NO: 192469 - DNA, 478 bp, Homo sapiens
  Payload ID: 18006
  Gene Name: transducin-like enhancer of split 3
  ENST ID: ENST00000557984
  CDS Start-End: 17-478
attatgtgatggtgagatgcggccgcgggcctggggggcggttggggcgccgaccccggccgggggcgcggcgtggatctggggagatgagcgccaggtccccaccaccgcccagccgcagggcggccctgagagagggcataatctggtcttgccctccccttccccagcttccattgccggggccacttggaggaggtactatgagatgtcctatggcttgaacattgaaatgcacaagcagacagagattgcgaagagactgaacacaattttagcacagatcatgcctttcctgtcacaagagcaccagcagcaggtggcgcaggcagtggagcgcgccaagcaggtcaccatgacggagctgaacgccatcatcgggcagcagcagctccaggcgcagcacctctcccatgccacacacggccccccggtccagttgccaccccacccgtcaggtctccagcctccaggaatc

SEQ ID NO: 192470 - DNA, 6004 bp, Homo sapiens
  Payload ID: 18006
  Gene Name: transducin-like enhancer of split 3
  Uniprot ID: Q04726
  ENST ID: ENST00000558939
  CDS Start-End: 1379-3697
tataatatatatctatttattatatgtctttcggttaattcctgatctgaggagcgctgtttttcactcccatgcgaaagtcaccagcgggtagggcctgattgctacttttcatgcatagttttagacacaagagggcattgtgacgtcgcgcccagcggcacccagtcgtaggccgagtcccgcagccccacgtgggggccccgcgctcccattggccagcgccggacgaagctgccacattattttgttacttttcagtccctatttggaactgctctcgcggcagttcagacctcgtgctcgtccccttcgcctgtctgtgtgtggtatccgtaggtccggggcacttttttttttggtgtgtgtgtgtgtgcgtgcgcgcgtgtgtgtgtgttgggtgtgtgtgttttgggggtttgccggggcgcggagaggagagccgggccgaggggaaggaaggaagccgtagagctccccggtctcgggctgcgtctcccctccagcgctctcctgcctgtgcgctccgacgcggcagcggcggtggcgctgagcgctcctcggtggggacgcggtgctcaagctgggagcagcgagaaccctttgcggaggcttcccgtgcccgctggacttaggatgccagggcgtttgatttgcacctactgagcccggagttcctccccggccctgggaagggcttgcagcggcggcggcggcggcggcagcggcagtagcagacggaacagcaggctctcctctccgagggggggcgtcgaagcgcccgcgccgggctcccgccctcaccctccggcgctcctgcggccccaagccaccacctcgtagcccgcctccttcctcttctcgccgcgagccccaggcccggacgcctctaggatcggacccgcgcgccccggatgcttggggctgccccggcgcgcccccctacaggcgcgacccgctgagtgacccggagggggcccgagctcgccccaggaggggcccccggcctcgggaccccgcgccggacctgctggggagccgacgatgtccgcgcagtcccaggcattgacgcgctcgacgcagcccagggaaggcggccggccgctgcccgccgagccctaggcgcacaaagcccgcgcccgccgcccggccccggcgcccgccgacgactttgccgcctgctccgcggctctttgtctccacttggggcgggcgcccgactctgggatttcgctgcgagaacgagctgggggggccgggggcgagctctcggtttcccggccgccccccgctcgggctcggctcccccctcccccgcacctccccggcccgggctctcggcgcttccacgctctcggaatcacgacccctccctgccatgtatccgcagggcagacatccggctccccatcaacccgggcagccgggatttaaattcacggtggctgagtcttgtgacaggatcaaagacgaattccagttcctgcaagctcagtatcacagcctcaaagtggagtacgacaagctggcaaacgagaagacggagatgcagcgccattatgtgatgtactatgagatgtcctatggcttgaacattgaaatgcacaagcagacagagattgcgaagagactgaacacaattttagcacagatcatgcctttcctgtcacaagagcaccagcagcaggtggcgcaggcagtggagcgcgccaagcaggtcaccatgacggagctgaacgccatcatcgggcagcagcagctccaggcgcagcacctctcccatgccacacacggccccccggtccagttgccaccccacccgtcaggtctccagcctccaggaatccccccagtgacagggagcagctccgggctgctggcactgggcgccctgggcagccaggcccatctgacggtgaaggatgagaagaaccaccatgaactcgatcacagagagagagaatccagtgcgaataactctgtgtcaccctcggaaagcctccgggccagtgagaagcaccggggctctgcggactacagcatggaagccaagaagcggaaggcggaggagaaggacagcttgagccgatacgacagtgatggagacaagagtgatgatctggtggtggatgtttccaatgaggaccccgcaacgccccgggtcagcccggcacactcccctcctgaaaatgggctggacaaggcccgtagcctgaaaaaagatgcccccaccagccctgcctcggtggcctcttccagtagcacaccttcctccaagaccaaagaccttggtcataacgacaaatcctccacccctgggctcaagtccaacacaccaaccccaaggaacgacgccccaactccaggcaccagcacgaccccagggctcaggtcgatgccgggtaaacctccgggcatggacccgataggtataatggcctcggctctgcgcacgcccatctccatcaccagctcctatgcggcgcccttcgccatgatgagccaccatgagatgaacggctccctcaccagtcctggcgcctacgccggcctccacaacatcccaccccagatgagcgccgccgccgctgctgcagccgctgcctatggccgatcgccaatggtgagctttggagctgttggttttgaccctcaccccccgatgcgggccacaggcctcccctcaagcctggcctccattcctggaggaaaaccagcgtactcattccatgtgagtgctgatgggcagatgcagcccgtgcccttcccccacgacgccctggcaggccccggcatcccgaggcacgcccggcagatcaacacactcagccacggggaggtggtgtgtgccgtgaccatcagcaaccccacgaggcacgtctacacaggtggcaagggctgcgtgaagatctgggacatcagccagccaggcagcaagagccccatctcccagctggactgcctgaacagggacaattacatccgctcctgcaagctgctccctgatgggcgcacgctcatcgtgggcggcgaggccagcacgctcaccatctgggacctggcctcgcccacgccccgcatcaaggccgagctgacgtcctcggctcccgcctgttatgccctggccattagccctgacgccaaagtctgcttctcctgctgcagcgatgggaacattgctgtctgggacctgcacaaccagaccctggtcaggcagttccagggccacacagatggggccagctgcatagacatctcccatgatggcaccaaactgtggacagggggcctggacaacacggtgcgctcctgggacctgcgggagggccgacagctacagcagcatgacttcacttcccagatcttctcgctgggctactgccccactggggagtggctggctgtgggcatggagagcagcaacgtggaggtgctgcaccacaccaagcctgacaagtaccagctgcacctgcacgagagctgcgtgctctccctcaagttcgcctactgcggcaagtggttcgtgagcactgggaaagataaccttctcaacgcctggaggacgccttatggagccagcatattccagtctaaagaatcctcgtctgtcttgagttgtgacatttcagcggatgacaaatacattgtaacaggctctggtgacaagaaggccacagtttatgaggtcatctactaaacaagaactccagcagggctgtcaaactctgggagaaaccgactcggctctgacagggagacccccaggcgaggggccccgaggatggcggaggatgggccgcaggcagccgagcgttcagggctgcgctccggccggctgagagggcacgtgccccgtcacagtctggactcctgggcctggattgatgtgtctcacagactcggaagggttctgctcctcctcctccccctgaacaatgctggcagttgctacaaatagatttattggaggcttatggctccggttcccccacagacccgctcatgagtctctgtttgttcttcccttttcttttgccctgtccctcaccttgggtcgggggtgctggagtggaccacaatgttgtgctgggggatgggggggtctctctttgccgattgtgcagtgcacaagatttgtgaaaaatgtaaataacagactcctattgcggactgatcagtgggagaggaggccccttcccaccggaaactctgagtgtgtatttcgcctgctgtatttgtaatccactcgtggtggtggcttttttttttttttttttttaaataaacagatgctctcacctgggaagaggagacagggaggggaaccaattgaagaaagaggagaaaagtcttagagtgtggaaaaggcaaccaggttggccgtaaggtgcctgctggaatgcgtgtgcctccacacgggtctgggcatccggactgataaccagccggccagactgagggatggaaggcactgagatgggggcccgtccaggcggacacccgcagaaatggagctttctgtggtctcttgcactctggctgcctcttgccctctctgtgtctctctttcttggtctctccctctctcctcctcagcctggtctttctctttggtgcacacttagttattgttgtgagcaatggaagttcaaaggaactccctctccagctcttctgaatcttgggacacagcctaaaaaggacaaaaagttagaagacagcatagcaactcagctcagggagctaccagagaaaaatagcaactgatgtgggtgctttttttttttttttaatttgaataaaaagaattagaagtgatgtccttttataaaatgccttctcccccttcccgcctacagtctcttcctctccccttagaggggggaaagtgtataaacctacagggttgtgagtctgaaaagaggatccccctcacccccaccctgggcagagcagtgggggttggggggtgggagagggggacacagatcctggcacactgtggatatttcttgcagattgcagtctcttgtggcccaaacaggttaggtagactatcgcctctggcaggtgccaccttttggtaccaacatgttctgaggtgttaggatttgggttgggttttttttgtttgttttttttttccttttggtctttttttttttctccttttaaagaaaagctaaaggccgctgtgagtcctggtggcaggctctccatggatgtagcatatcgaagataatttttatactgcatttttatggattattttgtaatgtgtgattccgtctgctgaggaggtgggaggggctccagggaaagccacccaccttcagtgaggttgctccccagctgagcgcaccgggcatgggatgtggaggctggcgacacaccctgtgcctctccaaggctgggcgcgtggggcgtccagagtctctctgggtctcagatgtccatctgccacctcttgttaaggctctagccagaagggagggtgagggtagaagaaagttattcccgaagaaaaaaagaatgaaaagtcattgtactgaactgtttttatatttttaaaagttactatttaaaggttggtttgattgttgcgtcttaattgcctctccccccagtttgccagtcccgccccccgccccccgggaaaacagccaggccactgttgctgtcacattctggagcctgggccagggccatttcccatcgatgtgagctcttctcatctcacagcattccctgcgctgcttccacccccttctccccttccagatacccagcatcgcagcagggatttcacaatcccatactgtgtcgcctcccatccaagcgccagggagggtggggggtaggagctaagacttcctctggacagatgggcagggcagagttcactgaggtgaaggaagaccacaggttaacaccaaagtattgtacagctgtcaatgcaaaacttttttggaaaaaaattaaacgtaatgaacttgaagcgaaa

SEQ ID NO: 192471 - DNA, 2766 bp, Homo sapiens
  Payload ID: 18006
  Gene Name: transducin-like enhancer of split 3
  ENST ID: ENST00000558201
  CDS Start-End: 135-2471
ggggagagatggggcgccccccctccgccccgtcggagagctgagaaacttgctgggaaggttctgggctgagggtggcctcttttggttgggcgccgttggggaggggccggggccgctctgagcgcggtctcatgcccccgccccctcccctgtcttgtcttcgcgggctccaggctccccatcaacccgggcagccgggatttaaattcacggtggctgagtcttgtgacaggatcaaagacgaattccagttcctgcaagctcagtatcacagcctcaaagtggagtacgacaagctggcaaacgagaagacggagatgcagcgccattatgtgatgtactatgagatgtcctatggcttgaacattgaaatgcacaagcagacagagattgcgaagagactgaacacaattttagcacagatcatgcctttcctgtcacaagagcaccagcagcaggtggcgcaggcagtggagcgcgccaagcaggtcaccatgacggagctgaacgccatcatcgggcagcagcagctccaggcgcagcacctctcccatgccacacacggccccccggtccagttgccaccccacccgtcaggtctccagcctccaggaatccccccagtgacagggagcagctccgggctgctggcactgggcgccctgggcagccaggcccatctgacggtgaaggatgagaagaaccaccatgaactcgatcacagagagagagaatccagtgcgaataactctgtgtcaccctcggaaagcctccgggccagtgagaagcaccggggctctgcggactacagcatggaagccaagaagcggaaggcggaggagaaggacagcttgagccgatacgacagtgatggagacaagagtgatgatctggtggtggatgtttccaatgaggaccccgcaacgccccgggtcagcccggcacactcccctcctgaaaatgggctggacaaggcccgtagcctgaaaaaagatgcccccaccagccctgcctcggtggcctcttccagtagcacaccttcctccaagaccaaagaccttggtcataacgacaaatcctccacccctgggctcaagtccaacacaccaaccccaaggaacgacgccccaactccaggcaccagcacgaccccagggctcaggtcgatgccgggtaaacctccgggcatggacccgataggtataatggcctcggctctgcgcacgcccatctccatcaccagctcctatgcggcgcccttcgccatgatgagccaccatgagatgaacggctccctcaccagtcctggcgcctacgccggcctccacaacatcccaccccagatgagcgccgccgccgctgctgcagccgctgcctatggccgatcgccaatggtgagctttggagctgttggttttgaccctcaccccccgatgcgggccacaggcctcccctcaagcctggcctccattcctggaggaaaaccagcgtactcattccatgtgagtgctgatgggcagatgcagcccgtgcccttcccccacgacgccctggcaggccccggcatcccgaggcacgcccggcagatcaacacactcagccacggggaggtggtgtgtgccgtgaccatcagcaaccccacgaggcacgtctacacaggtggcaagggctgcgtgaagatctgggacatcagccagccaggcagcaagagccccatctcccagctggactgcctgaacagggacaattacatccgctcctgcaagctgctccctgatgggcgcacgctcatcgtgggcggcgaggccagcacgctcaccatctgggacctggcctcgcccacgccccgcatcaaggccgagctgacgtcctcggctcccgcctgttatgccctggccattagccctgacgccaaagtctgcttctcctgctgcagcgatgggaacattgctgtctgggacctgcacaaccagaccctggtcaggcagttccagggccacacagatggggccagctgcatagacatctcccatgatggcaccaaactgtggacagggggcctggacaacacggtgcgctcctgggacctgcgggagggccgacagctacagcagcatgacttcacttcccagatcttctcgctgggctactgccccactggggagtggctggctgtgggcatggagagcagcaacgtggaggtgctgcaccacaccaagcctgacaagtaccagctgcacctgcacgagagctgcgtgctctccctcaagttcgcctactgcggcaagtggttcgtgagcactgggaaagataaccttctcaacgcctggaggacgccttatggagccagcatattccagtctaaagaatcctcgtctgtcttgagttgtgacatttcagcggatgacaaatacattgtaacaggctctggtgacaagaaggccacagtttatgaggtcatctactaaacaagaactccagcagggctgtcaaactctgggagaaaccgactcggctctgacagggagacccccaggcgaggggccccgaggatggcggaggatgggccgcaggcagccgagcgttcagggctgcgctccggccggctgagagggcacgtgccccgtcacagtctggactcctgggcctggattgatgtgtctcacagactcggaagggttctgctcctcctcctccccctgaacaatgctggcagttgctacaaatagatttattggaggcttatggctccggttcccccac

SEQ ID NO: 192472 - DNA, 3021 bp, Homo sapiens
  Payload ID: 18006
  Gene Name: transducin-like enhancer of split 3
  ENST ID: ENST00000560939
  CDS Start-End: 399-2723
cattttgcttgttgctacctttatggtgtgtgtgtttgtgtgtgtgctctcacacaaagggggatgcggccggggggcgccgttgagagaggaggttaattccgcgcgagtggcgcggggggctgcttgtgttccagggggagctgttcacgcggtccccggccccgctctgaagtctcccaactcacccggcttgtctcccgcccccgccttactggggagagggaggcccttggtgaaaggcatgggagccccgctgccgacggggagagatggggcgccccccctccgccccgtcggagagctgagaaacttgctgggaaggttctgggctgagggtggcctcttttggttgggcgccgttggggaggggccggggccgctctgagcgcggtctcatgcccccgccccctcccctgtcttgtcttcgcgggctccaggctccccatcaacccgggcagccgggatttaaattcacggtggctgagtcttgtgacaggatcaaagacgaattccagttcctgcaagctcagtatcacagcctcaaagtggagtacgacaagctggcaaacgagaagacggagatgcagcgccattatgtgatgtactatgagatgtcctatggcttgaacattgaaatgcacaagcagacagagattgcgaagagactgaacacaattttagcacagatcatgcctttcctgtcacaagagcaccagcagcaggtggcgcaggcagtggagcgcgccaagcaggtcaccatgacggagctgaacgccatcatcgggcagcagctccaggcgcagcacctctcccatgccacacacggccccccggtccagttgccaccccacccgtcaggtctccagcctccaggaatccccccagtgacagggagcagctccgggctgctggcactgggcgccctgggcagccaggcccatctgacggtgaaggatgagaagaaccaccatgaactcgatcacagagagagagaatccagtgcgaataactctgtgtcaccctcggaaagcctccgggccagtgagaagcaccggggctctgcggactacagcatggaagccaagaagcggaaggcggaggagaaggacagcttgagccgatacgacagtgatggagacaagagtgatgatctggtggtggatgtttccaatgaggaccccgcaacgccccgggtcagcccggcacactcccctcctgaaaatgggctggacaaggcccgtagcctgaaaaaagatgcccccaccagccctgcctcggtggcctcttccagtagcacaccttcctccaagaccaaagaccttggtcataacgacaaatcctccacccctgggctcaagtccaacacaccaaccccaaggaacgacgccccaactccaggcaccagcacgaccccagggctcaggtcgatgccgggtaaacctccgggcatggacccgatagcctcggctctgcgcacgcccatctccatcaccagctcctatgcggcgcccttcgccatgatgagccaccatgagatgaacggctccctcaccagtcctggcgcctacgccggcctccacaacatcccaccccagatgagcgccgccgccgctgctgcagccgctgcctatggccgatcgccaatggtgagctttggagctgttggttttgaccctcaccccccgatgcgggccacaggcctcccctcaagcctggcctccattcctggaggaaaaccagcgtactcattccatgtgagtgctgatgggcagatgcagcccgtgcccttcccccacgacgccctggcaggccccggcatcccgaggcacgcccggcagatcaacacactcagccacggggaggtggtgtgtgccgtgaccatcagcaaccccacgaggcacgtctacacaggtggcaagggctgcgtgaagatctgggacatcagccagccaggcagcaagagccccatctcccagctggactgcctgaacagggacaattacatccgctcctgcaagctgctccctgatgggcgcacgctcatcgtgggcggcgaggccagcacgctcaccatctgggacctggcctcgcccacgccccgcatcaaggccgagctgacgtcctcggctcccgcctgttatgccctggccattagccctgacgccaaagtctgcttctcctgctgcagcgatgggaacattgctgtctgggacctgcacaaccagaccctggtcaggcagttccagggccacacagatggggccagctgcatagacatctcccatgatggcaccaaactgtggacagggggcctggacaacacggtgcgctcctgggacctgcgggagggccgacagctacagcagcatgacttcacttcccagatcttctcgctgggctactgccccactggggagtggctggctgtgggcatggagagcagcaacgtggaggtgctgcaccacaccaagcctgacaagtaccagctgcacctgcacgagagctgcgtgctctccctcaagttcgcctactgcggcaagtggttcgtgagcactgggaaagataaccttctcaacgcctggaggacgccttatggagccagcatattccagtctaaagaatcctcgtctgtcttgagttgtgacatttcagcggatgacaaatacattgtaacaggctctggtgacaagaaggccacagtttatgaggtcatctactaaacaagaactccagcagggctgtcaaactctgggagaaaccgactcggctctgacagggagacccccaggcgaggggccccgaggatggcggaggatgggccgcaggcagccgagcgttcagggctgcgctccggccggctgagagggcacgtgccccgtcacagtctggactcctgggcctggattgatgtgtctcacagactcggaagggttctgctcctcctcctccccctgaacaatgctggcagttgctacaaatagatttattggaggcttatggctccggttcccccacaga

SEQ ID NO: 192473 - DNA, 3408 bp, Homo sapiens
  Payload ID: 18006
  Gene Name: transducin-like enhancer of split 3
  ENST ID: ENST00000559929
  CDS Start-End: 54-2402
cggcccgggctctcggcgcttccacgctctcggaatcacgacccctccctgccatgtatccgcagggcagacatccggctccccatcaacccgggcagccgggatttaaattcacggtggctgagtcttgtgacaggatcaaagacgaattccagttcctgcaagctcagtatcacagcctcaaagtggagtacgacaagctggcaaacgagaagacggagatgcagcgccattatgtgatgtactatgagatgtcctatggcttgaacattgaaatgcacaagcagacagagattgcgaagagactgaacacaattttagcacagatcatgcctttcctgtcacaagagcaccagcagcaggtggcgcaggcagtggagcgcgccaagcaggtcaccatgacggagctgaacgccatcatcggggtacgtggactccccaatctgcctcttacccagcagcagctccaggcgcagcacctctcccatgccacacacggccccccggtccagttgccaccccacccgtcaggtctccagcctccaggaatccccccagtgacagggagcagctccgggctgctggcactgggcgccctgggcagccaggcccatctgacggtgaaggatgagaagaaccaccatgaactcgatcacagagagagagaatccagtgcgaataactctgtgtcaccctcggaaagcctccgggccagtgagaagcaccggggctctgcggactacagcatggaagccaagaagcggaaggcggaggagaaggacagcttgagccgatacgacagtgatggagacaagagtgatgatctggtggtggatgtttccaatgaggaccccgcaacgccccgggtcagcccggcacactcccctcctgaaaatgggctggacaaggcccgtagcctgaaaaaagatgcccccaccagccctgcctcggtggcctcttccagtagcacaccttcctccaagaccaaagaccttggtcataacgacaaatcctccacccctgggctcaagtccaacacaccaaccccaaggaacgacgccccaactccaggcaccagcacgaccccagggctcaggtcgatgccgggtaaacctccgggcatggacccgataggtataatggcctcggctctgcgcacgcccatctccatcaccagctcctatgcggcgcccttcgccatgatgagccaccatgagatgaacggctccctcaccagtcctggcgcctacgccggcctccacaacatcccaccccagatgagcgccgccgccgctgctgcagccgctgcctatggccgatcgccaatggtgagctttggagctgttggttttgaccctcaccccccgatgcgggccacaggcctcccctcaagcctggcctccattcctggaggaaaaccagcgtactcattccatgtgagtgctgatgggcagatgcagcccgtgcccttcccccacgacgccctggcaggccccggcatcccgaggcacgcccggcagatcaacacactcagccacggggaggtggtgtgtgccgtgaccatcagcaaccccacgaggcacgtctacacaggtggcaagggctgcgtgaagatctgggacatcagccagccaggcagcaagagccccatctcccagctggactgcctgaacagggacaattacatccgctcctgcaagctgctccctgatgggcgcacgctcatcgtgggcggcgaggccagcacgctcaccatctgggacctggcctcgcccacgccccgcatcaaggccgagctgacgtcctcggctcccgcctgttatgccctggccattagccctgacgccaaagtctgcttctcctgctgcagcgatgggaacattgctgtctgggacctgcacaaccagaccctggtcaggcagttccagggccacacagatggggccagctgcatagacatctcccatgatggcaccaaactgtggacagggggcctggacaacacggtgcgctcctgggacctgcgggagggccgacagctacagcagcatgacttcacttcccagatcttctcgctgggctactgccccactggggagtggctggctgtgggcatggagagcagcaacgtggaggtgctgcaccacaccaagcctgacaagtaccagctgcacctgcacgagagctgcgtgctctccctcaagttcgcctactgcggcaagtggttcgtgagcactgggaaagataaccttctcaacgcctggaggacgccttatggagccagcatattccagtctaaagaatcctcgtctgtcttgagttgtgacatttcagcggatgacaaatacattgtaacaggctctggtgacaagaaggccacagtttatgaggtcatctactaaacaagaactccagcagggctgtcaaactctgggagaaaccgactcggctctgacagggagacccccaggcgaggggccccgaggatggcggaggatgggccgcaggcagccgagcgttcagggctgcgctccggccggctgagagggcacgtgccccgtcacagtctggactcctgggcctggattgatgtgtctcacagactcggaagggttctgctcctcctcctccccctgaacaatgctggcagttgctacaaatagatttattggaggcttatggctccggttcccccacagacccgctcatgagtctctgtttgttcttcccttttcttttgccctgtccctcaccttgggtcgggggtgctggagtggaccacaatgttgtgctgggggatgggggggtctctctttgccgattgtgcagtgcacaagatttgtgaaaaatgtaaataacagactcctattgcggactgatcagtgggagaggaggccccttcccaccggaaactctgagtgtgtatttcgcctgctgtatttgtaatccactcgtggtggtggcttttttttttttttttttttaaataaacagatgctctcacctgggaagaggagacagggaggggaaccaattgaagaaagaggagaaaagtcttagagtgtggaaaaggcaaccaggttggccgtaaggtgcctgctggaatgcgtgtgcctccacacgggtctgggcatccggactgataaccagccggccagactgagggatggaaggcactgagatgggggcccgtccaggcggacacccgcagaaatggagctttctgtggtctcttgcactctggctgcctcttgccctctctgtgtctctctttcttggtctctccctctctcctcctcagcctggtctttctctttggtgcacacttagttattgttgtgagcaatggaagttcaaaggaactccctctccagctcttctgaatcttgggacacagcctaaaaagga

SEQ ID NO: 192474 - DNA, 3683 bp, Homo sapiens
  Payload ID: 18006
  Gene Name: transducin-like enhancer of split 3
  Uniprot ID: Q04726
  ENST ID: ENST00000557997
  CDS Start-End: 1091-3385
gttcagacctcgtgctcgtccccttcgcctgtctgtgtgtggtatccgtaggtccggggcacttttttttttggtgtgtgtgtgtgtgcgtgcgcgcgtgtgtgtgtgttgggtgtgtgtgttttgggggtttgccggggcgcggagaggagagccgggccgaggggaaggaaggaagccgtagagctccccggtctcgggctgcgtctcccctccagcgctctcctgcctgtgcgctccgacgcggcagcggcggtggcgctgagcgctcctcggtggggacgcggtgctcaagctgggagcagcgagaaccctttgcggaggcttcccgtgcccgctggacttaggatgccagggcgtttgatttgcacctactgagcccggagttcctccccggccctgggaagggcttgcagcggcggcggcggcggcggcagcggcagtagcagacggaacagcaggctctcctctccgagggggggcgtcgaagcgcccgcgccgggctcccgccctcaccctccggcgctcctgcggccccaagccaccacctcgtagcccgcctccttcctcttctcgccgcgagccccaggcccggacgcctctaggatcggacccgcgcgccccggatgcttggggctgccccggcgcgcccccctacaggcgcgacccgctgagtgacccggagggggcccgagctcgccccaggaggggcccccggcctcgggaccccgcgccggacctgctggggagccgacgatgtccgcgcagtcccaggcattgacgcgctcgacgcagcccagggaaggcggccggccgctgcccgccgagccctaggcgcacaaagcccgcgcccgccgcccggccccggcgcccgccgacgactttgccgcctgctccgcggctctttgtctccacttggggcgggcgcccgactctgggatttcgctgcgagaacgagctgggggggccgggggcgagctctcggtttcccggccgccccccgctcgggctcggctcccccctcccccgcacctccccggcccgggctctcggcgcttccacgctctcggaatcacgacccctccctgccatgtatccgcagggcagacatccggctccccatcaacccgggcagccgggatttaaattcacggtggctgagtcttgtgacaggatcaaagacgaattccagttcctgcaagctcagtatcacagcctcaaagtggagtacgacaagctggcaaacgagaagacggagatgcagcgccattatgtgatgtactatgagatgtcctatggcttgaacattgaaatgcacaagcagacagagattgcgaagagactgaacacaattttagcacagatcatgcctttcctgtcacaagagcaccagcagcaggtggcgcaggcagtggagcgcgccaagcaggtcaccatgacggagctgaacgccatcatcgggcagcagcagctccaggcgcagcacctctcccatgccacacacggccccccggtccagttgccaccccacccgtcaggtctccagcctccaggaatccccccagtgacagggagcagctccgggctgctggcactgggcgccctgggcagccaggcccatctgacggtgaaggatgagaagaaccaccatgaactcgatcacagagagagagaatccagtgcgaataactctgtgtcaccctcggaaagcctccgggccagtgagaagcaccggggctctgcggactacagcatggaagccaagaagcggaaggcggaggagaaggacagcttgagccgatacgacagtgatggagacaagagtgatgatctggtggtggatgtttccaatgaggaccccgcaacgccccgggtcagcccggcacactcccctcctgaaaatgggctggacaaggcccgtagcctgaaaaaagatgcccccaccagccctgcctcggtggcctcttccagtagcacaccttcctccaagaccaaagaccttggtcataacgacaaatcctccacccctgggctcaagtccaacacaccaaccccaaggaacgacgccccaactccaggcaccagcacgaccccagggctcaggtcgatgccgggtaaacctccgggcatggacccgatagcctcggctctgcgcacgcccatctccatcaccagctcctatgcggcgcccttcgccatgatgagccaccatgagatgaacggctccctcaccagtcctggcgcctacgccggcctccacaacatcccaccccagatgagcgccgccgccgctgctgcagccgctgcctatggccgatcgccaatggttggttttgaccctcaccccccgatgcgggccacaggcctcccctcaagcctggcctccattcctggaggaaaaccagcgtactcattccatgtgagtgctgatgggcagatgcagcccgtgcccttcccccacgacgccctggcaggccccggcatcccgaggcacgcccggcagatcaacacactcagccacggggaggtggtgtgtgccgtgaccatcagcaaccccacgaggcacgtctacacaggtggcaagggctgcgtgaagatctgggacatcagccagccaggcagcaagagccccatctcccagctggactgcctgaacagggacaattacatccgctcctgcaagctgctccctgatgggcgcacgctcatcgtgggcggcgaggccagcacgctcaccatctgggacctggcctcgcccacgccccgcatcaaggccgagctgacgtcctcggctcccgcctgttatgccctggccattagccctgacgccaaagtctgcttctcctgctgcagcgatgggaacattgctgtctgggacctgcacaaccagaccctggtcaggcagttccagggccacacagatggggccagctgcatagacatctcccatgatggcaccaaactgtggacagggggcctggacaacacggtgcgctcctgggacctgcgggagggccgacagctacagcagcatgacttcacttcccagatcttctcgctgggctactgccccactggggagtggctggctgtgggcatggagagcagcaacgtggaggtgctgcaccacaccaagcctgacaagtaccagctgcacctgcacgagagctgcgtgctctccctcaagttcgcctactgcggcaagtggttcgtgagcactgggaaagataaccttctcaacgcctggaggacgccttatggagccagcatattccagtctaaagaatcctcgtctgtcttgagttgtgacatttcagcggatgacaaatacattgtaacaggctctggtgacaagaaggccacagtttatgaggtcatctactaaacaagaactccagcagggctgtcaaactctgggagaaaccgactcggctctgacagggagacccccaggcgaggggccccgaggatggcggaggatgggccgcaggcagccgagcgttcagggctgcgctccggccggctgagagggcacgtgccccgtcacagtctggactcctgggcctggattgatgtgtctcacagactcggaagggttctgctcctcctcctccccctgaacaatgctggcagttgctacaaatagatttattggaggcttatggctccggttcccccacaga

SEQ ID NO: 192475 - DNA, 2295 bp, Homo sapiens
  Payload ID: 18006
  Gene Name: transducin-like enhancer of split 3
  Uniprot ID: Q04726
  ENST ID: ENST00000557907
  CDS Start-End: 1-2295
atgtatccgcagggcagacatccggctccccatcaacccgggcagccgggatttaaattcacggtggctgagtcttgtgacaggatcaaagacgaattccagttcctgcaagctcagtatcacagcctcaaagtggagtacgacaagctggcaaacgagaagacggagatgcagcgccattatgtgatgtactatgagatgtcctatggcttgaacattgaaatgcacaagcagacagagattgcgaagagactgaacacaattttagcacagatcatgcctttcctgtcacaagagcaccagcagcaggtggcgcaggcagtggagcgcgccaagcaggtcaccatgacggagctgaacgccatcatcgggcagcagcagctccaggcgcagcacctctcccatgccacacacggccccccggtccagttgccaccccacccgtcaggtctccagcctccaggaatccccccagtgacagggagcagctccgggctgctggcactgggcgccctgggcagccaggcccatctgacggtgaaggatgagaagaaccaccatgaactcgatcacagagagagagaatccagtgcgaataactctgtgtcaccctcggaaagcctccgggccagtgagaagcaccggggctctgcggactacagcatggaagccaagaagcggaaggcggaggagaaggacagcttgagccgatacgacagtgatggagacaagagtgatgatctggtggtggatgtttccaatgaggaccccgcaacgccccgggtcagcccggcacactcccctcctgaaaatgggctggacaaggcccgtagcctgaaaaaagatgcccccaccagccctgcctcggtggcctcttccagtagcacaccttcctccaagaccaaagaccttggtcataacgacaaatcctccacccctgggctcaagtccaacacaccaaccccaaggaacgacgccccaactccaggcaccagcacgaccccagggctcaggtcgatgccgggtaaacctccgggcatggacccgatagcctcggctctgcgcacgcccatctccatcaccagctcctatgcggcgcccttcgccatgatgagccaccatgagatgaacggctccctcaccagtcctggcgcctacgccggcctccacaacatcccaccccagatgagcgccgccgccgctgctgcagccgctgcctatggccgatcgccaatggttggttttgaccctcaccccccgatgcgggccacaggcctcccctcaagcctggcctccattcctggaggaaaaccagcgtactcattccatgtgagtgctgatgggcagatgcagcccgtgcccttcccccacgacgccctggcaggccccggcatcccgaggcacgcccggcagatcaacacactcagccacggggaggtggtgtgtgccgtgaccatcagcaaccccacgaggcacgtctacacaggtggcaagggctgcgtgaagatctgggacatcagccagccaggcagcaagagccccatctcccagctggactgcctgaacagggacaattacatccgctcctgcaagctgctccctgatgggcgcacgctcatcgtgggcggcgaggccagcacgctcaccatctgggacctggcctcgcccacgccccgcatcaaggccgagctgacgtcctcggctcccgcctgttatgccctggccattagccctgacgccaaagtctgcttctcctgctgcagcgatgggaacattgctgtctgggacctgcacaaccagaccctggtcaggcagttccagggccacacagatggggccagctgcatagacatctcccatgatggcaccaaactgtggacagggggcctggacaacacggtgcgctcctgggacctgcgggagggccgacagctacagcagcatgacttcacttcccagatcttctcgctgggctactgccccactggggagtggctggctgtgggcatggagagcagcaacgtggaggtgctgcaccacaccaagcctgacaagtaccagctgcacctgcacgagagctgcgtgctctccctcaagttcgcctactgcggcaagtggttcgtgagcactgggaaagataaccttctcaacgcctggaggacgccttatggagccagcatattccagtctaaagaatcctcgtctgtcttgagttgtgacatttcagcggatgacaaatacattgtaacaggctctggtgacaagaaggccacagtttatgaggtcatctactaa

SEQ ID NO: 192476 - DNA, 3647 bp, Homo sapiens
  Payload ID: 18006
  Gene Name: transducin-like enhancer of split 3
  ENST ID: ENST00000560525
  CDS Start-End: 1-1835
gcccgccgacgactttgccgcctgctccgcggctctttgtctccacttggggcgggcgcccgactctgggatttcgctgcgagaacgagctgggggggccgggggcgagctctcggtttcccggccgccccccgctcgggctcggctcccccctcccccgcacctccccggcccgggctctcggcgcttccacgctctcggaatcacgacccctccctgccatgtatccgcagggcagacatccggctccccatcaacccgggcagccgggatttaaattcacggtggctgagtcttgtgacaggatcaaagacgaattccagttcctgcaagctcagtatcacagcctcaaagtggagtacgacaagctggcaaacgagaagacggagatgcagcgccattatgtgatgtactatgagatgtcctatggcttgaacattgaaatgcacaagcagacagagattgcgaagagactgaacacaattttagcacagatcatgcctttcctgtcacaagagcaccagcagcaggtggcgcaggcagtggagcgcgccaagcaggtcaccatgacggagctgaacgccatcatcgggcagcagcagctccaggcgcagcacctctcccatgccacacacggccccccggtccagttgccaccccacccgtcaggtctccagcctccaggaatccccccagtgacagggagcagctccgggctgctggcactgggcgccctgggcagccaggcccatctgacggtgaaggatgagaagaaccaccatgaactcgatcacagagagagagaatccagtgcgaataactctgtgtcaccctcggaaagcctccgggccagtgagaagcaccggggctctgcggactacagcatggaagccaagaagcggaaggcggaggagaaggacagcttgagccgatacgacagtgatggagacaagagtgatgatctggtggtggatgtttccaatgaggaccccgcaacgccccgggtcagcccggcacactcccctcctgaaaatgggctggacaaggcccgtagcctgaaaaaagatgcccccaccagccctgcctcggtggcctcttccagtagcacaccttcctccaagaccaaagaccttggtcataacgacaaatcctccacccctgggctcaagtccaacacaccaaccccaaggaacgacgccccaactccaggcaccagcacgaccccagggctcaggtcgatgccgggtaaacctccgggcatggacccgatagcctcggctctgcgcacgcccatctccatcaccagctcctatgcggcgcccttcgccatgatgagccaccatgagatgaacggctccctcaccagtcctggcgcctacgccggcctccacaacatcccaccccagatgagcgccgccgccgctgctgcagccgctgcctatggccgatcgccaatggtgagctttggagctgttggttttgaccctcaccccccgatgcgggccacaggcctcccctcaagcctggcctccattcctggaggaaaaccagcgtactcattccatgtgagtgctgatgggcagatgcagcccgtgcccttcccccacgacgccctggcaggccccggcatcccgaggcacgcccggcagatcaacacactcagccacggggaggtggtgtgtgccgtgaccatcagcaaccccacgaggcacgtctacacaggtggcaagggctgcgtgaagatctgggacatcagccagccaggcagcaagagccccatctcccagctggactgcctgggacaattacatccgctcctgcaagctgctccctgatgggcgcacgctcatcgtgggcggcgaggccagcacgctcaccatctgggacctggcctcgcccacgccccgcatcaaggccgagctgacgtcctcggctcccgcctgttatgccctggccattagccctgacgccaaagtctgcttctcctgctgcagcgatgggaacattgctgtctgggacctgcacaaccagaccctggtcaggcagttccagggccacacagatggggccagctgcatagacatctcccatgatggcaccaaactgtggacagggggcctggacaacacggtgcgctcctgggacctgcgggagggccgacagctacagcagcatgacttcacttcccagatcttctcgctgggctactgccccactggggagtggctggctgtgggcatggagagcagcaacgtggaggtgctgcaccacaccaagcctgacaagtaccagctgcacctgcacgagagctgcgtgctctccctcaagttcgcctactgcggcaagtggttcgtgagcactgggaaagataaccttctcaacgcctggaggacgccttatggagccagcatattccagtctaaagaatcctcgtctgtcttgagttgtgacatttcagcggatgacaaatacattgtaacaggctctggtgacaagaaggccacagtttatgaggtcatctactaaacaagaactccagcagggctgtcaaactctgggagaaaccgactcggctctgacagggagacccccaggcgaggggccccgaggatggcggaggatgggccgcaggcagccgagcgttcagggctgcgctccggccggctgagagggcacgtgccccgtcacagtctggactcctgggcctggattgatgtgtctcacagactcggaagggttctgctcctcctcctccccctgaacaatgctggcagttgctacaaatagatttattggaggcttatggctccggttcccccacagacccgctcatgagtctctgtttgttcttcccttttcttttgccctgtccctcaccttgggtcgggggtgctggagtggaccacaatgttgtgctgggggatgggggggtctctctttgccgattgtgcagtgcacaagatttgtgaaaaatgtaaataacagactcctattgcggactgatcagtgggagaggaggccccttcccaccggaaactctgagtgtgtatttcgcctgctgtatttgtaatccactcgtggtggtggcttttttttttttttttttttaaataaacagatgctctcacctgggaagaggagacagggaggggaaccaattgaagaaagaggagaaaagtcttagagtgtggaaaaggcaaccaggttggccgtaaggtgcctgctggaatgcgtgtgcctccacacgggtctgggcatccggactgataaccagccggccagactgagggatggaaggcactgagatgggggcccgtccaggcggacacccgcagaaatggagctttctgtggtctcttgcactctggctgcctcttgccctctctgtgtctctctttcttggtctctccctctctcctcctcagcctggtctttctctttggtgcacacttagttattgttgtgagcaatggaagttcaaaggaactccctctccagctcttctgaatcttgggacacagcctaaaaaggacaaaaagttagaagacagcatagcaactcagctcagggagctaccagagaaaaatagcaactgatgtgggtgctttttttttttttttaatttgaataaaaagaattagaagtga

SEQ ID NO: 192477 - DNA, 3719 bp, Homo sapiens
  Payload ID: 18006
  Gene Name: transducin-like enhancer of split 3
  ENST ID: ENST00000561453
  CDS Start-End: 1120-2466
agtccctatttggaactgctctcgcggcagttcagacctcgtgctcgtccccttcgcctgtctgtgtgtggtatccgtaggtccggggcacttttttttttggtgtgtgtgtgtgtgcgtgcgcgcgtgtgtgtgtgttgggtgtgtgtgttttgggggtttgccggggcgcggagaggagagccgggccgaggggaaggaaggaagccgtagagctccccggtctcgggctgcgtctcccctccagcgctctcctgcctgtgcgctccgacgcggcagcggcggtggcgctgagcgctcctcggtggggacgcggtgctcaagctgggagcagcgagaaccctttgcggaggcttcccgtgcccgctggacttaggatgccagggcgtttgatttgcacctactgagcccggagttcctccccggccctgggaagggcttgcagcggcggcggcggcggcggcagcggcagtagcagacggaacagcaggctctcctctccgagggggggcgtcgaagcgcccgcgccgggctcccgccctcaccctccggcgctcctgcggccccaagccaccacctcgtagcccgcctccttcctcttctcgccgcgagccccaggcccggacgcctctaggatcggacccgcgcgccccggatgcttggggctgccccggcgcgcccccctacaggcgcgacccgctgagtgacccggagggggcccgagctcgccccaggaggggcccccggcctcgggaccccgcgccggacctgctggggagccgacgatgtccgcgcagtcccaggcattgacgcgctcgacgcagcccagggaaggcggccggccgctgcccgccgagccctaggcgcacaaagcccgcgcccgccgcccggccccggcgcccgccgacgactttgccgcctgctccgcggctctttgtctccacttggggcgggcgcccgactctgggatttcgctgcgagaacgagctgggggggccgggggcgagctctcggtttcccggccgccccccgctcgggctcggctcccccctcccccgcacctccccggcccgggctctcggcgcttccacgctctcggaatcacgacccctccctgccatgtatccgcagggcagacatccggctccccatcaacccgggcagccgggatttaaattcacggtggctgagtcttgtgacaggatcaaagacgaattccagttcctgcaagctcagtatcacagcctcaaagtggagtacgacaagctggcaaacgagaagacggagatgcagcgccattatgtgatgtactatgagatgtcctatggcttgaacattgaaatgcacaagcagacagagattgcgaagagactgaacacaattttagcacagatcatgcctttcctgtcacaagagcaccagcagcaggtggcgcaggcagtggagcgcgccaagcaggtcaccatgacggagctgaacgccatcatcgggcagcagcagctccaggcgcagcacctctcccatgccacacacggccccccggtccagttgccaccccacccgtcaggtctccagcctccaggaatccccccagtgacagggagcagctccgggctgctggcactgggcgccctgggcagccaggcccatctgacggtgaaggatgagaagaaccaccatgaactcgatcacagagagagagaatccagtgcgaataactctgtgtcaccctcggaaagcctccgggccagtgagaagcaccggggctctgcggactacagcatggaagccaagaagcggaaggcggaggagaaggacagcttgagccgatacgacagtgatggagacaagagtgatgatctggtggtggatgtttccaatgaggaccccgcaacgccccgggtcagcccggcacactcccctcctgaaaatgggctggacaaggcccgtagcctgaaaaaagatgcccccaccagccctgcctcggtggcctcttccagtagcacaccttcctccaagaccaaagaccttggtcataacgacaaatcctccacccctgggctcaagtccaacacaccaaccccaaggaacgacgccccaactccaggcaccagcacgaccccagggctcaggtcgatgccgggtaaacctccgggcatggacccgataggtataatggcctcggctctgcgcacgcccatctccatcaccagctcctatgcggcgcccttcgccatgatgagccaccatgagatgaacggctccctcaccagtcctggcgcctacgccggcctccacaacatcccaccccagatgagcgccgccgccgctgctgcagccgctgcctatggccgatcgccaatggttggttttgaccctcaccccccgatgcgggccacaggcctcccctcaagcctggcctccattcctggaggaaaacccgtactcattccatgtgagtgctgatgggcagatgcagcccgtgcccttcccccacgacgccctggcaggccccggcatcccgaggcacgcccggcagatcaacacactcagccacggggaggtggtgtgtgccgtgaccatcagcaaccccacgaggcacgtctacacaggtggcaagggctgcgtgaagatctgggacatcagccagccaggcagcaagagccccatctcccagctggactgcctgaacagggacaattacatccgctcctgcaagctgctccctgatgggcgcacgctcatcgtgggcggcgaggccagcacgctcaccatctgggacctggcctcgcccacgccccgcatcaaggccgagctgacgtcctcggctcccgcctgttatgccctggccattagccctgacgccaaagtctgcttctcctgctgcagcgatgggaacattgctgtctgggacctgcacaaccagaccctggtcaggcagttccagggccacacagatggggccagctgcatagacatctcccatgatggcaccaaactgtggacagggggcctggacaacacggtgcgctcctgggacctgcgggagggccgacagctacagcagcatgacttcacttcccagatcttctcgctgggctactgccccactggggagtggctggctgtgggcatggagagcagcaacgtggaggtgctgcaccacaccaagcctgacaagtaccagctgcacctgcacgagagctgcgtgctctccctcaagttcgcctactgcggcaagtggttcgtgagcactgggaaagataaccttctcaacgcctggaggacgccttatggagccagcatattccagtctaaagaatcctcgtctgtcttgagttgtgacatttcagcggatgacaaatacattgtaacaggctctggtgacaagaaggccacagtttatgaggtcatctactaaacaagaactccagcagggctgtcaaactctgggagaaaccgactcggctctgacagggagacccccaggcgaggggccccgaggatggcggaggatgggccgcaggcagccgagcgttcagggctgcgctccggccggctgagagggcacgtgccccgtcacagtctggactcctgggcctggattgatgtgtctcacagactcggaagggttctgctcctcctcctccccctgaacaatgctggcagttgctacaaatagatttattggaggcttatggctccggttcccccacaga

SEQ ID NO: 192478 - DNA, 2304 bp, Homo sapiens
  Payload ID: 18006
  Gene Name: transducin-like enhancer of split 3
  Uniprot ID: Q04726
  ENST ID: ENST00000558379
  CDS Start-End: 1-2304
atgtatccgcagggcagacatccggctccccatcaacccgggcagccgggatttaaattcacggtggctgagtcttgtgacaggatcaaagacgaattccagttcctgcaagctcagtatcacagcctcaaagtggagtacgacaagctggcaaacgagaagacggagatgcagcgccattatgtgatgtactatgagatgtcctatggcttgaacattgaaatgcacaagcagacagagattgcgaagagactgaacacaattttagcacagatcatgcctttcctgtcacaagagcaccagcagcaggtggcgcaggcagtggagcgcgccaagcaggtcaccatgacggagctgaacgccatcatcgggcagcagcagctccaggcgcagcacctctcccatgccacacacggccccccggtccagttgccaccccacccgtcaggtctccagcctccaggaatccccccagtgacagggagcagctccgggctgctggcactgggcgccctgggcagccaggcccatctgacggtgaaggatgagaagaaccaccatgaactcgatcacagagagagagaatccagtgcgaataactctgtgtcaccctcggaaagcctccgggccagtgagaagcaccggggctctgcggactacagcatggaagccaagaagcggaaggcggaggagaaggacagcttgagccgatacgacagtgatggagacaagagtgatgatctggtggtggatgtttccaatgaggaccccgcaacgccccgggtcagcccggcacactcccctcctgaaaatgggctggacaaggcccgtagcctgaaaaaagatgcccccaccagccctgcctcggtggcctcttccagtagcacaccttcctccaagaccaaagaccttggtcataacgacaaatcctccacccctgggctcaagtccaacacaccaaccccaaggaacgacgccccaactccaggcaccagcacgaccccagggctcaggtcgatgccgggtaaacctccgggcatggacccgataggtataatggcctcggctctgcgcacgcccatctccatcaccagctcctatgcggcgcccttcgccatgatgagccaccatgagatgaacggctccctcaccagtcctggcgcctacgccggcctccacaacatcccaccccagatgagcgccgccgccgctgctgcagccgctgcctatggccgatcgccaatggttggttttgaccctcaccccccgatgcgggccacaggcctcccctcaagcctggcctccattcctggaggaaaaccagcgtactcattccatgtgagtgctgatgggcagatgcagcccgtgcccttcccccacgacgccctggcaggccccggcatcccgaggcacgcccggcagatcaacacactcagccacggggaggtggtgtgtgccgtgaccatcagcaaccccacgaggcacgtctacacaggtggcaagggctgcgtgaagatctgggacatcagccagccaggcagcaagagccccatctcccagctggactgcctgaacagggacaattacatccgctcctgcaagctgctccctgatgggcgcacgctcatcgtgggcggcgaggccagcacgctcaccatctgggacctggcctcgcccacgccccgcatcaaggccgagctgacgtcctcggctcccgcctgttatgccctggccattagccctgacgccaaagtctgcttctcctgctgcagcgatgggaacattgctgtctgggacctgcacaaccagaccctggtcaggcagttccagggccacacagatggggccagctgcatagacatctcccatgatggcaccaaactgtggacagggggcctggacaacacggtgcgctcctgggacctgcgggagggccgacagctacagcagcatgacttcacttcccagatcttctcgctgggctactgccccactggggagtggctggctgtgggcatggagagcagcaacgtggaggtgctgcaccacaccaagcctgacaagtaccagctgcacctgcacgagagctgcgtgctctccctcaagttcgcctactgcggcaagtggttcgtgagcactgggaaagataaccttctcaacgcctggaggacgccttatggagccagcatattccagtctaaagaatcctcgtctgtcttgagttgtgacatttcagcggatgacaaatacattgtaacaggctctggtgacaagaaggccacagtttatgaggtcatctactaa

SEQ ID NO: 192479 - DNA, 2918 bp, Homo sapiens
  Payload ID: 18006
  Gene Name: transducin-like enhancer of split 3
  Uniprot ID: Q04726
  ENST ID: ENST00000559048
  CDS Start-End: 302-2620
aattccgcgcgagtggcgcggggggctgcttgtgttccagggggagctgttcacgcggtccccggccccgctctgaagtctcccaactcacccggcttgtctcccgcccccgccttactggggagagggaggcccttggtgaaaggcatgggagccccgctgccgacggggagagatggggcgccccccctccgccccgtcggagagctgagaaacttgctgggaaggttctgggctgagggtggcctcttttggttgggcgccgttggggaggggccggggccgctctgagcgcggtctcatgcccccgccccctcccctgtcttgtcttcgcgggctccaggctccccatcaacccgggcagccgggatttaaattcacggtggctgagtcttgtgacaggatcaaagacgaattccagttcctgcaagctcagtatcacagcctcaaagtggagtacgacaagctggcaaacgagaagacggagatgcagcgccattatgtgatgtactatgagatgtcctatggcttgaacattgaaatgcacaagcagacagagattgcgaagagactgaacacaattttagcacagatcatgcctttcctgtcacaagagcaccagcagcaggtggcgcaggcagtggagcgcgccaagcaggtcaccatgacggagctgaacgccatcatcgggcagcagctccaggcgcagcacctctcccatgccacacacggccccccggtccagttgccaccccacccgtcaggtctccagcctccaggaatccccccagtgacagggagcagctccgggctgctggcactgggcgccctgggcagccaggcccatctgacggtgaaggatgagaagaaccaccatgaactcgatcacagagagagagaatccagtgcgaataactctgtgtcaccctcggaaagcctccgggccagtgagaagcaccggggctctgcggactacagcatggaagccaagaagcggaaggcggaggagaaggacagcttgagccgatacgacagtgatggagacaagagtgatgatctggtggtggatgtttccaatgaggaccccgcaacgccccgggtcagcccggcacactcccctcctgaaaatgggctggacaaggcccgtagcctgaaaaaagatgcccccaccagccctgcctcggtggcctcttccagtagcacaccttcctccaagaccaaagaccttggtcataacgacaaatcctccacccctgggctcaagtccaacacaccaaccccaaggaacgacgccccaactccaggcaccagcacgaccccagggctcaggtcgatgccgggtaaacctccgggcatggacccgataggtataatggcctcggctctgcgcacgcccatctccatcaccagctcctatgcggcgcccttcgccatgatgagccaccatgagatgaacggctccctcaccagtcctggcgcctacgccggcctccacaacatcccaccccagatgagcgccgccgccgctgctgcagccgctgcctatggccgatcgccaatggttggttttgaccctcaccccccgatgcgggccacaggcctcccctcaagcctggcctccattcctggaggaaaaccagcgtactcattccatgtgagtgctgatgggcagatgcagcccgtgcccttcccccacgacgccctggcaggccccggcatcccgaggcacgcccggcagatcaacacactcagccacggggaggtggtgtgtgccgtgaccatcagcaaccccacgaggcacgtctacacaggtggcaagggctgcgtgaagatctgggacatcagccagccaggcagcaagagccccatctcccagctggactgcctgaacagggacaattacatccgctcctgcaagctgctccctgatgggcgcacgctcatcgtgggcggcgaggccagcacgctcaccatctgggacctggcctcgcccacgccccgcatcaaggccgagctgacgtcctcggctcccgcctgttatgccctggccattagccctgacgccaaagtctgcttctcctgctgcagcgatgggaacattgctgtctgggacctgcacaaccagaccctggtcaggcagttccagggccacacagatggggccagctgcatagacatctcccatgatggcaccaaactgtggacagggggcctggacaacacggtgcgctcctgggacctgcgggagggccgacagctacagcagcatgacttcacttcccagatcttctcgctgggctactgccccactggggagtggctggctgtgggcatggagagcagcaacgtggaggtgctgcaccacaccaagcctgacaagtaccagctgcacctgcacgagagctgcgtgctctccctcaagttcgcctactgcggcaagtggttcgtgagcactgggaaagataaccttctcaacgcctggaggacgccttatggagccagcatattccagtctaaagaatcctcgtctgtcttgagttgtgacatttcagcggatgacaaatacattgtaacaggctctggtgacaagaaggccacagtttatgaggtcatctactaaacaagaactccagcagggctgtcaaactctgggagaaaccgactcggctctgacagggagacccccaggcgaggggccccgaggatggcggaggatgggccgcaggcagccgagcgttcagggctgcgctccggccggctgagagggcacgtgccccgtcacagtctggactcctgggcctggattgatgtgtctcacagactcggaagggttctgctcctcctcctccccctgaacaatgctggcagttgctacaaatagatttattggaggcttatggctccggttcccccacaga

SEQ ID NO: 192480 - DNA, 1575 bp, Homo sapiens
  Payload ID: 18006
  Gene Name: transducin-like enhancer of split 3
  ENST ID: ENST00000559191
  CDS Start-End: 253-1314
cttcgcctgtctgtgtgtggtatccgtaggtccggggcacttttttttttggtgtgtgtgtgtgtgcgtgcgcgcgtgtgtgtgtgttgggtgtgtgtgttttgggggtttgccggggcgcggagaggagagccgggccgaggggaaggaaggaagccgtagagctccccggtctcgggctgcgtctcccctccagcgctctcctgcctcgccgccgccgctgctgcagccgctgcctatggccgatcgccaatggttggttttgaccctcaccccccgatgcgggccacaggcctcccctcaagcctggcctccattcctggaggaaaaccagcgtactcattccatgtgagtgctgatgggcagatgcagcccgtgcccttcccccacgacgccctggcaggccccggcatcccgaggcacgcccggcagatcaacacactcagccacggggaggtggtgtgtgccgtgaccatcagcaaccccacgaggcacgtctacacaggtggcaagggctgcgtgaagatctgggacatcagccagccaggcagcaagagccccatctcccagctggactgcctgaacagggacaattacatccgctcctgcaagctgctccctgatgggcgcacgctcatcgtgggcggcgaggccagcacgctcaccatctgggacctggcctcgcccacgccccgcatcaaggccgagctgacgtcctcggctcccgcctgttatgccctggccattagccctgacgccaaagtctgcttctcctgctgcagcgatgggaacattgctgtctgggacctgcacaaccagaccctggtcaggcagttccagggccacacagatggggccagctgcatagacatctcccatgatggcaccaaactgtggacagggggcctggacaacacggtgcgctcctgggacctgcgggagggccgacagctacagcagcatgacttcacttcccagatcttctcgctgggctactgccccactggggagtggctggctgtgggcatggagagcagcaacgtggaggtgctgcaccacaccaagcctgacaagtaccagctgcacctgcacgagagctgcgtgctctccctcaagttcgcctactgcggcaagtggttcgtgagcactgggaaagataaccttctcaacgcctggaggacgccttatggagccagcatattccagtctaaagaatcctcgtctgtcttgagttgtgacatttcagcggatgacaaatacattgtaacaggctctggtgacaagaaggccacagtttatgaggtcatctactaaacaagaactccagcagggctgtcaaactctgggagaaaccgactcggctctgacagggagacccccaggcgaggggccccgaggatggcggaggatgggccgcaggcagccgagcgttcagggctgcgctccggccggctgagagggcacgtgccccgtcacagtctggactcctgggcctggattgatgtgtctcacagactcggaagggttctgctcctcctcctccccctgaacaatgctggcagttgctacaaatag

SEQ ID NO: 192481 - DNA, 3509 bp, Homo sapiens
  Payload ID: 18006
  Gene Name: transducin-like enhancer of split 3
  ENST ID: ENST00000560589
  CDS Start-End: 353-2503
ccgaatgagggtctaggtcgcggcgagcgggttcactccgggttctgggtgtcgggagccagcgtcagggtcctactcccctgctgccgtgataagtcctttggctcgcgggaagtttcgaattgtttcacatccccctccccacggcggggacccaaatccccccgcgtccccaggctgtgggataatgggggcgcccccgggggggtgtcaggaaagtggaaaagtggctctagaggcccttgggtcggggcctcagaggaggctgtccaggcgccacgcctgagccggctcctcctgccctcgcagcctcaaagtggagtacgacaagctggcaaacgagaagacggagatgcagcgccattatgtgatgtactatgagatgtcctatggcttgaacattgaaatgcacaagcagacagagattgcgaagagactgaacacaattttagcacagatcatgcctttcctgtcacaagagcaccagcagcaggtggcgcaggcagtggagcgcgccaagcaggtcaccatgacggagctgaacgccatcatcgggcagcagcagctccaggcgcagcacctctcccatgccacacacggccccccggtccagttgccaccccacccgtcaggtctccagcctccaggaatccccccagtgacagggagcagctccgggctgctggcactgggcgccctgggcagccaggcccatctgacggtgaaggatgagaagaaccaccatgaactcgatcacagagagagagaatccagtgcgaataactctgtgtcaccctcggaaagcctccgggccagtgagaagcaccggggctctgcggactacagcatggaagccaagaagcggaaggcggaggagaaggacagcttgagccgatacgacagtgatggagacaagagtgatgatctggtggtggatgtttccaatgaggaccccgcaacgccccgggtcagcccggcacactcccctcctgaaaatgggctggacaaggcccgtagcctgaaaaaagatgcccccaccagccctgcctcggtggcctcttccagtagcacaccttcctccaagaccaaagaccttggtcataacgacaaatcctccacccctgggctcaagtccaacacaccaaccccaaggaacgacgccccaactccaggcaccagcacgaccccagggctcaggtcgatgccgggtaaacctccgggcatggacccgataggtataatggcctcggctctgcgcacgcccatctccatcaccagctcctatgcggcgcccttcgccatgatgagccaccatgagatgaacggctccctcaccagtcctggcgcctacgccggcctccacaacatcccaccccagatgagcgccgccgccgctgctgcagccgctgcctatggccgatcgccaatggtgagctttggagctgttggttttgaccctcaccccccgatgcgggccacaggcctcccctcaagcctggcctccattcctggaggaaaaccagcgtactcattccatgtgagtgctgatgggcagatgcagcccgtgcccttcccccacgacgccctggcaggccccggcatcccgaggcacgcccggcagatcaacacactcagccacggggaggtggtgtgtgccgtgaccatcagcaaccccacgaggcacgtctacacaggtggcaagggctgcgtgaagatctgggacatcagccagccaggcagcaagagccccatctcccagctggactgcctgaacagggacaattacatccgctcctgcaagctgctccctgatgggcgcacgctcatcgtgggcggcgaggccagcacgctcaccatctgggacctggcctcgcccacgccccgcatcaaggccgagctgacgtcctcggctcccgcctgttatgccctggccattagccctgacgccaaagtctgcttctcctgctgcagcgatgggaacattgctgtctgggacctgcacaaccagaccctggtcaggcagttccagggccacacagatggggccagctgcatagacatctcccatgatggcaccaaactgtggacagggggcctggacaacacggtgcgctcctgggacctgcgggagggccgacagctacagcagcatgacttcacttcccagatcttctcgctgggctactgccccactggggagtggctggctgtgggcatggagagcagcaacgtggaggtgctgcaccacaccaagcctgacaagtaccagctgcacctgcacgagagctgcgtgctctccctcaagttcgcctactgcggcaagtggttcgtgagcactgggaaagataaccttctcaacgcctggaggacgccttatggagccagcatattccagtctaaagaatcctcgtctgtcttgagttgtgacatttcagcggatgacaaatacattgtaacaggctctggtgacaagaaggccacagtttatgaggtcatctactaaacaagaactccagcagggctgtcaaactctgggagaaaccgactcggctctgacagggagacccccaggcgaggggccccgaggatggcggaggatgggccgcaggcagccgagcgttcagggctgcgctccggccggctgagagggcacgtgccccgtcacagtctggactcctgggcctggattgatgtgtctcacagactcggaagggttctgctcctcctcctccccctgaacaatgctggcagttgctacaaatagatttattggaggcttatggctccggttcccccacagacccgctcatgagtctctgtttgttcttcccttttcttttgccctgtccctcaccttgggtcgggggtgctggagtggaccacaatgttgtgctgggggatgggggggtctctctttgccgattgtgcagtgcacaagatttgtgaaaaatgtaaataacagactcctattgcggactgatcagtgggagaggaggccccttcccaccggaaactctgagtgtgtatttcgcctgctgtatttgtaatccactcgtggtggtggcttttttttttttttttttttaaataaacagatgctctcacctgggaagaggagacagggaggggaaccaattgaagaaagaggagaaaagtcttagagtgtggaaaaggcaaccaggttggccgtaaggtgcctgctggaatgcgtgtgcctccacacgggtctgggcatccggactgataaccagccggccagactgagggatggaaggcactgagatgggggcccgtccaggcggacacccgcagaaatggagctttctgtggtctcttgcactctggctgcctcttgccctctctgtgtctctctttcttggtctctccctctctcctcctcagcctggtctttctctttggtgcacacttagttattgttgtgagcaatggaagttcaaaggaactccctctccagctcttctgaatcttgggacacagcctaaaaagga

SEQ ID NO: 192482 - DNA, 457 bp, Homo sapiens
  Payload ID: 18006
  Gene Name: transducin-like enhancer of split 3
  ENST ID: ENST00000537387
  CDS Start-End: 1-120
gtggcgcaggcagtggagcgcgccaagcaggtcaccatgacggagctgaacgccatcatcgggataaggaaatttgaggctccaggacttgaagtaacctgccccaggccacacagctaggaagtgccagagctgggatttcaatcctgttctgtctagttccaaagcctccactcttccagttaccccgttttccaccactgatgtccggtgacgttagctctcattccactggcccccagctcatctggctctggggcctttgctgtgatgacctgccctgcccctgctctgtaaggcaggcttggagttcctaagaaataaggagccttccccagggtccagcctcagggtggaagatgctggcagctaatgctgaaggcatcagcagctccaggcgcagcacctctcccatgccacacacggccccccggtccagttgccaccccacccgtca

SEQ ID NO: 192483 - DNA, 495 bp, Homo sapiens
  Payload ID: 18006
  Gene Name: transducin-like enhancer of split 3
  ENST ID: ENST00000560996
  CDS Start-End: 186-495
tgcccccgccccctcccctgtcttgtcttcgcgggctccaggctccccatcaacccgggcagccgggatttaaattcacggtggctgagtcttgtgacaggatcaaagacgaattccagttcctgcaagctcagtatcacagcctcaaagtggagtacgacaagctggcaaacgagaagacggagatgcagcgccattatgtgatgtactatgagatgtcctatggcttgaacattgaaatgcacaagcagacagagattgcgaagagactgaacacaattttagcacagatcatgcctttcctgtcacaagagcaccagcagcaggtggcgcaggcagtggagcgcgccaagcaggtcaccatgacggagctgaacgccatcatcggggtacgtggactccccaatctgcctcttacccagcagcagctccaggcgcagcacctctcccatgccacacacggccccccggtccagttgccaccccacccgtcag

SEQ ID NO: 192484 - DNA, 5742 bp, Homo sapiens
  Payload ID: 18006
  Gene Name: transducin-like enhancer of split 3
  ENST ID: ENST00000627388
  CDS Start-End: 1120-3438
agtccctatttggaactgctctcgcggcagttcagacctcgtgctcgtccccttcgcctgtctgtgtgtggtatccgtaggtccggggcacttttttttttggtgtgtgtgtgtgtgcgtgcgcgcgtgtgtgtgtgttgggtgtgtgtgttttgggggtttgccggggcgcggagaggagagccgggccgaggggaaggaaggaagccgtagagctccccggtctcgggctgcgtctcccctccagcgctctcctgcctgtgcgctccgacgcggcagcggcggtggcgctgagcgctcctcggtggggacgcggtgctcaagctgggagcagcgagaaccctttgcggaggcttcccgtgcccgctggacttaggatgccagggcgtttgatttgcacctactgagcccggagttcctccccggccctgggaagggcttgcagcggcggcggcggcggcggcagcggcagtagcagacggaacagcaggctctcctctccgagggggggcgtcgaagcgcccgcgccgggctcccgccctcaccctccggcgctcctgcggccccaagccaccacctcgtagcccgcctccttcctcttctcgccgcgagccccaggcccggacgcctctaggatcggacccgcgcgccccggatgcttggggctgccccggcgcgcccccctacaggcgcgacccgctgagtgacccggagggggcccgagctcgccccaggaggggcccccggcctcgggaccccgcgccggacctgctggggagccgacgatgtccgcgcagtcccaggcattgacgcgctcgacgcagcccagggaaggcggccggccgctgcccgccgagccctaggcgcacaaagcccgcgcccgccgcccggccccggcgcccgccgacgactttgccgcctgctccgcggctctttgtctccacttggggcgggcgcccgactctgggatttcgctgcgagaacgagctgggggggccgggggcgagctctcggtttcccggccgccccccgctcgggctcggctcccccctcccccgcacctccccggcccgggctctcggcgcttccacgctctcggaatcacgacccctccctgccatgtatccgcagggcagacatccggctccccatcaacccgggcagccgggatttaaattcacggtggctgagtcttgtgacaggatcaaagacgaattccagttcctgcaagctcagtatcacagcctcaaagtggagtacgacaagctggcaaacgagaagacggagatgcagcgccattatgtgatgtactatgagatgtcctatggcttgaacattgaaatgcacaagcagacagagattgcgaagagactgaacacaattttagcacagatcatgcctttcctgtcacaagagcaccagcagcaggtggcgcaggcagtggagcgcgccaagcaggtcaccatgacggagctgaacgccatcatcgggcagcagcagctccaggcgcagcacctctcccatgccacacacggccccccggtccagttgccaccccacccgtcaggtctccagcctccaggaatccccccagtgacagggagcagctccgggctgctggcactgggcgccctgggcagccaggcccatctgacggtgaaggatgagaagaaccaccatgaactcgatcacagaggtgcggctgggctggggaataactctgtgtcaccctcggaaagcctccgggccagtgagaagcaccggggctctgcggactacagcatggaagccaagaagcggaaggcggaggagaaggacagcttgagccgatacgacagtgatggagacaagagtgatgatctggtggtggatgtttccaatgaggaccccgcaacgccccgggtcagcccggcacactcccctcctgaaaatgggctggacaaggcccgtagcctgaaaaaagatgcccccaccagccctgcctcggtggcctcttccagtagcacaccttcctccaagaccaaagaccttggtcataacgacaaatcctccacccctgggctcaagtccaacacaccaaccccaaggaacgacgccccaactccaggcaccagcacgaccccagggctcaggtcgatgccgggtaaacctccgggcatggacccgataggtataatggcctcggctctgcgcacgcccatctccatcaccagctcctatgcggcgcccttcgccatgatgagccaccatgagatgaacggctccctcaccagtcctggcgcctacgccggcctccacaacatcccaccccagatgagcgccgccgccgctgctgcagccgctgcctatggccgatcgccaatggtgagctttggagctgttggttttgaccctcaccccccgatgcgggccacaggcctcccctcaagcctggcctccattcctggaggaaaaccagcgtactcattccatgtgagtgctgatgggcagatgcagcccgtgcccttcccccacgacgccctggcaggccccggcatcccgaggcacgcccggcagatcaacacactcagccacggggaggtggtgtgtgccgtgaccatcagcaaccccacgaggcacgtctacacaggtggcaagggctgcgtgaagatctgggacatcagccagccaggcagcaagagccccatctcccagctggactgcctgaacagggacaattacatccgctcctgcaagctgctccctgatgggcgcacgctcatcgtgggcggcgaggccagcacgctcaccatctgggacctggcctcgcccacgccccgcatcaaggccgagctgacgtcctcggctcccgcctgttatgccctggccattagccctgacgccaaagtctgcttctcctgctgcagcgatgggaacattgctgtctgggacctgcacaaccagaccctggtcaggcagttccagggccacacagatggggccagctgcatagacatctcccatgatggcaccaaactgtggacagggggcctggacaacacggtgcgctcctgggacctgcgggagggccgacagctacagcagcatgacttcacttcccagatcttctcgctgggctactgccccactggggagtggctggctgtgggcatggagagcagcaacgtggaggtgctgcaccacaccaagcctgacaagtaccagctgcacctgcacgagagctgcgtgctctccctcaagttcgcctactgcggcaagtggttcgtgagcactgggaaagataaccttctcaacgcctggaggacgccttatggagccagcatattccagtctaaagaatcctcgtctgtcttgagttgtgacatttcagcggatgacaaatacattgtaacaggctctggtgacaagaaggccacagtttatgaggtcatctactaaacaagaactccagcagggctgtcaaactctgggagaaaccgactcggctctgacagggagacccccaggcgaggggccccgaggatggcggaggatgggccgcaggcagccgagcgttcagggctgcgctccggccggctgagagggcacgtgccccgtcacagtctggactcctgggcctggattgatgtgtctcacagactcggaagggttctgctcctcctcctccccctgaacaatgctggcagttgctacaaatagatttattggaggcttatggctccggttcccccacagacccgctcatgagtctctgtttgttcttcccttttcttttgccctgtccctcaccttgggtcgggggtgctggagtggaccacaatgttgtgctgggggatgggggggtctctctttgccgattgtgcagtgcacaagatttgtgaaaaatgtaaataacagactcctattgcggactgatcagtgggagaggaggccccttcccaccggaaactctgagtgtgtatttcgcctgctgtatttgtaatccactcgtggtggtggcttttttttttttttttttttaaataaacagatgctctcacctgggaagaggagacagggaggggaaccaattgaagaaagaggagaaaagtcttagagtgtggaaaaggcaaccaggttggccgtaaggtgcctgctggaatgcgtgtgcctccacacgggtctgggcatccggactgataaccagccggccagactgagggatggaaggcactgagatgggggcccgtccaggcggacacccgcagaaatggagctttctgtggtctcttgcactctggctgcctcttgccctctctgtgtctctctttcttggtctctccctctctcctcctcagcctggtctttctctttggtgcacacttagttattgttgtgagcaatggaagttcaaaggaactccctctccagctcttctgaatcttgggacacagcctaaaaaggacaaaaagttagaagacagcatagcaactcagctcagggagctaccagagaaaaatagcaactgatgtgggtgctttttttttttttttaatttgaataaaaagaattagaagtgatgtccttttataaaatgccttctcccccttcccgcctacagtctcttcctctccccttagaggggggaaagtgtataaacctacagggttgtgagtctgaaaagaggatccccctcacccccaccctgggcagagcagtgggggttggggggtgggagagggggacacagatcctggcacactgtggatatttcttgcagattgcagtctcttgtggcccaaacaggttaggtagactatcgcctctggcaggtgccaccttttggtaccaacatgttctgaggtgttaggatttgggttgggttttttttgtttgttttttttttccttttggtctttttttttttctccttttaaagaaaagctaaaggccgctgtgagtcctggtggcaggctctccatggatgtagcatatcgaagataatttttatactgcatttttatggattattttgtaatgtgtgattccgtctgctgaggaggtgggaggggctccagggaaagccacccaccttcagtgaggttgctccccagctgagcgcaccgggcatgggatgtggaggctggcgacacaccctgtgcctctccaaggctgggcgcgtggggcgtccagagtctctctgggtctcagatgtccatctgccacctcttgttaaggctctagccagaagggagggtgagggtagaagaaagttattcccgaagaaaaaaagaatgaaaagtcattgtactgaactgtttttatatttttaaaagttactatttaaaggttggtttgattgttgcgtcttaattgcctctccccccagtttgccagtcccgccccccgccccccgggaaaacagccaggccactgttgctgtcacattctggagcctgggccagggccatttcccatcgatgtgagctcttctcatctcacagcattccctgcgctgcttccacccccttctccccttccagatacccagcatcgcagcagggatttcacaatcccatactgtgtcgcctcccatccaagcgccagggagggtggggggtaggagctaagacttcctctggacagatgggcagggcagagttcactgaggtgaaggaagaccacaggttaacaccaaagtattgtacagctgtcaatgcaaaacttttttggaaaaaaattaaacgtaatgaacttgaagcg

SEQ ID NO: 192485 - DNA, 2382 bp, Homo sapiens
  Payload ID: 18007
  Gene Name: transducin-like enhancer of split 4
  Uniprot ID: Q04727
  ENST ID: ENST00000265284
  CDS Start-End: 47-2293
atgagccgcgcgcctctgccgagcgcagccaactaaatcggcttggatgattcgcgacctgagcaagatgtacccgcagaccagacacccagcaccgcatcagcctgctcaaccctttaaatttacaatttccgaatcctgtgatcggattaaggaagagtttcagtttttacaggctcaataccacagtctgaagctggaatgtgagaaactcgccagtgagaagacagagatgcagcggcattatgtcatgtattatgaaatgtcctatgggttgaatatagaaatgcacaagcaggcagagattgtcaagaggctgaatgctatctgtgcacaagtcattcctttcctgtcccaagagcaacaactccaggcccagcatttatcacatggacatggtctccccgtacctctgactccacacccttcagggctccagccccctgccattccacccatcggtagcagtgccgggcttctggccctctccagtgctctaggaggtcagtcccatcttccaattaaagatgagaagaagcaccatgacaatgatcaccaaagagacagagactccatcaagagctcttcagtatccccatcagccagtttccgaggtgctgagaagcacagaaactccgcagactactcctcagagagcaaaaagcagaaaactgaagaaaaggaaattgcagctcgttatgacagcgatggtgagaaaagtgatgacaacttggtggttgacgtttccaatgaggatccatcttcccctcgagggagcccagcacattcccccagagagaatggcctagacaagacacgcctgctcaagaaagatgccccgattagtccagcctctattgcatcttccagcagtactccctcctccaaatccaaagaacttagccttaatgaaaaatctactactcccgtctcaaagtccaatacccctactccacgaactgatgcgcccaccccaggcagtaactctactcccggattgaggcctgtacctggaaaaccaccaggagttgaccctttggcctcaagcctaaggaccccaatggcagtaccttgtccatatccaactccatttgggattgtgccccatgctggaatgaacggagagctgaccagccccggagcggcctacgctgggctccacaacatctcccctcagatgagcgcagctgctgccgccgccgctgctgctgctgcctatgggagatcaccagtggtgggatttgatccacaccatcacatgcgtgtgccagcaatacctccaaacctgacaggcattccaggaggaaaaccagcatactccttccatgttagcgcagatggtcagatgcagcctgtcccttttccacccgacgccctcatcggacctggaatcccccggcatgctcgccagatcaacaccctcaaccacggggaggtggtgtgcgcggtgaccatcagcaaccccacgagacacgtgtacacgggtgggaagggctgcgtcaaggtctgggacatcagccacccaggcaataagagtcctgtctcccagctcgactgtctgaacagggataactacatccgttcctgcagattgctccctgatggtcgcaccctaattgttggaggggaagccagtactttgtccatttgggacctggcggctccaaccccacgcatcaaggcagagctgacatcctcggcccccgcctgctatgccctggccatcagccccgattccaaggtctgcttctcatgctgcagcgacggcaacatcgctgtgtgggatctgcacaaccagaccttggtgaggcaattccagggccacacagatggagccagctgtattgacatttctaatgatggcaccaagctctggacaggtggtttggacaacacggtcaggtcctgggacctgcgcgaggggcggcagctgcagcagcacgacttcacctcccagatcttttctctgggctactgcccaactggagagtggcttgcagtggggatggagaacagcaatgtggaagttttgcatgtcaccaagccagacaaataccaactacatcttcatgagagctgtgtgctgtcgctcaagtttgcccattgtggcaaatggtttgtaagcactggaaaggacaaccttctgaatgcctggagaacaccttatggggccagtatattccagtccaaagaatcctcatcggtgcttagctgtgacatctccgtggacgacaaatacattgtcactggctctggggataagaaggccacagtttatgaagttatttattaaagacaaatcttcatgcagactggacttctcctcctggtagcactttgctctgtcatcctttttgttcacccccatccccgcatctaaaa

SEQ ID NO: 192486 - DNA, 2793 bp, Homo sapiens
  Payload ID: 18007
  Gene Name: transducin-like enhancer of split 4
  Uniprot ID: Q04727
  ENST ID: ENST00000376537
  CDS Start-End: 177-2594
gccgccgcgcgttcctgccgcccgtgtcacgcgagacccggcgggggccgggaccgcccgagccgcccctcagaccgagccggccgcctccgctgccgcggccgcctcctcttcggggtcattaaagccaatgagccgcgcgcctctgccgagcgcagccaactaaatcggcttggatgattcgcgacctgagcaagatgtacccgcagaccagacacccagcaccgcatcagcctgctcaaccctttaaatttacaatttccgaatcctgtgatcggattaaggaagagtttcagtttttacaggctcaataccacagtctgaagctggaatgtgagaaactcgccagtgagaagacagagatgcagcggcattatgtcatgtattatgaaatgtcctatgggttgaatatagaaatgcacaagcaggcagagattgtcaagaggctgaatgctatctgtgcacaagtcattcctttcctgtcccaagagcaccagcaacaagtggtgcaggctgtggaacgggccaagcaggtgaccatggcagaactgaacgccatcattgggcaacaactccaggcccagcatttatcacatggacatggtctccccgtacctctgactccacacccttcagggctccagccccctgccattccacccatcggtagcagtgccgggcttctggccctctccagtgctctaggaggtcagtcccatcttccaattaaagatgagaagaagcaccatgacaatgatcaccaaagagacagagactccatcaagagctcttcagtatccccatcagccagtttccgaggtgctgagaagcacagaaactccgcagactactcctcagagagcaaaaagcagaaaactgaagaaaaggaaattgcagctcgttatgacagcgatggtgagaaaagtgatgacaacttggtggttgacgtttccaatgaggatccatcttcccctcgagggagcccagcacattcccccagagagaatggcctagacaagacacgcctgctcaagaaagatgccccgattagtccagcctctattgcatcttccagcagtactccctcctccaaatccaaagaacttagccttaagagggatatggggaaattgagtgaaacacgtcttagcgaagatgaacaatgcacattggggttacagagatggttttgtcgcctgtggtttatgaatgaaaaatctactactcccgtctcaaagtccaatacccctactccacgaactgatgcgcccaccccaggcagtaactctactcccggattgaggcctgtacctggaaaaccaccaggagttgaccctttggcctcaagcctaaggaccccaatggcagtaccttgtccatatccaactccatttgggattgtgccccatgctggaatgaacggagagctgaccagccccggagcggcctacgctgggctccacaacatctcccctcagatgagcgcagctgctgccgccgccgctgctgctgctgcctatgggagatcaccagtggtgggatttgatccacaccatcacatgcgtgtgccagcaatacctccaaacctgacaggcattccaggaggaaaaccagcatactccttccatgttagcgcagatggtcagatgcagcctgtcccttttccacccgacgccctcatcggacctggaatcccccggcatgctcgccagatcaacaccctcaaccacggggaggtggtgtgcgcggtgaccatcagcaaccccacgagacacgtgtacacgggtgggaagggctgcgtcaaggtctgggacatcagccacccaggcaataagagtcctgtctcccagctcgactgtctgaacagggataactacatccgttcctgcagattgctccctgatggtcgcaccctaattgttggaggggaagccagtactttgtccatttgggacctggcggctccaaccccacgcatcaaggcagagctgacatcctcggcccccgcctgctatgccctggccatcagccccgattccaaggtctgcttctcatgctgcagcgacggcaacatcgctgtgtgggatctgcacaaccagaccttggtgaggcaattccagggccacacagatggagccagctgtattgacatttctaatgatggcaccaagctctggacaggtggtttggacaacacggtcaggtcctgggacctgcgcgaggggcggcagctgcagcagcacgacttcacctcccagatcttttctctgggctactgcccaactggagagtggcttgcagtggggatggagaacagcaatgtggaagttttgcatgtcaccaagccagacaaataccaactacatcttcatgagagctgtgtgctgtcgctcaagtttgcccattgtggcaaatggtttgtaagcactggaaaggacaaccttctgaatgcctggagaacaccttatggggccagtatattccagtccaaagaatcctcatcggtgcttagctgtgacatctccgtggacgacaaatacattgtcactggctctggggataagaaggccacagtttatgaagttatttattaaagacaaatcttcatgcagactggacttctcctcctggtagcactttgctctgtcatcctttttgttcacccccatccccgcatctaaaaccaaggatttcagatactcattgcagttgtggagtttaatcccctttcttaacctcacttcccacttgctattgaattgtgaatagtcattaaaaacctgtgataccaaa

SEQ ID NO: 192487 - DNA, 4871 bp, Homo sapiens
  Payload ID: 18007
  Gene Name: transducin-like enhancer of split 4
  Uniprot ID: Q04727
  ENST ID: ENST00000376544
  CDS Start-End: 1019-3133
ggagagctcgccagagcgctcgcatggcgggccggtgattgtagtcaatctggccgtattctcaggcagggtcgcccggggcggactacatctcccgggatgctgcgcggccgccccgcggaagattgtgaatatgtatcagaatgttaatgattagctgctgctaaatttggtcaaagaagtcacctacacagagcgtgttgttagagctgtgctgagcgggtgtttgggttgttggctgctttcttccccctttctcacacacttgtatattattttgaggtggtgttcgcagagtttgaaaggagagagaattaaaaaaaaaagccgcaagcgtttcactcttttatttttataatccccttcaatttggggttaaaaaaaagacaagaaaacaggaaggaagagaaataaggaaatgagatgtggtaaaagaagctaaaaggtgccttttaaaagatcgttgctgtgaagtgaaaaaaatctccagagaaaccaaaaagcaccgccgagacctcttccgaaccaaaggagtttgtgtttgcttttagggaagaagaaagatcattcattcggaggaataacaaccaattaaaagacaaataaaaaaagtttggagtgggacgcagagcgagcgagaggagctgccggcgggcggtggggcgcggagcccgcactttcccggccgggtgagcggcggccgcggcgccgggctcggcgggtgcgcctcggcggagcgaacgtcggagcgttgccttgggagacgcgcgccggacaatgcccgcggcgggccagtgacgcccgcggggaatgcggagcggcccggcagccggcacccagccgccgccgcgcgttcctgccgcccgtgtcacgcgagacccggcgggggccgggaccgcccgagccgcccctcagaccgagccggccgcctccgctgccgcggccgcctcctcttcggggtcattaaagccaatgagccgcgcgcctctgccgagcgcagccaactaaatcggcttggatgattcgcgacctgagcaagatgtacccgcagaccagacacccagcaccgcatcagcctgctcaaccctttaaatttacaatttccgaatcctgtgatcggattaaggaagagtttcagtttttacaggctcaataccacagtctgaagctggaatgtgagaaactcgccagtgagaagacagagatgcagcggcattatgtcatgtattatgaaatgtcctatgggttgaatatagaaatgcacaagcaggcagagattgtcaagaggctgaatgctatctgtgcacaagtcattcctttcctgtcccaagagcaccagcaacaagtggtgcaggctgtggaacgggccaagcaggtgaccatggcagaactgaacgccatcattgggcaacaactccaggcccagcatttatcacatggacatggtctccccgtacctctgactccacacccttcagggctccagccccctgccattccacccatcggtagcagtgccgggcttctggccctctccagtgctctaggaggtcagtcccatcttccaattaaagatgagaagaagcaccatgacaatgatcaccaaagagacagagactccatcaagagctcttcagtatccccatcagccagtttccgaggtgctgagaagcacagaaactccgcagactactcctcagagagcaaaaagcagaaaactgaagaaaaggaaattgcagctcgttataatgaaaaatctactactcccgtctcaaagtccaatacccctactccacgaactgatgcgcccaccccaggcagtaactctactcccggattgaggcctgtacctggaaaaccaccaggagttgaccctttggcctcaagcctaaggaccccaatggcagtaccttgtccatatccaactccatttgggattgtgccccatgctggaatgaacggagagctgaccagccccggagcggcctacgctgggctccacaacatctcccctcagatgagcgcagctgctgccgccgccgctgctgctgctgcctatgggagatcaccagtggtgggatttgatccacaccatcacatgcgtgtgccagcaatacctccaaacctgacaggcattccaggaggaaaaccagcatactccttccatgttagcgcagatggtcagatgcagcctgtcccttttccacccgacgccctcatcggacctggaatcccccggcatgctcgccagatcaacaccctcaaccacggggaggtggtgtgcgcggtgaccatcagcaaccccacgagacacgtgtacacgggtgggaagggctgcgtcaaggtctgggacatcagccacccaggcaataagagtcctgtctcccagctcgactgtctgaacagggataactacatccgttcctgcagattgctccctgatggtcgcaccctaattgttggaggggaagccagtactttgtccatttgggacctggcggctccaaccccacgcatcaaggcagagctgacatcctcggcccccgcctgctatgccctggccatcagccccgattccaaggtctgcttctcatgctgcagcgacggcaacatcgctgtgtgggatctgcacaaccagaccttggtgaggcaattccagggccacacagatggagccagctgtattgacatttctaatgatggcaccaagctctggacaggtggtttggacaacacggtcaggtcctgggacctgcgcgaggggcggcagctgcagcagcacgacttcacctcccagatcttttctctgggctactgcccaactggagagtggcttgcagtggggatggagaacagcaatgtggaagttttgcatgtcaccaagccagacaaataccaactacatcttcatgagagctgtgtgctgtcgctcaagtttgcccattgtggcaaatggtttgtaagcactggaaaggacaaccttctgaatgcctggagaacaccttatggggccagtatattccagtccaaagaatcctcatcggtgcttagctgtgacatctccgtggacgacaaatacattgtcactggctctggggataagaaggccacagtttatgaagttatttattaaagacaaatcttcatgcagactggacttctcctcctggtagcactttgctctgtcatcctttttgttcacccccatccccgcatctaaaaccaaggatttcagatactcattgcagttgtggagtttaatcccctttcttaacctcacttcccacttgctattgaattgtgaatagtcattaaaaacctgtgataccaaatcttcagctgtctacttggaagaacatggaataagcatacttaacagtgaaaagaatctttaattatgtattatatctgtaatatatttattttgtttaaagaaggctttctaacaatgactgactaaataaagctgtctgctcctgcattgataatgaaggtgcgttgtatttgatacccctccccccctttttttggcaaaggaggggaaaggaaggtttaaaataattgatttaaaatgtcactaagtgtagactgatgactgtatagagatgtgaaatgtataattacacatggaagcaatatgttgctgtgttgttattaggttttttttgtttttgttttctacatcttttaaagacttttggaaatttggctgaacaattagaacacaacaggccaactcatactcatttggatctatttagacaacgttaaccaatatatctatagctttagattatattcgataaaagtaattggactttttttctttttttgactcgttgacaagtgtctttgtaatatgtttttagttccctttttttgttgtattataggcagatgaacaaattaaatttggcctcaaagagagaacttactcccttctggatatttttgccacatttctttgcaaaaggagatatatatatctttagtcagttttgttgttatgagaaattatgggttattttgtggcatgctctttgggagctgcacagttatggggaggactcccactgctgtgcaagttaagtcttttacaaaacaaggacagcagaggagggtttgcagagacctccctctgaaaaacacaaagaatggactctctcctgggatgaggacttgctttctttacctccggttctttccatgtcttagttggatgtccctgaaatggacacaggctgtgccattgtgccagaaacattgtgttatcttttatgttgttgttgttgctgttaaactataatatgtgacttctttttttattattttttgtttgaatgctttaaaaatcttttaagtctgtggatctgctgatgtacagtgcctttgctgctatggatcaaaatcaaaagaaccgtgtagatatactttattgtataagtagaaaattacttaatttcatactagaaatggatggatgctgcaagttgaaatggactgtccattgacgttcctaatgtggtagcagaaaaaaaaaaatggtgtcttaagtgcttagtgtttgatgtcattaacagtttcgtaaaactctacagtgtagaaagattttgatactaaactgtgcgttgtacatagttctaatgcattgtattgaccaccagtacttctataatggtagattgtttgtgaattcagacttttaagcattaaacataaataacttctagtatgcttatttttctaattctttgtcttgatgacattagtttattttttatctttggctgtgccactcctatatattaaaaatgcctagttttttcaagggagattgttgttaaagtaaagtggttttttttgttgttaaa

SEQ ID NO: 192488 - DNA, 3695 bp, Homo sapiens
  Payload ID: 18007
  Gene Name: transducin-like enhancer of split 4
  Uniprot ID: Q04727
  ENST ID: ENST00000376552
  CDS Start-End: 1019-3340
ggagagctcgccagagcgctcgcatggcgggccggtgattgtagtcaatctggccgtattctcaggcagggtcgcccggggcggactacatctcccgggatgctgcgcggccgccccgcggaagattgtgaatatgtatcagaatgttaatgattagctgctgctaaatttggtcaaagaagtcacctacacagagcgtgttgttagagctgtgctgagcgggtgtttgggttgttggctgctttcttccccctttctcacacacttgtatattattttgaggtggtgttcgcagagtttgaaaggagagagaattaaaaaaaaaagccgcaagcgtttcactcttttatttttataatccccttcaatttggggttaaaaaaaagacaagaaaacaggaaggaagagaaataaggaaatgagatgtggtaaaagaagctaaaaggtgccttttaaaagatcgttgctgtgaagtgaaaaaaatctccagagaaaccaaaaagcaccgccgagacctcttccgaaccaaaggagtttgtgtttgcttttagggaagaagaaagatcattcattcggaggaataacaaccaattaaaagacaaataaaaaaagtttggagtgggacgcagagcgagcgagaggagctgccggcgggcggtggggcgcggagcccgcactttcccggccgggtgagcggcggccgcggcgccgggctcggcgggtgcgcctcggcggagcgaacgtcggagcgttgccttgggagacgcgcgccggacaatgcccgcggcgggccagtgacgcccgcggggaatgcggagcggcccggcagccggcacccagccgccgccgcgcgttcctgccgcccgtgtcacgcgagacccggcgggggccgggaccgcccgagccgcccctcagaccgagccggccgcctccgctgccgcggccgcctcctcttcggggtcattaaagccaatgagccgcgcgcctctgccgagcgcagccaactaaatcggcttggatgattcgcgacctgagcaagatgtacccgcagaccagacacccagcaccgcatcagcctgctcaaccctttaaatttacaatttccgaatcctgtgatcggattaaggaagagtttcagtttttacaggctcaataccacagtctgaagctggaatgtgagaaactcgccagtgagaagacagagatgcagcggcattatgtcatgtattatgaaatgtcctatgggttgaatatagaaatgcacaagcaggcagagattgtcaagaggctgaatgctatctgtgcacaagtcattcctttcctgtcccaagagcaccagcaacaagtggtgcaggctgtggaacgggccaagcaggtgaccatggcagaactgaacgccatcattgggcaacaactccaggcccagcatttatcacatggacatggtctccccgtacctctgactccacacccttcagggctccagccccctgccattccacccatcggtagcagtgccgggcttctggccctctccagtgctctaggaggtcagtcccatcttccaattaaagatgagaagaagcaccatgacaatgatcaccaaagagacagagactccatcaagagctcttcagtatccccatcagccagtttccgaggtgctgagaagcacagaaactccgcagactactcctcagagagcaaaaagcagaaaactgaagaaaaggaaattgcagctcgttatgacagcgatggtgagaaaagtgatgacaacttggtggttgacgtttccaatgaggatccatcttcccctcgagggagcccagcacattcccccagagagaatggcctagacaagacacgcctgctcaagaaagatgccccgattagtccagcctctattgcatcttccagcagtactccctcctccaaatccaaagaacttagccttaatgaaaaatctactactcccgtctcaaagtccaatacccctactccacgaactgatgcgcccaccccaggcagtaactctactcccggattgaggcctgtacctggaaaaccaccaggagttgaccctttggcctcaagcctaaggaccccaatggcagtaccttgtccatatccaactccatttgggattgtgccccatgctggaatgaacggagagctgaccagccccggagcggcctacgctgggctccacaacatctcccctcagatgagcgcagctgctgccgccgccgctgctgctgctgcctatgggagatcaccagtggtgggatttgatccacaccatcacatgcgtgtgccagcaatacctccaaacctgacaggcattccaggaggaaaaccagcatactccttccatgttagcgcagatggtcagatgcagcctgtcccttttccacccgacgccctcatcggacctggaatcccccggcatgctcgccagatcaacaccctcaaccacggggaggtggtgtgcgcggtgaccatcagcaaccccacgagacacgtgtacacgggtgggaagggctgcgtcaaggtctgggacatcagccacccaggcaataagagtcctgtctcccagctcgactgtctgaacagggataactacatccgttcctgcagattgctccctgatggtcgcaccctaattgttggaggggaagccagtactttgtccatttgggacctggcggctccaaccccacgcatcaaggcagagctgacatcctcggcccccgcctgctatgccctggccatcagccccgattccaaggtctgcttctcatgctgcagcgacggcaacatcgctgtgtgggatctgcacaaccagaccttggtgaggcaattccagggccacacagatggagccagctgtattgacatttctaatgatggcaccaagctctggacaggtggtttggacaacacggtcaggtcctgggacctgcgcgaggggcggcagctgcagcagcacgacttcacctcccagatcttttctctgggctactgcccaactggagagtggcttgcagtggggatggagaacagcaatgtggaagttttgcatgtcaccaagccagacaaataccaactacatcttcatgagagctgtgtgctgtcgctcaagtttgcccattgtggcaaatggtttgtaagcactggaaaggacaaccttctgaatgcctggagaacaccttatggggccagtatattccagtccaaagaatcctcatcggtgcttagctgtgacatctccgtggacgacaaatacattgtcactggctctggggataagaaggccacagtttatgaagttatttattaaagacaaatcttcatgcagactggacttctcctcctggtagcactttgctctgtcatcctttttgttcacccccatccccgcatctaaaaccaaggatttcagatactcattgcagttgtggagtttaatcccctttcttaacctcacttcccacttgctattgaattgtgaatagtcattaaaaacctgtgataccaaatcttcagctgtctacttggaagaacatggaataagcatacttaacagtgaaaagaatctttaattatgtattatatctgtaatatatttattttgtttaaagaaggctttctaacaatgactgactaaataaagctgtctgctcctgcattgataa

SEQ ID NO: 192489 - DNA, 565 bp, Homo sapiens
  Payload ID: 18007
  Gene Name: transducin-like enhancer of split 4
  ENST ID: ENST00000414465
  CDS Start-End: 181-565
agccgccgccgcgcgttcctgccgcccgtgtcacgcgagacccggcgggggccgggaccgcccgagccgcccctcagaccgagccggccgcctccgctgccgcggccgcctcctcttcggggtcattaaagccaatgagccgcgcgcctctgccgagcgcagccaactaaatcggcttggatgattcgcgacctgagcaagatgtacccgcagaccagacacccagcaccgcatcagcctgctcaaccctttaaatttacaatttccgaatcctgtgatcggattaaggaagagtttcagtttttacaggctcaataccacagtctgaagctggaatgtgagaaactcgccagtgagaagacagagatgcagcggcattatgtcatggcagagattgtcaagaggctgaatgctatctgtgcacaagtcattcctttcctgtcccaagagcaccagcaacaagtggtgcaggctgtggaacgggccaagcaggtgaccatggcagaactgaacgccatcattgggcagcaacaactccaggcccagcatttatcacatggacatg

SEQ ID NO: 192490 - DNA, 632 bp, Homo sapiens
  Payload ID: 18007
  Gene Name: transducin-like enhancer of split 4
  ENST ID: ENST00000417836
  CDS Start-End: 1-632
ggagcccagcacattcccccagagagaatggcctagacaagacacgcctgctcaagaaagatgccccgattagtccagcctctattgcatcttccagcagtactccctcctccaaatccaaagaacttagccttaagagggatatggggaaattgagtgaaacacgtcttagcgaagatgaacaatgcacattggggttacagagatggttttgtcgcctgtggtttatgaatgaaaaatctactactcccgtctcaaagtccaatacccctactccacgaactgatgcgcccaccccaggcagtaactctactcccggattgaggcctgtacctggaaaaccaccaggagttgaccctttggcctcaagcctaaggaccccaatggcagtaccttgtccatatccaactccatttgggattgtgccccatgctggaatgaacggagagctgaccagccccggagcggcctacgctgggctccacaacatctcccctcagatgagcgcagctgctgccgccgccgctgctgctgctgcctatgggagatcaccagtggtgggatttgatccacaccatcacatgcgtgtgccagcaatacctccaaacctgacaggcattccaggaggaaaa

SEQ ID NO: 192491 - DNA, 967 bp, Homo sapiens
  Payload ID: 18007
  Gene Name: transducin-like enhancer of split 4
  ENST ID: ENST00000428713
  CDS Start-End: 1-967
gcaccgcatcagcctgctcaaccctttaaatttacaatttccgaatcctgtgatcggattaaggaagagtttcagtttttacaggctcaataccacagtctgaagctggaatgtgagaaactcgccagtgagaagacagagatgcagcggcattatgtcatgtattatgaaatgtcctatgggttgaatatagaaatgcacaagcaggcagagattgtcaagaggctgaatgctatctgtgcacaagtcattcctttcctgtcccaagagcaccagcaacaagtggtgcaggctgtggaacgggccaagcaggtgaccatggcagaactgaacgccatcattgggcaacaactccaggcccagcatttatcacatggacatggtctccccgtacctctgactccacacccttcagggctccagccccctgccattccacccatcggtagcagtgccgggcttctggccctctccagtgctctaggaggtcagtcccatcttccaattaaagatgagaagaagcaccatgacaatgatcaccaaagagacagagactccatcaagagctcttcagtatccccatcagccagtttccgaggtgctgagaagcacagaaactccgcagactactcctcagagagcaaaaagcagaaaactgaagaaaaggaaattgcagctcgttatgacagcgatggtgagaaaagtgatgacaacttggtggttgacgtttccaatgagaagagggatatggggaaattgagtgaaacacgtcttagcgaagatgaacaatgcacattggggttacagagatggttttgtcgcctgtggtttatgaatgaaaaatctactactcccgtctcaaagtccaatacccctactccacgaactgatgcgcccaccccaggcagtaactctactcccggattgaggcctgtacctggaaaaccaccaggagttgaccctttgg

SEQ ID NO: 192492 - DNA, 656 bp, Homo sapiens
  Payload ID: 18007
  Gene Name: transducin-like enhancer of split 4
  ENST ID: ENST00000425506
  CDS Start-End: 71-656
gggcgaacgaacgagccgagagggtggcggccgcctccctcctcccccggcctgaccgcagcccgacgccatggcgcgggtccccccgacgggccagtttcgattccgggcaccgcatcagcctgctcaaccctttaaatttacaatttccgaatcctgtgatcggattaaggaagagtttcagtttttacaggctcaataccacagtctgaagctggaatgtgagaaactcgccagtgagaagacagagatgcagcggcattatgtcatgtattatgaaatgtcctatgggttgaatatagaaatgcacaagcaggcagagattgtcaagaggctgaatgctatctgtgcacaagtcattcctttcctgtcccaagagcaccagcaacaagtggtgcaggctgtggaacgggccaagcaggtgaccatggcagaactgaacgccatcattgggcaacaactccaggcccagcatttatcacatggacatggtctccccgtacctctgactccacacccttcagggctccagccccctgccattccacccatcggtagcagtgccgggcttctggccctctccagtgctctaggaggtcagtcccatcttccaattaaagatgagaagaagcaccatgacaatgatcaccaaagag

SEQ ID NO: 192493 - DNA, 873 bp, Homo sapiens
  Payload ID: 18007
  Gene Name: transducin-like enhancer of split 4
  ENST ID: ENST00000435650
  CDS Start-End: 200-873
ggcccggcagccggcacccagccgccgccgcgcgttcctgccgcccgtgtcacgcgagacccggcgggggccgggaccgcccgagccgcccctcagaccgagccggccgcctccgctgccgcggccgcctcctcttcggggtcattaaagccaatgagccgcgcgcctctgccgagcgcagccaactaaatcggcttggatgattcgcgacctgagcaagatgtacccgcagaccagacacccagcaccgcatcagcctgctcaaccctttaaatttacaatttccgaatcctgtgatcggattaaggaagagtttcagtttttacaggctcaataccacagtctgaagctggaatgtgagaaactcgccagtgagaagacagagatgcagcggcattatgtcatgtattatgaaatgtcctatgggttgaatatagaaatgcacaagcaggcagagattgtcaagaggctgaatgctatctgtgcacaagtcattcctttcctgtcccaagagcaccagcaacaagtggtgcaggctgtggaacgggccaagcaggtgaccatggcagaactgaacgccatcattggggagaaaaagaataaaagtgacacacctggatcattaaagcagcaacaactccaggcccagcatttatcacatggacatggtctccccgtacctctgactccacacccttcagggctccagccccctgccattccacccatcggtagcagtgccgggcttctggccctctccagtgctctaggaggtcagtcccatcttccaattaaagatgagaagaagcaccatgacaatgatcaccaaagaggtgaacagagactccatcaagagctcttcagtatccccat

SEQ ID NO: 192494 - DNA, 1028 bp, Homo sapiens
  Payload ID: 18007
  Gene Name: transducin-like enhancer of split 4
  ENST ID: ENST00000496114
  CDS Start-End: 1-1028
agccagtttccgaggtgctgagaagcacagaaactccgcagactactcctcagagagcaaaaagcagaaaactgaagaaaaggaaattgcagctcgttatgacagcgatggtgagaaaagtgatgacaacttggtggttgacgtttccaatgaggatccatcttcccctcgagggagcccagcacattcccccagagagaatggcctagacaagacacgcctgctcaagaaagatgccccgattagtccagcctctattgcatcttccagcagtactccctcctccaaatccaaagaacttagccttaatgaaaaatctactactcccgtctcaaagtccaatacccctactccacgaactgatgcgcccaccccaggcagtaactctactcccggattgaggcctgtacctggaaaaccaccaggagttgaccctttggcctcaagcctaaggaccccaatggcagtaccttgtccatatccaactccatttgggattgtgccccatgctggaatgaacggagagctgaccagccccggagcggcctacgctgggctccacaacatctcccctcagatgagcgcagctgctgccgccgccgctgctgctgctgcctatgggagatcaccagtggtgggatttgatccacaccatcacatgcgtgtgccagcaatacctccaaacctgacaggcattccaggaggaaaaccgaccaaatgcttttaccacctgagggctttccctggaaatgaactggagatggaactgccaagagatactcacagagcatactccttccatgttagcgcagatggtcagatgcagcctgtcccttttccacccgacgccctcatcggacctggaatcccccggcatgctcgccagatcaacaccctcaaccacggggaggtggtgtgcgcggtgaccatcagcaaccccacgagacacgtgtacacgggtgggaagggctgcgtcaaggtctgggacatcagccacccaggcaataagagtcctgtctcccagctcg

SEQ ID NO: 192495 - DNA, 2832 bp, Homo sapiens
  Payload ID: 18007
  Gene Name: transducin-like enhancer of split 4
  ENST ID: ENST00000470872
  CDS Start-End: 217-489
cgcggggaatgcggagcggcccggcagccggcacccagccgccgccgcgcgttcctgccgcccgtgtcacgcgagacccggcgggggccgggaccgcccgagccgcccctcagaccgagccggccgcctccgctgccgcggccgcctcctcttcggggtcattaaagccaatgagccgcgcgcctctgccgagcgcagccaactaaatcggcttggatgattcgcgacctgagcaagatgtacccgcagaccagacacccagcaccgcatcagcctgctcaaccctttaaatttacaatttccgaatcctgtgatcggattaaggaagagtttcagtttttacaggctcaataccacagtctgaagctggaatgtgagaaactcgccagtgagaagacagagatgcagcggcattatgtcatgtattatgaaatgtcctatgggttgaatatagaaatgcacaagcagagactgtttttcacaaattgaaggctgtagcaaccctgaatggagctgttcttccaatagcctgtgctcacttcgtgtctctgtgtcacattttggcagagattgtcaagaggctgaatgctatctgtgcacaagtcattcctttcctgtcccaagagcaccagcaacaagtggtgcaggctgtggaacgggccaagcaggtgaccatggcagaactgaacgccatcattgggcaacaactccaggcccagcatttatcacatggacatggtctccccgtacctctgactccacacccttcagggctccagccccctgccattccacccatcggtagcagtgccgggcttctggccctctccagtgctctaggaggtcagtcccatcttccaattaaagatgagaagaagcaccatgacaatgatcaccaaagagacagagactccatcaagagctcttcagtatccccatcagccagtttccgaggtgctgagaagcacagaaactccgcagactactcctcagagagcaaaaagcagaaaactgaagaaaaggaaattgcagctcgttatgacagcgatggtgagaaaagtgatgacaacttggtggttgacgtttccaatgaggatccatcttcccctcgagggagcccagcacattcccccagagagaatggcctagacaagacacgcctgctcaagaaagatgccccgattagtccagcctctattgcatcttccagcagtactccctcctccaaatccaaagaacttagccttaatgaaaaatctactactcccgtctcaaagtccaatacccctactccacgaactgatgcgcccaccccaggcagtaactctactcccggattgaggcctgtacctggaaaaccaccaggagttgaccctttggcctcaagcctaaggaccccaatggcagtaccttgtccatatccaactccatttgggattgtgccccatgctggaatgaacggagagctgaccagccccggagcggcctacgctgggctccacaacatctcccctcagatgagcgcagctgctgccgccgccgctgctgctgctgcctatgggagatcaccagtggtgggatttgatccacaccatcacatgcgtgtgccagcaatacctccaaacctgacaggcattccaggaggaaaaccagcatactccttccatgttagcgcagatggtcagatgcagcctgtcccttttccacccgacgccctcatcggacctggaatcccccggcatgctcgccagatcaacaccctcaaccacggggaggtggtgtgcgcggtgaccatcagcaaccccacgagacacgtgtacacgggtgggaagggctgcgtcaaggtctgggacatcagccacccaggcaataagagtcctgtctcccagctcgactgtctgaacagggataactacatccgttcctgcagattgctccctgatggtcgcaccctaattgttggaggggaagccagtactttgtccatttgggacctggcggctccaaccccacgcatcaaggcagagctgacatcctcggcccccgcctgctatgccctggccatcagccccgattccaaggtctgcttctcatgctgcagcgacggcaacatcgctgtgtgggatctgcacaaccagaccttggtgaggcaattccagggccacacagatggagccagctgtattgacatttctaatgatggcaccaagctctggacaggtggtttggacaacacggtcaggtcctgggacctgcgcgaggggcggcagctgcagcagcacgacttcacctcccagatcttttctctgggctactgcccaactggagagtggcttgcagtggggatggagaacagcaatgtggaagttttgcatgtcaccaagccagacaaataccaactacatcttcatgagagctgtgtgctgtcgctcaagtttgcccattgtggcaaatggtttgtaagcactggaaaggacaaccttctgaatgcctggagaacaccttatggggccagtatattccagtccaaagaatcctcatcggtgcttagctgtgacatctccgtggacgacaaatacattgtcactggctctggggataagaaggccacagtttatgaagttatttattaaagacaaatcttcatgcagactggacttctcctcctggtagcactttgctctgtcatcctttttgttcacccccatccccgcatctaaaaccaaggatttcagatactcattgcagttgtggagtttaatcccctttcttaacctcacttcccacttgctattgaattgtgaatagtcattaaaaacctgtgataccaaa

SEQ ID NO: 192496 - DNA, 2814 bp, Homo sapiens
  Payload ID: 18007
  Gene Name: transducin-like enhancer of split 4
  ENST ID: ENST00000462803
  CDS Start-End: 167-946
gttcctgccgcccgtgtcacgcgagacccggcgggggccgggaccgcccgagccgcccctcagaccgagccggccgcctccgctgccgcggccgcctcctcttcggggtcattaaagccaatgagccgcgcgcctctgccgagcgcagccaactaaatcggcttggatgattcgcgacctgagcaagatgtacccgcagaccagacacccagcaccgcatcagcctgctcaaccctttaaatttacaatttccgaatcctgtgatcggattaaggaagagtttcagtttttacaggctcaataccacagtctgaagctggaatgtgagaaactcgccagtgagaagacagagatgcagcggcattatgtcatgtattatgaaatgtcctatgggttgaatatagaaatgcacaagcaggcagagattgtcaagaggctgaatgctatctgtgcacaagtcattcctttcctgtcccaagagcaccagcaacaagtggtgcaggctgtggaacgggccaagcaggtgaccatggcagaactgaacgccatcattgggcaacaactccaggcccagcatttatcacatggacatggtctccccgtacctctgactccacacccttcagggctccagccccctgccattccacccatcggtagcagtgccgggcttctggccctctccagtgctctaggaggtcagtcccatcttccaattaaagatgagaagaagcaccatgacaatgatcaccaaagagacagagactccatcaagcaaaactacttgctgctcataatggatgaaattggagaccaaagaggaagaaccttctgggttcctgtcagtctaaatcctgattttaaaagacattcacctgccatgctagtgttgtgtgcttctactgagctcttcagtatccccatcagccagtttccgaggtgctgagaagcacagaaactccgcagactactcctcagagagcaaaaagcagaaaactgaagaaaaggaaattgcagctcgttatgacagcgatggtgagaaaagtgatgacaacttggtggttgacgtttccaatgaggatccatcttcccctcgagggagcccagcacattcccccagagagaatggcctagacaagacacgcctgctcaagaaagatgccccgattagtccagcctctattgcatcttccagcagtactccctcctccaaatccaaagaacttagccttaatgaaaaatctactactcccgtctcaaagtccaatacccctactccacgaactgatgcgcccaccccaggcagtaactctactcccggattgaggcctgtacctggaaaaccaccaggagttgaccctttggcctcaagcctaaggaccccaatggcagtaccttgtccatatccaactccatttgggattgtgccccatgctggaatgaacggagagctgaccagccccggagcggcctacgctgggctccacaacatctcccctcagatgagcgcagctgctgccgccgccgctgctgctgctgcctatgggagatcaccagtggtgggatttgatccacaccatcacatgcgtgtgccagcaatacctccaaacctgacaggcattccaggaggaaaaccagcatactccttccatgttagcgcagatggtcagatgcagcctgtcccttttccacccgacgccctcatcggacctggaatcccccggcatgctcgccagatcaacaccctcaaccacggggaggtggtgtgcgcggtgaccatcagcaaccccacgagacacgtgtacacgggtgggaagggctgcgtcaaggtctgggacatcagccacccaggcaataagagtcctgtctcccagctcgactgtctgaacagggataactacatccgttcctgcagattgctccctgatggtcgcaccctaattgttggaggggaagccagtactttgtccatttgggacctggcggctccaaccccacgcatcaaggcagagctgacatcctcggcccccgcctgctatgccctggccatcagccccgattccaaggtctgcttctcatgctgcagcgacggcaacatcgctgtgtgggatctgcacaaccagaccttggtgaggcaattccagggccacacagatggagccagctgtattgacatttctaatgatggcaccaagctctggacaggtggtttggacaacacggtcaggtcctgggacctgcgcgaggggcggcagctgcagcagcacgacttcacctcccagatcttttctctgggctactgcccaactggagagtggcttgcagtggggatggagaacagcaatgtggaagttttgcatgtcaccaagccagacaaataccaactacatcttcatgagagctgtgtgctgtcgctcaagtttgcccattgtggcaaatggtttgtaagcactggaaaggacaaccttctgaatgcctggagaacaccttatggggccagtatattccagtccaaagaatcctcatcggtgcttagctgtgacatctccgtggacgacaaatacattgtcactggctctggggataagaaggccacagtttatgaagttatttattaaagacaaatcttcatgcagactggacttctcctcctggtagcactttgctctgtcatcctttttgttcacccccatccccgcatctaaaaccaaggatttcagatactcattgcagttgtggagtttaatcccctttcttaacctcacttcccacttgctattgaattgtgaatagtcattaaaaacctgtgatacc

SEQ ID NO: 192497 - DNA, 717 bp, Homo sapiens
  Payload ID: 18007
  Gene Name: transducin-like enhancer of split 4
  ENST ID: ENST00000490347
  CDS Start-End: 1-717
caacaactccaggcccagcatttatcacatggacatggtctccccgtacctctgactccacacccttcagggctccagccccctgccattccacccatcggtagcagtgccgggcttctggccctctccagtgctctaggaggtcagtcccatcttccaattaaagatgagaagaagcaccatgacaatgatcaccaaagagacagagactccatcaagagctcttcagtatccccatcagccagtttccgaggtgctgagaagcacagaaactccgcagactactcctcagagagcaaaaagcagaaaactgaagaaaaggaaattgcagctcgttatgacagcgatggtgagaaaagtgatgacaacttggtggttgacgtttccaatgagaatgaaaaatctactactcccgtctcaaagtccaatacccctactccacgaactgatgcgcccaccccaggcagtaactctactcccggattgaggcctgtacctggaaaaccaccaggagttgaccctttggcctcaagcctaaggaccccaatggcagtaccttgtccatatccaactccatttgggattgtgccccatgctggaatgaacggagagctgaccagccccggagcggcctacgctgggctccacaacatctcccctcagatgagcgcagctgctgccgccgccgctgctgctgctgcctatgggagatcacca

SEQ ID NO: 192498 - DNA, 1536 bp, Homo sapiens
  Payload ID: 18007
  Gene Name: transducin-like enhancer of split 4
  ENST ID: ENST00000461758
  CDS Start-End: 851-1156
tttggtcaaagaagtcacctacacagagcgtgttgttagagctgtgctgagcgggtgtttgggttgttggctgctttcttccccctttctcacacacttgtatattattttgaggtggtgttcgcagagtttgaaaggagagagaattaaaaaaaaaagccgcaagcgtttcactcttttatttttataatccccttcaatttggggttaaaaaaaagacaagaaaacaggaaggaagagaaataaggaaatgagatgtggtaaaagaagctaaaaggtgccttttaaaagatcgttgctgtgaagtgaaaaaaatctccagagaaaccaaaaagcaccgccgagacctcttccgaaccaaaggagtttgtgtttgcttttagggaagaagaaagatcattcattcggaggaataacaaccaattaaaagacaaataaaaaaagtttggagtgggacgcagagcgagcgagaggagctgccggcgggcggtggggcgcggagcccgcactttcccggccgggtgagcggcggccgcggcgccgggctcggcgggtgcgcctcggcggagcgaacgtcggagcgttgccttgggagacgcgcgccggacaatgcccgcggcgggccagtgacgcccgcggggaatgcggagcggcccggcagccggcacccagccgccgccgcgcgttcctgccgcccgtgtcacgcgagacccggcgggggccgggaccgcccgagccgcccctcagaccgagccggccgcctccgctgccgcggccgcctcctcttcggggtcattaaagccaatgagccgcgcgcctctgccgagcgcagccaactaaatcggcttggatgattcgcgacctgagcaagatgtacccgcagaccagacacccagcaccgcatcagcctgctcaaccctttaaatttacaatttccgaatcctgtgatcggattaaggaagagtttcagtttttacaggctcaataccacagtctgaagctggaatgtgagaaactcgccagtgagaagacagagatgcagcggcattatgtcatgtattatgaaatgtcctatgggttgaatatagaaatgcacaagcaggtaagttatttctttataaccattttaaatgacagtaatactgggacactatgaaaagaaaattgtatgttttgcagttttattctgcaagccgttgtggctacctttgctttatgtattttgggcattgcaaacttgtcttgtgaaagagcttttcttggaaaatattaaacagtaaaattaaattgtgtggcgccttcgttggcttgatgtgaaagaatggatagagggtgagctgggaggatgaaaatgaaatctgtggagctacaaaagaaattgatgtaaaatccttgtactggtcccctgaggctacttagttgggtcttaccaagaactataaccgttacttccaaaatttgtacagagtaaatgagcctgataggaggatgtgataaggttcaacattgggtcttgaaatctagcaattagttcag

SEQ ID NO: 192499 - DNA, 497 bp, Homo sapiens
  Payload ID: 18007
  Gene Name: transducin-like enhancer of split 4
  ENST ID: ENST00000467142
  CDS Start-End: 1-497
agctcttcagtatccccatcagccagtttccgaggtgctgagaagcacagaaactccgcagactactcctcagagagcaaaaagcagaaaactgaagaaaaggaaattgcagctcgttataatgaaaaatctactactcccgtctcaaagtccaatacccctactccacgaactgatgcgcccaccccaggcagtaactctactcccggattgaggcctgtacctggaaaaccaccaggagttgaccctttggcctcaagcctaaggaccccaatggcagtaccttgtccatatccaactccatttgggattgtgccccatgctggaatgaacggagagctgaccagccccggagcggcctacgctgggctccacaacatctcccctcagatgagcgcagctgctgccgccgccgctgctgctgctgcctatgggagatcaccagtggtgggatttgatccacaccatcacatgcgtgtgccagcaatacctccaaa

SEQ ID NO: 192500 - DNA, 2100 bp, Homo sapiens
  Payload ID: 18008
  Gene Name: transducin-like enhancer of split 6
  Uniprot ID: Q9H808
  ENST ID: ENST00000246112
  CDS Start-End: 202-1920
attgatctgcttcgcggtccaggtggcggctgggtggggcctgggcgggacggggcggggacaaggcgggacgaggcggggcccgatgggtcaaatggcccccggtgggggaaggaggagtttcctcttggcctgaacttggctgacctccgcagcttccgcccgactctggctaaagtcttggaggctactgccttgaagatgacctctagggaccagcccagacccaagggccccccgaaaagcacttcgccttgtcctgggatctcgaactctgagagctctccgacgctgaattatcagggcattctaaatcggctcaagcagttccccaggttttctcctcattttgctgcggagttggagagcatttactactcgctgcacaagatccagcaggatgtggcagaacatcacaagcagataggaaacgtcttacagattgtggagagctgcagccaactccagggtttccagtctgaggaggtctcacctgctgaaccagccagccctgggacgccccagcaggtgaaggacaagaccctgcaggagtcgagctttgaggacatcatggccaccaggtcctccgactggctccggcggcctttgggggaggacaatcagccggagacccagctgttctgggacaaggagccttggttttggcacgacactctgaccgagcaactctggcggatttttgccggcgtccacgatgagaaggcaaagcccagagacagacagcaggcaccaggcctggggcaggaaagcaaggcaccaggatcctgtgacccaggaacagacccatgtcctgaagatgcctccacccccaggccacctgaggcctcctccagtccccctgagggttcccaagacaggaacacaagttggggtgtggtccaggagcctcctggaagagcctctcggtttctacagtccatatcctgggaccctgaggactttgaagatgcatggaagaggccagatgccttgcccgggcagtcaaagagactcgccgtcccgtgcaaactggaaaagatgcggatcttggcacacggggagctcgtgctcgccacggccatcagcagcttcacgcggcacgtgttcacctgtggcagaagaggcatcaaggtgtggagcctgactggacaggtggctgaggacaggttccctgagagccacctgcctatacagacccctggggccttcctgcgcacctgcctgctgtcctcaaacagcaggagcctgctcaccggtggctacaacctggccagcgtgagcgtgtgggacctggcggcgccctccctgcatgtgaaggagcagttgccctgtgcaggtctcaactgccaggccctggatgccaacctggatgccaacctggccttcgccagcttcaccagtggtgtggtcaggatctgggacctgcgggatcagagtgtggtcagggacctcaagggttatcctgatggagtcaagagtatcgtggtcaagggctacaacatctggactgggggtccggatgcctgtctgcggtgctgggaccagaggaccatcatgaaacctctggagtaccaattcaagtctcagataatgagcctgtcccacagcccccaggaggactgggtgctgctgggcatggccaatggccagcagtggctgcaaagcaccagcgggagccagcggcacatggtggggcaaaaagacagcgtcatcctgagcgtcaagttctccccctttggccagtggtgggcaagcgttggaatggacgacttccttggcgtctacagcatgccggcggggacaaaagtgttcgaggtgcctgagatgtctccagtcacgtgctgtgacgtctcttccaacaaccgcctcgttgtcacaggctccggggagcacgcctccgtgtaccagatcacctactgaggggcctcgctgctgtcatcccactccggctcctcttttcatccccccccttccccccccccaacaagggggacatggtggagggaagcgggaaggctcttctgtggcatcgcacgatctagtctgtggtgtagactggtcgccatcacgtgtaataaagcacccgggaaaggcagagtg

SEQ ID NO: 192501 - DNA, 1883 bp, Homo sapiens
  Payload ID: 18008
  Gene Name: transducin-like enhancer of split 6
  Uniprot ID: Q9H808
  ENST ID: ENST00000452088
  CDS Start-End: 359-1708
gaacttggctgacctccgcagcttccgcccggtgagggacccttgtcctgggatctcgaactctgagagctctccgacgctgaattatcagggcattctaaatcggctcaagcagttccccaggttttctcctcattttgctgcggagttggagagcatttactactcgctgcacaagatccagcaggatgtggcagaacatcacaagcagataggaaacgtcttacagattgtggagagctgcagccaactccagggtttccagtctgaggaggtctcacctgctgaaccagccagccctgggacgccccagcaggtgaaggacaagaccctgcaggagtcgagctttgaggacatcatggccaccaggtcctccgactggctccggcggcctttgggggaggacaatcagccggagacccagctgttctgggacaaggagccttggttttggcacgacactctgaccgagcaactctggcggatttttgccggcgtccacgatgagaaggcaaagcccagagacagacagcaggcaccaggcctggggcaggaaagcaaggcaccaggatcctgtgacccaggaacagacccatgtcctgaagatgcctccacccccaggccacctgaggcctcctccagtccccctgagggttcccaagacaggaacacaagttggggtgtggtccaggagcctcctggaagagcctctcggtttctacagtccatatcctgggaccctgaggactttgaagatgcatggaagaggccagatgccttgcccgggcagtcaaagagactcgccgtcccgtgcaaactggaaaagatgcggatcttggcacacggggagctcgtgctcgccacggccatcagcagcttcacgcggcacgtgttcacctgtggcagaagaggcatcaaggtgtggagcctgactggacaggtggctgaggacaggttccctgagagccacctgcctatacagacccctggggccttcctgcgcacctgcctgctgtcctcaaacagcaggagcctgctcaccggtggctacaacctggccagcgtgagcgtgtgggacctggcggcgccctccctgcatgtgaaggagcagttgccctgtgcaggtctcaactgccaggccctggatgccaacctggatgccaacctggccttcgccagcttcaccagtggtgtggtcaggatctgggacctgcgggatcagagtgtggtcagggacctcaagggttatcctgatggagtcaagagtatcgtggtcaagggctacaacatctggactgggggtccggatgcctgtctgcggtgctgggaccagaggaccatcatgaaacctctggagtaccaattcaagtctcagataatgagcctgtcccacagcccccaggaggactgggtgctgctgggcatggccaatggccagcagtggctgcaaagcaccagcgggagccagcggcacatggtggggcaaaaagacagcgtcatcctgagcgtcaagttctccccctttggccagtggtgggcaagcgttggaatggacgacttccttggcgtctacagcatgccggcggggacaaaagtgttcgaggtgcctgagatgtctccagtcacgtgctgtgacgtctcttccaacaaccgcctcgttgtcacaggctccggggagcacgcctccgtgtaccagatcacctactgaggggcctcgctgctgtcatcccactccggctcctcttttcatccccccccttccccccccccaacaagggggacatggtggagggaagcgggaaggctcttctgtggcatcgcacgatctagtctgtggtgtagactggtcgccatcacgtgtaataaagcacccgggaaaggca

SEQ ID NO: 192502 - DNA, 582 bp, Homo sapiens
  Payload ID: 18008
  Gene Name: transducin-like enhancer of split 6
  ENST ID: ENST00000453329
  CDS Start-End: 119-582
aaatggcccccggtgggggaaggaggagtttcctcttggcctgaacttggctgacctccgcagcttccgcccggtgagggacactctggctaaagtcttggaggctactgccttgaagatgacctctagggaccagcccagacccaagggccccccgaaaagcacttcgccttgtcctgggatctcgaactctgagagctctccgacgctgaattatcagggcattctaaatcggctcaagcagttccccaggttttctcctcattttgctgcggagttggagagcatttactactcgctgcacaagatccagcaggatgtggcagaacatcacaagcagataggaaacgtcttacagattgtggagagctgcagccaactccagggtttccagtctgaggaggtctcacctgctgaaccagccagccctgggacgccccagcaggtgaaggacaagaccctgcaggagtcgagctttgaggacatcatggccaccaggtcctccgactggctccggcggcctttgggggaggacaatcagccggagacccagctgttctgggacaaggagccttggttttg

SEQ ID NO: 192503 - DNA, 456 bp, Homo sapiens
  Payload ID: 18008
  Gene Name: transducin-like enhancer of split 6
  ENST ID: ENST00000482627
  CDS Start-End: 98-235
gtgggggaaggaggagtttcctcttggcctgaacttggctgacctccgcagcttccgcccgactctggctaaagtcttggaggctactgccttgaagatgacctctagggaccagcccagacccaagggccccccgaaaagcacttcgccttgtcctgggatctcgaactctgagagctctccgacgctgaattatcagggcattctaaatcggctcaagcagttccccaggtgagagcaattccaggggccggaggtctcacgctgggaaggagccccacctggcctctctcccgggggtcctagtgagtggtctagaggctgctggcccaagagccaggctcaggaacaggaagccatgcagatacccagcatggagaacccggcaatacccatcccagcttttgattaaacaaaattaccaacaaatattaaaattttgattttcctgttcga

SEQ ID NO: 192504 - DNA, 1880 bp, Homo sapiens
  Payload ID: 18008
  Gene Name: transducin-like enhancer of split 6
  ENST ID: ENST00000617937
  CDS Start-End: 359-1609
gaacttggctgacctccgcagcttccgcccggtgagggacccttgtcctgggatctcgaactctgagagctctccgacgctgaattatcagggcattctaaatcggctcaagcagttccccaggttttctcctcattttgctgcggagttggagagcatttactactcgctgcacaagatccagcaggatgtggcagaacatcacaagcagataggaaacgtcttacagattgtggagagctgcagccaactccagggtttccagtctgaggaggtctcacctgctgaaccagccagccctgggacgccccagcaggtgaaggacaagaccctgcaggagtcgagctttgaggacatcatggccaccaggtcctccgactggctccggcggcctttgggggaggacaatcagccggagacccagctgttctgggacaaggagccttggttttggcacgacactctgaccgagcaactctggcggatttttgccggcgtccacgatgagaaggcaaagcccagagacagacagcaggcaccaggcctggggcaggaaagcaaggcaccaggatcctgtgacccaggaacagacccatgtcctgaagatgcctccacccccaggccacctgaggcctcctccagtccccctgagggttcccaagacaggaacacaagttggggtgtggtccaggagcctcctggaagagcctctcggtttctacagtccatatcctgggaccctgaggactttgaagatgcatggaagaggccagatgccttgcccgggcagtcaaagagactcgccgtcccgtgcaaactggaaaagatgcggatcttggcacacggggagctcgtgctcgccacggccatcagcagcttcacgcggcacgtgttcacctgtggcagaagaggcatcaaggtgtggagcctgactggacaggtggctgaggacaggttccctgagagccacctgcctatacagacccctggggccttcctgcgcacctgcctgctgtcctcaaacagcaggagcctgctcaccggtggctacaacctggccagcgtgagcgtgtgggacctggcggcgccctccctgcatgtgaaggagcagttgccctgtgcaggtctcaactgccaggccctggatgccaacctggatgccaacctggccttcgccagcttcaccagtggtgtggtcaggatctgggacctgcgggatcagagtgtggtcagggacctcaagggttatcctgatggagtcaagagtatcgtggtcaagggctacaacatctggactgggggtccggatgcctgtctgcggtgctgggaccagaggaccatcatgaaacctctggagtaccaattcaagtctcagataatgagcctgtcccacagcccccaggaggactgggtgctgctgggcatggccaatggccagcagtggctgcaaagcaccagcgggagccagcggcacatggtggggcaaagacagcgtcatcctgagcgtcaagttctccccctttggccagtggtgggcaagcgttggaatggacgacttccttggcgtctacagcatgccggcggggacaaaagtgttcgaggtgcctgagatgtctccagtcacgtgctgtgacgtctcttccaacaaccgcctcgttgtcacaggctccggggagcacgcctccgtgtaccagatcacctactgaggggcctcgctgctgtcatcccactccggctcctcttttcatccccccccttccccccccccaacaagggggacatggtggagggaagcgggaaggctcttctgtggcatcgcacgatctagtctgtggtgtagactggtcgccatcacgtgtaataaagcacccgggaaaggc

SEQ ID NO: 192505 - DNA, 2968 bp, Homo sapiens
  Payload ID: 18009
  Gene Name: transferrin
  Uniprot ID: P02787
  ENST ID: ENST00000402696
  CDS Start-End: 486-2582
gggctttgcctgtcattctgcagttctagtgtggggtctgggcgcagttcttttccctctccagcctcggagtcttcctctgtggactgcgcagataggactggtggcacggaccagctctgcagccctggagtcaggagcagagccccccggctcccagcccgccgtagccgctcctggcaccgagcgagccgcgatgacaatggctgcattgtgcttcatgtcccttcccatcaacatttctgtgctggactccttccactcgcgggtcgtctccagagctcagaaaatgaggtgatcagtgggacgagtaaggaaggggggttgggagaggggcgattgggcaacccggctgcacaaacacgggaggtcaaagattgcgcccagcccgcccaggccgggaatggaataaagggacgcggggcgccggaggctgcacagaagcgagtccgactgtgctcgctgctcagcgccgcacccggaagatgaggctcgccgtgggagccctgctggtctgcgccgtcctggggctgtgtctggctgtccctgataaaactgtgagatggtgtgcagtgtcggagcatgaggccactaagtgccagagtttccgcgaccatatgaaaagcgtcattccatccgatggtcccagtgttgcttgtgtgaagaaagcctcctaccttgattgcatcagggccattgcggcaaacgaagcggatgctgtgacactggatgcaggtttggtgtatgatgcttacctggctcccaataacctgaagcctgtggtggcagagttctatgggtcaaaagaggatccacagactttctattatgctgttgctgtggtgaagaaggatagtggcttccagatgaaccagcttcgaggcaagaagtcctgccacacgggtctaggcaggtccgctgggtggaacatccccataggcttactttactgtgacttacctgagccacgtaaacctcttgagaaagcagtggccaatttcttctcgggcagctgtgccccttgtgcggatgggacggacttcccccagctgtgtcaactgtgtccagggtgtggctgctccacccttaaccaatacttcggctactcgggagccttcaagtgtctgaaggatggtgctggggatgtggcctttgtcaagcactcgactatatttgagaacttggcaaacaaggctgacagggaccagtatgagctgctttgcctggacaacacccggaagccggtagatgaatacaaggactgccacttggcccaggtcccttctcataccgtcgtggcccgaagtatgggcggcaaggaggacttgatctgggagcttctcaaccaggcccaggaacattttggcaaagacaaatcaaaagaattccaactattcagctctcctcatgggaaggacctgctgtttaaggactctgcccacgggtttttaaaagtcccccccaggatggatgccaagatgtacctgggctatgagtatgtcactgccatccggaatctacgggaaggcacatgcccagaagccccaacagatgaatgcaagcctgtgaagtggtgtgcgctgagccaccacgagaggctcaagtgtgatgagtggagtgttaacagtgtagggaaaatagagtgtgtatcagcagagaccaccgaagactgcatcgccaagatcatgaatggagaagctgatgccatgagcttggatggagggtttgtctacatagcgggcaagtgtggtctggtgcctgtcttggcagaaaactacaataagagcgataattgtgaggatacaccagaggcagggtattttgctatagcagtggtgaagaaatcagcttctgacctcacctgggacaatctgaaaggcaagaagtcctgccatacggcagttggcagaaccgctggctggaacatccccatgggcctgctctacaataagatcaaccactgcagatttgatgaatttttcagtgaaggttgtgcccctgggtctaagaaagactccagtctctgtaagctgtgtatgggctcaggcctaaacctgtgtgaacccaacaacaaagagggatactacggctacacaggcgctttcaggtgtctggttgagaagggagatgtggcctttgtgaaacaccagactgtcccacagaacactgggggaaaaaaccctgatccatgggctaagaatctgaatgaaaaagactatgagttgctgtgccttgatggtaccaggaaacctgtggaggagtatgcgaactgccacctggccagagccccgaatcacgctgtggtcacacggaaagataaggaagcttgcgtccacaagatattacgtcaacagcagcacctatttggaagcaacgtaactgactgctcgggcaacttttgtttgttccggtcggaaaccaaggaccttctgttcagagatgacacagtatgtttggccaaacttcatgacagaaacacatatgaaaaatacttaggagaagaatatgtcaaggctgttggtaacctgagaaaatgctccacctcatcactcctggaagcctgcactttccgtagaccttaaaatctcagaggtagggctgccaccaaggtgaagatgggaacgcagatgatccatgagtttgccctggtttcactggcccaagtggtttgtgctaaccacgtctgtcttcacagctctgtgttgccatgtgtgctgaacaaaaaataaaaattattattgattttatatttcaaaaactccattctttcctaaatattttcaacaaaggatttctttatgcattctgcctaaatacctatgcaactgagcccttccttctcagctcaagattcgtctggtctttccctacagctttgtgtgtgccatggccacatctcctgggtacagttcaaggagacatcttttctaaaagggtctgcgtgatcattaaaatataatcaaatgta

SEQ ID NO: 192506 - DNA, 546 bp, Homo sapiens
  Payload ID: 18009
  Gene Name: transferrin
  ENST ID: ENST00000414694
  CDS Start-End: 49-396
acagaagcgagtccgactgtgctcgctgctcagcgccgcacccggaagatgaggctcgccgtgggagccctgctggtctgcgccgtcctggggctgtgtctggctgtccctgataaaactgtgagatggtgtgcagtgtcggagcatgaggccactaagtgccagagtttccgcgaccatatgaaaagcgtcattccatccgatggtcccagtgttgcttgtgtgaagaaagcctcctaccttgattgcatcagggccattgcggtaagtcgctgctgcctaaaagagagtggaagaaagccatactttctctgtttccagtcactttggaacaattctttactcacaggcaaacgaagcggatgctgtgacactggatgcaggtttggtgtatgatgcttacctggctcccaataacctgaagcctgtggtggcagagttctatgggtcaaaagaggatccacagactttctattatgctgttgctgtggtgaagaaggatagtggcttccagatgaaccagcttcgaggcaagaagtcctgcca

SEQ ID NO: 192507 - DNA, 526 bp, Homo sapiens
  Payload ID: 18009
  Gene Name: transferrin
  ENST ID: ENST00000466911
  CDS Start-End: 300-526
gactgcgcagataggactggtggcacggaccagctctgcagccctggagtcaggagcagagccccccggctcccagcccgccgtagccgctcctggcaccgagcgagccgcgatgacaatggctgcattgtgcttcatgtcccttcccatcaacatttctgtgctggactccttccactcgcgggtcgtctccagagctcagaaaatgagggctgtgtctggctgtccctgataaaactgtgagatggtgtgcagtgtcggagcatgaggccactaagtgccagagtttccgcgaccatatgaaaagcgtcattccatccgatggtcccagtgttgcttgtgtgaagaaagcctcctaccttgattgcatcagggccattgcggcaaacgaagcggatgctgtgacactggatgcaggtttggtgtatgatgcttacctggctcccaataacctgaagcctgtggtggcagagttctatgggtcaaaagaggatccacagactttctattatgctgttgctgtggt

SEQ ID NO: 192508 - DNA, 594 bp, Homo sapiens
  Payload ID: 18009
  Gene Name: transferrin
  ENST ID: ENST00000494430
  CDS Start-End: 49-411
acagaagcgagtccgactgtgctcgctgctcagcgccgcacccggaagatgaggctcgccgtgggagccctgctggtctgcgccgtcctggggctgtgtctggctgtccctgataaaactgtgagatggtgtgcagtgtcggagcatgaggccactaagtgccagagtttccgcgaccatatgaaaagcgtcattccatccgatggtcccagtgttgcttgtgtgaagaaagcctcctaccttgattgcatcagggccattgcggcaaacgaagcggatgctgtgacactggatgcaggtttggtgtatgatgcttacctggctcccaataacctgaagcctgtggtggcagagttctatgggtcaaaagaggactttctattatgctgttgctgtggtgaagaaggatagtggcttccagatgaaccagcttcgaggcaagaagtcctgccacacgggtctaggcaggtccgctgggtggaacatccccataggcttactttactgtgacttacctgagccacgtaaacctcttgagaaagcagtggccaatttcttctcgggcagctgtgccccttgtgcggatgggacgga

SEQ ID NO: 192509 - DNA, 580 bp, Homo sapiens
  Payload ID: 18009
  Gene Name: transferrin
  ENST ID: ENST00000485977
  CDS Start-End: 49-357
acagaagcgagtccgactgtgctcgctgctcagcgccgcacccggaagatgaggctcgccgtgggagccctgctggtctgcgccgtcctggggctgtgtctggctgtccctgataaaactgtgagatggtgtgcagtgtcggagcatgaggccactaagtgccagagtttccgcgaccatatgaaaagcgtcattccatccgatggtcccttctcataccgtcgtggcccgaagtatgggcggcaaggaggacttgatctgggagcttctcaaccaggcccaggaacattttggcaaagacaaatcaaaagaattccaactattcagctctcctcatgggaaggacctgctgtttaaggactctgcccacgggtttttaaaagtcccccccaggatggatgccaagatgtacctgggctatgagtatgtcactgccatccggaatctacgggaaggcacatgcccagaagccccaacagatgaatgcaagcctgtgaagtggtgtgcgctgagccaccacgagaggctcaagtgtgatgagtggagtgttaacagtgtagggaaaatagagtgtgtatca

SEQ ID NO: 192510 - DNA, 659 bp, Homo sapiens
  Payload ID: 18009
  Gene Name: transferrin
  ENST ID: ENST00000482271
  CDS Start-End: 257-659
acagaagcgagtccgactgtgctcgctgctcagcgccgcacccggaagatgaggctcgccgtgggagccctgctggtctgcgccgtcctgggcaaacgaagcggatgctgtgacactggatgcaggtttggtgtatgatgcttacctggctcccaataacctgaagcctgtggtggcagagttctatgggtcaaaagaggatccacagactttctattatgctgttgctgtggtgaagaaggatagtggcttccagatgaaccagcttcgaggcaagaagtcctgccacacgggtctaggcaggtccgctgggtggaacatccccataggcttactttactgtgacttacctgagccacgtaaacctcttgagaaagcagtggccaatttcttctcgggcagctgtgccccttgtgcggatgggacggacttcccccagctgtgtcaactgtgtccagggtgtggctgctccacccttaaccaatacttcggctactcgggagccttcaagtgtctgaaggatggtgctggggatgtggcctttgtcaagcactcgactatatttgagaacttggcaaacaaggctgacagggaccagtatgagctgctttgcctggacaacacccggaagccggtagatgaatacaaggactgccact

SEQ ID NO: 192511 - DNA, 990 bp, Homo sapiens
  Payload ID: 18009
  Gene Name: transferrin
  ENST ID: ENST00000461695
  CDS Start-End: 1-431
ggtattttgctatagcagtggtgaagaaatcagcttctgacctcacctgggacaatctgaaaggcaagaagtcctgccatacggcagttggcagaaccgctggctggaacatccccatgggcctgctctacaataagatcaaccactgcagatttgatgaatttttcagtgaaggttgtgcccctgggtctaagaaagactccagtctctgtaagctgtgtatgggctcaggcctaaacctgtgtgaacccaacaacaaagagggatactacggctacacaggcgctttcaggtgtctggttgagaagggagatgtggcctttgtgaaacaccagactgtcccacagaacactggggagacaatacagaaaagaagaggcaaaggggccgagatgggatacagacctgtatcacacaggaaaaaaccctgatccatgggctaagaatctgaatgaaaaagactatgagttgctgtgccttgatggtaccaggaaacctgtggaggagtatgcgaactgccacctggccagagccccgaatcacgctgtggtcacacggaaagataaggaagcttgcgtccacaagatattacgtcaacagcagcacctatttggaagcaacgtaactgactgctcgggcaacttttgtttgttccggtcggaaaccaaggaccttctgttcagagatgacacagtatgtttggccaaacttcatgacagaaacacatatgaaaaatacttaggagaagaatatgtcaaggctgttggtaacctgagaaaatgctccacctcatcactcctggaagcctgcactttccgtagaccttaaaatctcagaggtagggctgccaccaaggtgaagatgggaacgcagatgatccatgagtttgccctggtttcactggcccaagtggtttgtgctaaccacgtctgtcttcacagctctgtgttgccatgtgtgctgaacaaaaaataaaaattattattgatt

SEQ ID NO: 192512 - DNA, 5111 bp, Homo sapiens
  Payload ID: 18010
  Gene Name: transferrin receptor
  Uniprot ID: P02786
  ENST ID: ENST00000360110
  CDS Start-End: 171-2453
ctcgcgagcgtacgtgcctcaggaagtgacgcacagcccccctgggggccgggggcggggccaggctataaaccgccggttaggggccgccatcccctcagagcgtcgggatatcgggtggcggctcgggacggaggacgcgctagtgttcttctgtgtggcagttcagaatgatggatcaagctagatcagcattctctaacttgtttggtggagaaccattgtcatatacccggttcagcctggctcggcaagtagatggcgataacagtcatgtggagatgaaacttgctgtagatgaagaagaaaatgctgacaataacacaaaggccaatgtcacaaaaccaaaaaggtgtagtggaagtatctgctatgggactattgctgtgatcgtctttttcttgattggatttatgattggctacttgggctattgtaaaggggtagaaccaaaaactgagtgtgagagactggcaggaaccgagtctccagtgagggaggagccaggagaggacttccctgcagcacgtcgcttatattgggatgacctgaagagaaagttgtcggagaaactggacagcacagacttcaccggcaccatcaagctgctgaatgaaaattcatatgtccctcgtgaggctggatctcaaaaagatgaaaatcttgcgttgtatgttgaaaatcaatttcgtgaatttaaactcagcaaagtctggcgtgatcaacattttgttaagattcaggtcaaagacagcgctcaaaactcggtgatcatagttgataagaacggtagacttgtttacctggtggagaatcctgggggttatgtggcgtatagtaaggctgcaacagttactggtaaactggtccatgctaattttggtactaaaaaagattttgaggatttatacactcctgtgaatggatctatagtgattgtcagagcagggaaaatcacctttgcagaaaaggttgcaaatgctgaaagcttaaatgcaattggtgtgttgatatacatggaccagactaaatttcccattgttaacgcagaactttcattctttggacatgctcatctggggacaggtgacccttacacacctggattcccttccttcaatcacactcagtttccaccatctcggtcatcaggattgcctaatatacctgtccagacaatctccagagctgctgcagaaaagctgtttgggaatatggaaggagactgtccctctgactggaaaacagactctacatgtaggatggtaacctcagaaagcaagaatgtgaagctcactgtgagcaatgtgctgaaagagataaaaattcttaacatctttggagttattaaaggctttgtagaaccagatcactatgttgtagttggggcccagagagatgcatggggccctggagctgcaaaatccggtgtaggcacagctctcctattgaaacttgcccagatgttctcagatatggtcttaaaagatgggtttcagcccagcagaagcattatctttgccagttggagtgctggagactttggatcggttggtgccactgaatggctagagggatacctttcgtccctgcatttaaaggctttcacttatattaatctggataaagcggttcttggtaccagcaacttcaaggtttctgccagcccactgttgtatacgcttattgagaaaacaatgcaaaatgtgaagcatccggttactgggcaatttctatatcaggacagcaactgggccagcaaagttgagaaactcactttagacaatgctgctttccctttccttgcatattctggaatcccagcagtttctttctgtttttgcgaggacacagattatccttatttgggtaccaccatggacacctataaggaactgattgagaggattcctgagttgaacaaagtggcacgagcagctgcagaggtcgctggtcagttcgtgattaaactaacccatgatgttgaattgaacctggactatgagaggtacaacagccaactgctttcatttgtgagggatctgaaccaatacagagcagacataaaggaaatgggcctgagtttacagtggctgtattctgctcgtggagacttcttccgtgctacttccagactaacaacagatttcgggaatgctgagaaaacagacagatttgtcatgaagaaactcaatgatcgtgtcatgagagtggagtatcacttcctctctccctacgtatctccaaaagagtctcctttccgacatgtcttctggggctccggctctcacacgctgccagctttactggagaacttgaaactgcgtaaacaaaataacggtgcttttaatgaaacgctgttcagaaaccagttggctctagctacttggactattcagggagctgcaaatgccctctctggtgacgtttgggacattgacaatgagttttaaatgtgatacccatagcttccatgagaacagcagggtagtctggtttctagacttgtgctgatcgtgctaaattttcagtagggctacaaaacctgatgttaaaattccatcccatcatcttggtactactagatgtctttaggcagcagcttttaatacagggtagataacctgtacttcaagttaaagtgaataaccacttaaaaaatgtccatgatggaatattcccctatctctagaattttaagtgctttgtaatgggaactgcctctttcctgttgttgttaatgaaaatgtcagaaaccagttatgtgaatgatctctctgaatcctaagggctggtctctgctgaaggttgtaagtggtcgcttactttgagtgatcctccaacttcatttgatgctaaataggagataccaggttgaaagaccttctccaaatgagatctaagcctttccataaggaatgtagctggtttcctcattcctgaaagaaacagttaactttcagaagagatgggcttgttttcttgccaatgaggtctgaaatggaggtccttctgctggataaaatgaggttcaactgttgattgcaggaataaggccttaatatgttaacctcagtgtcatttatgaaaagaggggaccagaagccaaagacttagtatattttcttttcctctgtcccttcccccataagcctccatttagttctttgttatttttgtttcttccaaagcacattgaaagagaaccagtttcaggtgtttagttgcagactcagtttgtcagactttaaagaataatatgctgccaaattttggccaaagtgttaatcttaggggagagctttctgtccttttggcactgagatatttattgtttatttatcagtgacagagttcactataaatggtgtttttttaatagaatataattatcggaagcagtgccttccataattatgacagttatactgtcggttttttttaaataaaagcagcatctgctaataaaacccaacagatactggaagttttgcatttatggtcaacacttaagggttttagaaaacagccgtcagccaaatgtaattgaataaagttgaagctaagatttagagatgaattaaatttaattaggggttgctaagaagcgagcactgaccagataagaatgctggttttcctaaatgcagtgaattgtgaccaagttataaatcaatgtcacttaaaggctgtggtagtactcctgcaaaattttatagctcagtttatccaaggtgtaactctaattcccattttgcaaaatttccagtacctttgtcacaatcctaacacattatcgggagcagtgtcttccataatgtataaagaacaaggtagtttttacctaccacagtgtctgtatcggagacagtgatctccatatgttacactaagggtgtaagtaattatcgggaacagtgtttcccataattttcttcatgcaatgacatcttcaaagcttgaagatcgttagtatctaacatgtatcccaactcctataattccctatcttttagttttagttgcagaaacattttgtggtcattaagcattgggtgggtaaattcaaccactgtaaaatgaaattactacaaaatttgaaatttagcttgggtttttgttacctttatggtttctccaggtcctctacttaatgagatagtagcatacatttataatgtttgctattgacaagtcattttaactttatcacattatttgcatgttacctcctataaacttagtgcggacaagttttaatccagaattgaccttttgacttaaagcagagggactttgtatagaaggtttgggggctgtggggaaggagagtcccctgaaggtctgacacgtctgcctacccattcgtggtgatcaattaaatgtaggtatgaataagttcgaagctccgtgagtgaaccatcattataaacgtgatgatcagctgtttgtcatagggcagttggaaacggcctcctagggaaaagttcatagggtctcttcaggttcttagtgtcacttacctagatttacagcctcacttgaatgtgtcactactcacagtctctttaatcttcagttttatctttaatctcctcttttatcttggactgacatttagcgtagctaagtgaaaaggtcatagctgagattcctggttcgggtgttacgcacacgtacttaaatgaaagcatgtggcatgttcatcgtataacacaatatgaatacagggcatgcattttgcagcagtgagtctcttcagaaaacccttttctacagttagggttgagttacttcctatcaagccagtacgtgctaacaggctcaatattcctgaatgaaatatcagactagtgacaagctcctggtcttgagatgtcttctcgttaaggagatgggccttttggaggtaaaggataaaatgaatgagttctgtcatgattcactattctagaacttgcatgacctttactgtgttagctctttgaatgttcttgaaattttagactttctttgtaaacaaatgatatgtccttatcattgtataaaagctgttatgtgcaacagtgtggagattccttgtctgatttaataaaatacttaaacactga

SEQ ID NO: 192513 - DNA, 5032 bp, Homo sapiens
  Payload ID: 18010
  Gene Name: transferrin receptor
  Uniprot ID: P02786
  ENST ID: ENST00000392396
  CDS Start-End: 284-2566
agagcgtcgggatatcgggtggcggctcgggacggaggacgcgctagtgtgagtgcgggcttctagaactacaccgaccctcgtgtcctcccttcatcctgcggggctggctggagcggccgctccggtgctgtccagcagccatagggagccgcacggggagcgggaaagcggtcgcggccccaggcggggcggccgggatggagcggggccgcgagcctgtggggaaggggctgtggcggcgcctcgagcggctgcaggttcttctgtgtggcagttcagaatgatggatcaagctagatcagcattctctaacttgtttggtggagaaccattgtcatatacccggttcagcctggctcggcaagtagatggcgataacagtcatgtggagatgaaacttgctgtagatgaagaagaaaatgctgacaataacacaaaggccaatgtcacaaaaccaaaaaggtgtagtggaagtatctgctatgggactattgctgtgatcgtctttttcttgattggatttatgattggctacttgggctattgtaaaggggtagaaccaaaaactgagtgtgagagactggcaggaaccgagtctccagtgagggaggagccaggagaggacttccctgcagcacgtcgcttatattgggatgacctgaagagaaagttgtcggagaaactggacagcacagacttcaccggcaccatcaagctgctgaatgaaaattcatatgtccctcgtgaggctggatctcaaaaagatgaaaatcttgcgttgtatgttgaaaatcaatttcgtgaatttaaactcagcaaagtctggcgtgatcaacattttgttaagattcaggtcaaagacagcgctcaaaactcggtgatcatagttgataagaacggtagacttgtttacctggtggagaatcctgggggttatgtggcgtatagtaaggctgcaacagttactggtaaactggtccatgctaattttggtactaaaaaagattttgaggatttatacactcctgtgaatggatctatagtgattgtcagagcagggaaaatcacctttgcagaaaaggttgcaaatgctgaaagcttaaatgcaattggtgtgttgatatacatggaccagactaaatttcccattgttaacgcagaactttcattctttggacatgctcatctggggacaggtgacccttacacacctggattcccttccttcaatcacactcagtttccaccatctcggtcatcaggattgcctaatatacctgtccagacaatctccagagctgctgcagaaaagctgtttgggaatatggaaggagactgtccctctgactggaaaacagactctacatgtaggatggtaacctcagaaagcaagaatgtgaagctcactgtgagcaatgtgctgaaagagataaaaattcttaacatctttggagttattaaaggctttgtagaaccagatcactatgttgtagttggggcccagagagatgcatggggccctggagctgcaaaatccggtgtaggcacagctctcctattgaaacttgcccagatgttctcagatatggtcttaaaagatgggtttcagcccagcagaagcattatctttgccagttggagtgctggagactttggatcggttggtgccactgaatggctagagggatacctttcgtccctgcatttaaaggctttcacttatattaatctggataaagcggttcttggtaccagcaacttcaaggtttctgccagcccactgttgtatacgcttattgagaaaacaatgcaaaatgtgaagcatccggttactgggcaatttctatatcaggacagcaactgggccagcaaagttgagaaactcactttagacaatgctgctttccctttccttgcatattctggaatcccagcagtttctttctgtttttgcgaggacacagattatccttatttgggtaccaccatggacacctataaggaactgattgagaggattcctgagttgaacaaagtggcacgagcagctgcagaggtcgctggtcagttcgtgattaaactaacccatgatgttgaattgaacctggactatgagaggtacaacagccaactgctttcatttgtgagggatctgaaccaatacagagcagacataaaggaaatgggcctgagtttacagtggctgtattctgctcgtggagacttcttccgtgctacttccagactaacaacagatttcgggaatgctgagaaaacagacagatttgtcatgaagaaactcaatgatcgtgtcatgagagtggagtatcacttcctctctccctacgtatctccaaaagagtctcctttccgacatgtcttctggggctccggctctcacacgctgccagctttactggagaacttgaaactgcgtaaacaaaataacggtgcttttaatgaaacgctgttcagaaaccagttggctctagctacttggactattcagggagctgcaaatgccctctctggtgacgtttgggacattgacaatgagttttaaatgtgatacccatagcttccatgagaacagcagggtagtctggtttctagacttgtgctgatcgtgctaaattttcagtagggctacaaaacctgatgttaaaattccatcccatcatcttggtactactagatgtctttaggcagcagcttttaatacagggtagataacctgtacttcaagttaaagtgaataaccacttaaaaaatgtccatgatggaatattcccctatctctagaattttaagtgctttgtaatgggaactgcctctttcctgttgttgttaatgaaaatgtcagaaaccagttatgtgaatgatctctctgaatcctaagggctggtctctgctgaaggttgtaagtggtcgcttactttgagtgatcctccaacttcatttgatgctaaataggagataccaggttgaaagaccttctccaaatgagatctaagcctttccataaggaatgtagctggtttcctcattcctgaaagaaacagttaactttcagaagagatgggcttgttttcttgccaatgaggtctgaaatggaggtccttctgctggataaaatgaggttcaactgttgattgcaggaataaggccttaatatgttaacctcagtgtcatttatgaaaagaggggaccagaagccaaagacttagtatattttcttttcctctgtcccttcccccataagcctccatttagttctttgttatttttgtttcttccaaagcacattgaaagagaaccagtttcaggtgtttagttgcagactcagtttgtcagactttaaagaataatatgctgccaaattttggccaaagtgttaatcttaggggagagctttctgtccttttggcactgagatatttattgtttatttatcagtgacagagttcactataaatggtgtttttttaatagaatataattatcggaagcagtgccttccataattatgacagttatactgtcggttttttttaaataaaagcagcatctgctaataaaacccaacagatactggaagttttgcatttatggtcaacacttaagggttttagaaaacagccgtcagccaaatgtaattgaataaagttgaagctaagatttagagatgaattaaatttaattaggggttgctaagaagcgagcactgaccagataagaatgctggttttcctaaatgcagtgaattgtgaccaagttataaatcaatgtcacttaaaggctgtggtagtactcctgcaaaattttatagctcagtttatccaaggtgtaactctaattcccattttgcaaaatttccagtacctttgtcacaatcctaacacattatcgggagcagtgtcttccataatgtataaagaacaaggtagtttttacctaccacagtgtctgtatcggagacagtgatctccatatgttacactaagggtgtaagtaattatcgggaacagtgtttcccataattttcttcatgcaatgacatcttcaaagcttgaagatcgttagtatctaacatgtatcccaactcctataattccctatcttttagttttagttgcagaaacattttgtggtcattaagcattgggtgggtaaattcaaccactgtaaaatgaaattactacaaaatttgaaatttagcttgggtttttgttacctttatggtttctccaggtcctctacttaatgagatagtagcatacatttataatgtttgctattgacaagtcattttaactttatcacattatttgcatgttacctcctataaacttagtgcggacaagttttaatccagaattgaccttttgacttaaagcagagggactttgtatagaaggtttgggggctgtggggaaggagagtcccctgaaggtctgacacgtctgcctacccattcgtggtgatcaattaaatgtaggtatgaataagttcgaagctccgtgagtgaaccatcattataaacgtgatgatcagctgtttgtcatagggcagttggaaacggcctcctagggaaaagttcatagggtctcttcaggttcttagtgtcacttacctagatttacagcctcacttgaatgtgtcactactcacagtctctttaatcttcagttttatctttaatctcctcttttatcttggactgacatttagcgtagctaagtgaaaaggtcatagctgagattcctggttcgggtgttacgcacacgtacttaaatgaaagcatgtggcatgttcatcgtataacacaatatgaatacagggcatgcattttgcagcagtgagtctcttcagaaaacccttttctacagttagggttgagttacttcctatcaagccagtacgtgctaacaggctcaatattcctgaatgaaatatcagactagtgacaagctcctggtcttgagatgtcttctcgttaaggagatgggccttttggaggtaaaggata

SEQ ID NO: 192514 - DNA, 4814 bp, Homo sapiens
  Payload ID: 18010
  Gene Name: transferrin receptor
  ENST ID: ENST00000420415
  CDS Start-End: 117-2156
cctcagagcgtcgggatatcgggtggcggctcgggacggaggacgcgctagtgttcttctgtgtggcagttcagaatgatggatcaagctagatcagcattctctaacttggatttatgattggctacttgggctattgtaaaggggtagaaccaaaaactgagtgtgagagactggcaggaaccgagtctccagtgagggaggagccaggagaggacttccctgcagcacgtcgcttatattgggatgacctgaagagaaagttgtcggagaaactggacagcacagacttcaccggcaccatcaagctgctgaatgaaaattcatatgtccctcgtgaggctggatctcaaaaagatgaaaatcttgcgttgtatgttgaaaatcaatttcgtgaatttaaactcagcaaagtctggcgtgatcaacattttgttaagattcaggtcaaagacagcgctcaaaactcggtgatcatagttgataagaacggtagacttgtttacctggtggagaatcctgggggttatgtggcgtatagtaaggctgcaacagttactggtaaactggtccatgctaattttggtactaaaaaagattttgaggatttatacactcctgtgaatggatctatagtgattgtcagagcagggaaaatcacctttgcagaaaaggttgcaaatgctgaaagcttaaatgcaattggtgtgttgatatacatggaccagactaaatttcccattgttaacgcagaactttcattctttggacatgctcatctggggacaggtgacccttacacacctggattcccttccttcaatcacactcagtttccaccatctcggtcatcaggattgcctaatatacctgtccagacaatctccagagctgctgcagaaaagctgtttgggaatatggaaggagactgtccctctgactggaaaacagactctacatgtaggatggtaacctcagaaagcaagaatgtgaagctcactgtgagcaatgtgctgaaagagataaaaattcttaacatctttggagttattaaaggctttgtagaaccagatcactatgttgtagttggggcccagagagatgcatggggccctggagctgcaaaatccggtgtaggcacagctctcctattgaaacttgcccagatgttctcagatatggtcttaaaagatgggtttcagcccagcagaagcattatctttgccagttggagtgctggagactttggatcggttggtgccactgaatggctagagggatacctttcgtccctgcatttaaaggctttcacttatattaatctggataaagcggttcttggtaccagcaacttcaaggtttctgccagcccactgttgtatacgcttattgagaaaacaatgcaaaatgtgaagcatccggttactgggcaatttctatatcaggacagcaactgggccagcaaagttgagaaactcactttagacaatgctgctttccctttccttgcatattctggaatcccagcagtttctttctgtttttgcgaggacacagattatccttatttgggtaccaccatggacacctataaggaactgattgagaggattcctgagttgaacaaagtggcacgagcagctgcagaggtcgctggtcagttcgtgattaaactaacccatgatgttgaattgaacctggactatgagaggtacaacagccaactgctttcatttgtgagggatctgaaccaatacagagcagacataaaggaaatgggcctgagtttacagtggctgtattctgctcgtggagacttcttccgtgctacttccagactaacaacagatttcgggaatgctgagaaaacagacagatttgtcatgaagaaactcaatgatcgtgtcatgagagtggagtatcacttcctctctccctacgtatctccaaaagagtctcctttccgacatgtcttctggggctccggctctcacacgctgccagctttactggagaacttgaaactgcgtaaacaaaataacggtgcttttaatgaaacgctgttcagaaaccagttggctctagctacttggactattcagggagctgcaaatgccctctctggtgacgtttgggacattgacaatgagttttaaatgtgatacccatagcttccatgagaacagcagggtagtctggtttctagacttgtgctgatcgtgctaaattttcagtagggctacaaaacctgatgttaaaattccatcccatcatcttggtactactagatgtctttaggcagcagcttttaatacagggtagataacctgtacttcaagttaaagtgaataaccacttaaaaaatgtccatgatggaatattcccctatctctagaattttaagtgctttgtaatgggaactgcctctttcctgttgttgttaatgaaaatgtcagaaaccagttatgtgaatgatctctctgaatcctaagggctggtctctgctgaaggttgtaagtggtcgcttactttgagtgatcctccaacttcatttgatgctaaataggagataccaggttgaaagaccttctccaaatgagatctaagcctttccataaggaatgtagctggtttcctcattcctgaaagaaacagttaactttcagaagagatgggcttgttttcttgccaatgaggtctgaaatggaggtccttctgctggataaaatgaggttcaactgttgattgcaggaataaggccttaatatgttaacctcagtgtcatttatgaaaagaggggaccagaagccaaagacttagtatattttcttttcctctgtcccttcccccataagcctccatttagttctttgttatttttgtttcttccaaagcacattgaaagagaaccagtttcaggtgtttagttgcagactcagtttgtcagactttaaagaataatatgctgccaaattttggccaaagtgttaatcttaggggagagctttctgtccttttggcactgagatatttattgtttatttatcagtgacagagttcactataaatggtgtttttttaatagaatataattatcggaagcagtgccttccataattatgacagttatactgtcggttttttttaaataaaagcagcatctgctaataaaacccaacagatactggaagttttgcatttatggtcaacacttaagggttttagaaaacagccgtcagccaaatgtaattgaataaagttgaagctaagatttagagatgaattaaatttaattaggggttgctaagaagcgagcactgaccagataagaatgctggttttcctaaatgcagtgaattgtgaccaagttataaatcaatgtcacttaaaggctgtggtagtactcctgcaaaattttatagctcagtttatccaaggtgtaactctaattcccattttgcaaaatttccagtacctttgtcacaatcctaacacattatcgggagcagtgtcttccataatgtataaagaacaaggtagtttttacctaccacagtgtctgtatcggagacagtgatctccatatgttacactaagggtgtaagtaattatcgggaacagtgtttcccataattttcttcatgcaatgacatcttcaaagcttgaagatcgttagtatctaacatgtatcccaactcctataattccctatcttttagttttagttgcagaaacattttgtggtcattaagcattgggtgggtaaattcaaccactgtaaaatgaaattactacaaaatttgaaatttagcttgggtttttgttacctttatggtttctccaggtcctctacttaatgagatagtagcatacatttataatgtttgctattgacaagtcattttaactttatcacattatttgcatgttacctcctataaacttagtgcggacaagttttaatccagaattgaccttttgacttaaagcagagggactttgtatagaaggtttgggggctgtggggaaggagagtcccctgaaggtctgacacgtctgcctacccattcgtggtgatcaattaaatgtaggtatgaataagttcgaagctccgtgagtgaaccatcattataaacgtgatgatcagctgtttgtcatagggcagttggaaacggcctcctagggaaaagttcatagggtctcttcaggttcttagtgtcacttacctagatttacagcctcacttgaatgtgtcactactcacagtctctttaatcttcagttttatctttaatctcctcttttatcttggactgacatttagcgtagctaagtgaaaaggtcatagctgagattcctggttcgggtgttacgcacacgtacttaaatgaaagcatgtggcatgttcatcgtataacacaatatgaatacagggcatgcattttgcagcagtgagtctcttcagaaaacccttttctacagttagggttgagttacttcctatcaagccagtacgtgctaacaggctcaatattcctgaatgaaatatcagactagtgacaagctcctggtcttgagatgtcttctcgttaaggagatgggccttttggaggtaaaggataaaatgaatgagttctgtcatgattcactattctagaacttgcatgacctttactgtgttagctctttgaatgttcttgaaattttagactttctttgtaaacaaatgatatgtccttatcattgtataaaagctgttatgtgcaacagtgtggagattccttgtctgatttaataaaatacttaaacactga

SEQ ID NO: 192515 - DNA, 524 bp, Homo sapiens
  Payload ID: 18010
  Gene Name: transferrin receptor
  ENST ID: ENST00000421258
  CDS Start-End: 78-323
cccctcagagcgtcgggatatcgggtggcggctcgggacggaggacgcgctagtgttcttctgtgtggcagttcagaatgatggatcaagctagatcagcattctctaacttgtttggtggagaaccattgtcatatacccggttcagcctggctcggcaagtagatggcgataacagtcatgtggagatgaaacttgctgtagatgaagaagaaaatgctgacaataacacaaaggccaatgtcacaaaaccaaaaaggtgtagtggaagtatctgctatgggactattgctgtgatcgtctttttcttgattggctgctgaatgaaaattcatatgtccctcgtgaggctggatctcaaaaagatgaaaatcttgcgttgtatgttgaaaatcaatttcgtgaatttaaactcagcaaagtctggcgtgatcaacattttgttaagattcaggtcaaagacagcgctcaaaactcggtgatcatagttgataagaacggtagacttgtttacctggtggaga

SEQ ID NO: 192516 - DNA, 354 bp, Homo sapiens
  Payload ID: 18010
  Gene Name: transferrin receptor
  ENST ID: ENST00000426789
  CDS Start-End: 1-354
gcagctgcagaggtcgctggtcagttcgtgattaaactaacccatgatgttgaattgaacctggactatgagaggtacaacagccaactgctttcatttgtgagggatctgaaccaatacagagcagacataaaggaaatgggcctgagtttacagtggctgtattctgctcgtggagacttcttccgtgctacttccagactaacaacagatttcgggaatgctgagaaaacagacagatttgtcatgaagaaactcaatgatcgtgtcatgagagaaggtccacagatgatgctccttctcacggatgcgaggccatcaaatcactttttgtctccgctgctctctctccat

SEQ ID NO: 192517 - DNA, 2888 bp, Homo sapiens
  Payload ID: 18011
  Gene Name: transferrin receptor 2
  Uniprot ID: Q9UP52
  ENST ID: ENST00000223051
  CDS Start-End: 42-2447
cgctgggggacagcctgcaggcttcaggaggggacacaagcatggagcggctttggggtctattccagagagcgcaacaactgtccccaagatcctctcagaccgtctaccagcgtgtggaaggcccccggaaagggcacctggaggaggaagaggaagacggggaggagggggcggagacattggcccacttctgccccatggagctgaggggccctgagcccctgggctctagacccaggcagccaaacctcattccctgggcggcagcaggacggagggctgccccctacctggtcctgacggccctgctgatcttcactggggccttcctactgggctacgtcgccttccgagggtcctgccaggcgtgcggagactctgtgttggtggtcagtgaggatgtcaactatgagcctgacctggatttccaccagggcagactctactggagcgacctccaggccatgttcctgcagttcctgggggaggggcgcctggaggacaccatcaggcaaaccagccttcgggaacgggtggcaggctcggccgggatggccgctctgactcaggacattcgcgcggcgctctcccgccagaagctggaccacgtgtggaccgacacgcactacgtggggctgcaattcccggatccggctcaccccaacaccctgcactgggtcgatgaggccgggaaggtcggagagcagctgccgctggaggaccctgacgtctactgcccctacagcgccatcggcaacgtcacgggagagctggtgtacgcccactacgggcggcccgaagacctgcaggacctgcgggccaggggcgtggatccagtgggccgcctgctgctggtgcgcgtgggggtgatcagcttcgcccagaaggtgaccaatgctcaggacttcggggctcaaggagtgctcatatacccagagccagcggacttctcccaggacccacccaagccaagcctgtccagccagcaggcagtgtatggacatgtgcacctgggaactggagacccctacacacctggcttcccttccttcaatcaaacccagttccctccagttgcatcatcaggccttcccagcatcccagcccagcccatcagtgcagacattgcctcccgcctgctgaggaagctcaaaggccctgtggccccccaagaatggcaggggagcctcctaggctccccttatcacctgggccccgggccacgactgcggctagtggtcaacaatcacaggacctccacccccatcaacaacatcttcggctgcatcgaaggccgctcagagccagatcactacgttgtcatcggggcccagagggatgcatggggcccaggagcagctaaatccgctgtggggacggctatactcctggagctggtgcggaccttttcctccatggtgagcaacggcttccggccccgcagaagtctcctcttcatcagctgggacggtggtgactttggaagcgtgggctccacggagtggctagagggctacctcagcgtgctgcacctcaaagccgtagtgtacgtgagcctggacaacgcagtgctgggggatgacaagtttcatgccaagaccagcccccttctgacaagtctcattgagagtgtcctgaagcaggtggattctcccaaccacagtgggcagactctctatgaacaggtggtgttcaccaatcccagctgggatgctgaggtgatccggcccctacccatggacagcagtgcctattccttcacggcctttgtgggagtccctgccgtcgagttctcctttatggaggacgaccaggcctacccattcctgcacacaaaggaggacacttatgagaacctgcataaggtgctgcaaggccgcctgcccgccgtggcccaggccgtggcccagctcgcagggcagctcctcatccggctcagccacgatcgcctgctgcccctcgacttcggccgctacggggacgtcgtcctcaggcacatcgggaacctcaacgagttctctggggacctcaaggcccgcgggctgaccctgcagtgggtgtactcggcgcggggggactacatccgggcggcggaaaagctgcggcaggagatctacagctcggaggagagagacgagcgactgacacgcatgtacaacgtgcgcataatgcgggtggagttctacttcctttcccagtacgtgtcgccagccgactccccgttccgccacatcttcatgggccgtggagaccacacgctgggcgccctgctggaccacctgcggctgctgcgctccaacagctccgggacccccggggccacctcctccactggcttccaggagagccgtttccggcgtcagctagccctgctcacctggacgctgcaaggggcagccaatgcgcttagcggggatgtctggaacattgataacaacttctgaggccctggggatcctcacatccccgtcccccagtcaagagctcctctgctcctcgcttgaatgattcagggtcagggaggtggctcagagtccacctctcattgctgatcaatttctcattacccctacacatctctccacggagcccagaccccagcacagatatccacacaccccagccctgcagtgtagctgaccctaatgtgacggtcatactgtcggttaatcagagagtagcatcccttcaatcacagccccttcccctttctggggtcctccatacctagagaccactctgggaggtttgctaggccctgggacctggccagctctgttagtgggagagatcgctggcaccatagccttatggccaacaggtggtctgtggtgaaaggggcgtggagtttcaatatcaataaaccacctgatatcaataagcca

SEQ ID NO: 192518 - DNA, 2631 bp, Homo sapiens
  Payload ID: 18011
  Gene Name: transferrin receptor 2
  ENST ID: ENST00000431692
  CDS Start-End: 42-1109
cgctgggggacagcctgcaggcttcaggaggggacacaagcatggagcggctttggggtctattccagagagcgcaacaactgtccccaagatcctctcagaccgtctaccagcgtgtggaaggcccccggaaagggcacctggaggaggaagaggaagacggggaggagggggcggagacattggcccacttctgccccatggagctgaggggccctgagcccctgggctctagacccaggcagccaaacctcattccctgggcggcagcaggacggagggctgccccctacctggtcctgacggccctgctgatcttcactggggccttcctactgggctacgtcgccttccgagggtcctgccaggcgtgcggagactctgtgttggtggtcagtgaggatgtcaactatgagcctgacctggatttccaccagggcagactctactggagcgacctccaggccatgttcctgcagttcctgggggaggggcgcctggaggacaccatcaggcaaaccagccttcgggaacgggtggcaggctcggccgggatggccgctctgactcaggacattcgcgcggcgctctcccgccagaagctggaccacgtgtggaccgacacgcactacgtggggctgcaattcccggatccggctcaccccaacaccctgcactgggtcgatgaggccgggaaggtcggagagcagctgccgctggaggaccctgacgtctactgcccctacagcgccatcggcaacgtcacgggagagctggtgtacgcccactacgggcggcccgaagacctgcaggacctgcgggccaggggcgtggatccagtgggccgcctgctgctggtgcgcgtgggggtgatcagcttcgcccagaaggaagctcaaaggccctgtggccccccaagaatggcaggggagcctcctaggctccccttatcacctgggccccgggccacgactgcggctagtggtcaacaatcacaggacctccacccccatcaacaacatcttcggctgcatcgaaggccgctcagagccagatcactacgttgtcatcggggcccagagggatgcatggggcccaggagcagctaaatccgctgtggggacggctatactcctggagctggtgcggaccttttcctccatggtgagcaacggcttccggccccgcagaagtctcctcttcatcagctgggacggtggtgactttggaagcgtgggctccacggagtggctagagggctacctcagcgtgctgcacctcaaagccgtagtgtacgtgagcctggacaacgcagtgctgggggatgacaagtttcatgccaagaccagcccccttctgacaagtctcattgagagtgtcctgaagcaggtggattctcccaaccacagtgggcagactctctatgaacaggtggtgttcaccaatcccagctgggatgctgaggtgatccggcccctacccatggacagcagtgcctattccttcacggcctttgtgggagtccctgccgtcgagttctcctttatggaggacgaccaggcctacccattcctgcacacaaaggaggacacttatgagaacctgcataaggtgctgcaaggccgcctgcccgccgtggcccaggccgtggcccagctcgcagggcagctcctcatccggctcagccacgatcgcctgctgcccctcgacttcggccgctacggggacgtcgtcctcaggcacatcgggaacctcaacgagttctctggggacctcaaggcccgcgggctgaccctgcagtgggtgtactcggcgcggggggactacatccgggcggcggaaaagctgcggcaggagatctacagctcggaggagagagacgagcgactgacacgcatgtacaacgtgcgcataatgcgggtggagttctacttcctttcccagtacgtgtcgccagccgactccccgttccgccacatcttcatgggccgtggagaccacacgctgggcgccctgctggaccacctgcggctgctgcgctccaacagctccgggacccccggggccacctcctccactggcttccaggagagccgtttccggcgtcagctagccctgctcacctggacgctgcaaggggcagccaatgcgcttagcggggatgtctggaacattgataacaacttctgaggccctggggatcctcacatccccgtcccccagtcaagagctcctctgctcctcgcttgaatgattcagggtcagggaggtggctcagagtccacctctcattgctgatcaatttctcattacccctacacatctctccacggagcccagaccccagcacagatatccacacaccccagccctgcagtgtagctgaccctaatgtgacggtcatactgtcggttaatcagagagtagcatcccttcaatcacagccccttcccctttctggggtcctccatacctagagaccactctgggaggtttgctaggccctgggacctggccagctctgttagtgggagagatcgctggcaccatagccttatggccaacaggtggtctgtggtgaaaggggcgtggagtttcaatatcaataaaccacctgatatcaataagcca

SEQ ID NO: 192519 - DNA, 2196 bp, Homo sapiens
  Payload ID: 18011
  Gene Name: transferrin receptor 2
  ENST ID: ENST00000490084
  CDS Start-End: 1-509
actacgggcggcccgaagacctgcaggacctgcgggccaggggcgtggatccagtgggccgcctgctgctggtgcgcgtgggggtgatcagcttcgcccagaaggtgaccaatgctcaggacttcggggctcaaggagtgctcatatacccagagccagcggacttctcccaggacccacccaagccaagcctgtccagccagcaggcagtgtatggacatgtgcacctgggaactggagacccctacacacctggcttcccttccttcaatcaaacccagttccctccagttgcatcatcaggccttcccagcatcccagcccagcccatcagtgcagacattgcctcccgcctgctgaggctggagtgcagtggtgcaatcttggctcactgcaacctccacctcccgggttcaagtgattcttctgcctcagactccagagtatctaggattacaggaagctcaaaggccctgtggccccccaagaatggcaggggagcctcctaggctccccttatcacctgggccccgggccacgactgcggctagtggtcaacaatcacaggacctccacccccatcaacaacatcttcggctgcatcgaaggccgctcagagccagatcactacgttgtcatcggggcccagagggatgcatggggcccaggagcagctaaatccgctgtggggacggctatactcctggagctggtgcggaccttttcctccatggtgagcaacggcttccggccccgcagaagtctcctcttcatcagctgggacggtggtgactttggaagcgtgggctccacggagtggctagagggctacctcagcgtgctgcacctcaaagccgtagtgtacgtgagcctggacaacgcagtgctgggggatgacaagtttcatgccaagaccagcccccttctgacaagtctcattgagagtgtcctgaagcaggtggattctcccaaccacagtgggcagactctctatgaacaggtggtgttcaccaatcccagctgggatgctgaggtgatccggcccctacccatggacagcagtgcctattccttcacggcctttgtgggagtccctgccgtcgagttctcctttatggaggacgaccaggcctacccattcctgcacacaaaggaggacacttatgagaacctgcataaggtgctgcaaggccgcctgcccgccgtggcccaggccgtggcccagctcgcagggcagctcctcatccggctcagccacgatcgcctgctgcccctcgacttcggccgctacggggacgtcgtcctcaggcacatcgggaacctcaacgagttctctggggacctcaaggcccgcgggctgaccctgcagtgggtgtactcggcgcggggggactacatccgggcggcggaaaagctgcggcaggagatctacagctcggaggagagagacgagcgactgacacgcatgtacaacgtgcgcataatgcgggtggagttctacttcctttcccagtacgtgtcgccagccgactccccgttccgccacatcttcatgggccgtggagaccacacgctgggcgccctgctggaccacctgcggctgctgcgctccaacagctccgggacccccggggccacctcctccactggcttccaggagagccgtttccggcgtcagctagccctgctcacctggacgctgcaaggggcagccaatgcgcttagcggggatgtctggaacattgataacaacttctgaggccctggggatcctcacatccccgtcccccagtcaagagctcctctgctcctcgcttgaatgattcagggtcagggaggtggctcagagtccacctctcattgctgatcaatttctcattacccctacacatctctccacggagcccagaccccagcacagatatccacacaccccagccctgcagtgtagctgaccctaatgtgacggtcatactgtcggttaatcagagagtagcatcccttcaatcacagccccttcccctttctggggtcctccatacctagagaccactctgggaggtttgctaggccctgggacctggccagctctgttagtgggagagatcgctggcaccatagccttatggccaacaggtggtctgtggtgaaaggggcgtggagtttcaatatcaataaaccacctgatatcaataa

SEQ ID NO: 192520 - DNA, 3131 bp, Homo sapiens
  Payload ID: 18011
  Gene Name: transferrin receptor 2
  Uniprot ID: Q9UP52
  ENST ID: ENST00000462107
  CDS Start-End: 289-2694
cacgcctgagcaccccaggacctgcgctcagggaggaggcaggcgtggggctgtggagagattggcaggggagagcacagccccttgtgctctggcctggacccgggggccacgtctggaaggctggactgaggccaggactgtgcccccacccttgggggtggtgaggagcagccttggttcaggctgcctgccaggactgataaggggccctcctagggctcccacaaacggtttatcggtttatcgctgggggacagcctgcaggcttcaggaggggacacaagcatggagcggctttggggtctattccagagagcgcaacaactgtccccaagatcctctcagaccgtctaccagcgtgtggaaggcccccggaaagggcacctggaggaggaagaggaagacggggaggagggggcggagacattggcccacttctgccccatggagctgaggggccctgagcccctgggctctagacccaggcagccaaacctcattccctgggcggcagcaggacggagggctgccccctacctggtcctgacggccctgctgatcttcactggggccttcctactgggctacgtcgccttccgagggtcctgccaggcgtgcggagactctgtgttggtggtcagtgaggatgtcaactatgagcctgacctggatttccaccagggcagactctactggagcgacctccaggccatgttcctgcagttcctgggggaggggcgcctggaggacaccatcaggcaaaccagccttcgggaacgggtggcaggctcggccgggatggccgctctgactcaggacattcgcgcggcgctctcccgccagaagctggaccacgtgtggaccgacacgcactacgtggggctgcaattcccggatccggctcaccccaacaccctgcactgggtcgatgaggccgggaaggtcggagagcagctgccgctggaggaccctgacgtctactgcccctacagcgccatcggcaacgtcacgggagagctggtgtacgcccactacgggcggcccgaagacctgcaggacctgcgggccaggggcgtggatccagtgggccgcctgctgctggtgcgcgtgggggtgatcagcttcgcccagaaggtgaccaatgctcaggacttcggggctcaaggagtgctcatatacccagagccagcggacttctcccaggacccacccaagccaagcctgtccagccagcaggcagtgtatggacatgtgcacctgggaactggagacccctacacacctggcttcccttccttcaatcaaacccagttccctccagttgcatcatcaggccttcccagcatcccagcccagcccatcagtgcagacattgcctcccgcctgctgaggaagctcaaaggccctgtggccccccaagaatggcaggggagcctcctaggctccccttatcacctgggccccgggccacgactgcggctagtggtcaacaatcacaggacctccacccccatcaacaacatcttcggctgcatcgaaggccgctcagagccagatcactacgttgtcatcggggcccagagggatgcatggggcccaggagcagctaaatccgctgtggggacggctatactcctggagctggtgcggaccttttcctccatggtgagcaacggcttccggccccgcagaagtctcctcttcatcagctgggacggtggtgactttggaagcgtgggctccacggagtggctagagggctacctcagcgtgctgcacctcaaagccgtagtgtacgtgagcctggacaacgcagtgctgggggatgacaagtttcatgccaagaccagcccccttctgacaagtctcattgagagtgtcctgaagcaggtggattctcccaaccacagtgggcagactctctatgaacaggtggtgttcaccaatcccagctgggatgctgaggtgatccggcccctacccatggacagcagtgcctattccttcacggcctttgtgggagtccctgccgtcgagttctcctttatggaggacgaccaggcctacccattcctgcacacaaaggaggacacttatgagaacctgcataaggtgctgcaaggccgcctgcccgccgtggcccaggccgtggcccagctcgcagggcagctcctcatccggctcagccacgatcgcctgctgcccctcgacttcggccgctacggggacgtcgtcctcaggcacatcgggaacctcaacgagttctctggggacctcaaggcccgcgggctgaccctgcagtgggtgtactcggcgcggggggactacatccgggcggcggaaaagctgcggcaggagatctacagctcggaggagagagacgagcgactgacacgcatgtacaacgtgcgcataatgcgggtggagttctacttcctttcccagtacgtgtcgccagccgactccccgttccgccacatcttcatgggccgtggagaccacacgctgggcgccctgctggaccacctgcggctgctgcgctccaacagctccgggacccccggggccacctcctccactggcttccaggagagccgtttccggcgtcagctagccctgctcacctggacgctgcaaggggcagccaatgcgcttagcggggatgtctggaacattgataacaacttctgaggccctggggatcctcacatccccgtcccccagtcaagagctcctctgctcctcgcttgaatgattcagggtcagggaggtggctcagagtccacctctcattgctgatcaatttctcattacccctacacatctctccacggagcccagaccccagcacagatatccacacaccccagccctgcagtgtagctgaccctaatgtgacggtcatactgtcggttaatcagagagtagcatcccttcaatcacagccccttcccctttctggggtcctccatacctagagaccactctgggaggtttgctaggccctgggacctggccagctctgttagtgggagagatcgctggcaccatagccttatggccaacaggtggtctgtggtgaaaggggcgtggagtttcaatatcaataaaccacctgatatcaataa

SEQ ID NO: 192521 - DNA, 12590 bp, Homo sapiens
  Payload ID: 18012
  Gene Name: transformation/transcription domain-associated protein
  Uniprot ID: Q9Y4A5
  ENST ID: ENST00000355540
  CDS Start-End: 210-11702
cgcgccggggcctggtgctcggtcggcgggtgctgccgctttaagcgggggcgggactgcgcgcggccgagcggttgcgacgagggctcggctgggggtcgccggggtcgcgggccgggcctgcaggagccgggccgccgaggtcggggctggttgaactcatggacctgatacttttctcttgagaagcaaaccagcccaaaagaaaaatggcgtttgttgcaacacagggggccacggtggttgaccagaccactttgatgaaaaagtaccttcagtttgtggcagctctcacagatgtgaatacacctgatgaaacaaagttgaaaatgatgcaagaagttagtgaaaattttgagaatgtcacgtcatctcctcagtattctacattcctagaacatatcatccctcgattccttacatttctccaagatggagaagttcagtttcttcaggagaaaccagcacagcaactgcggaagctcgtacttgaaataattcatagaataccaaccaacgaacatcttcgtcctcacacaaaaaatgttttgtctgtgatgtttcgctttttagagacggaaaatgaagaaaatgttcttatttgtctaagaataattattgagctacacaaacagttcaggccaccgatcacacaagaaattcatcattttctggattttgtgaaacagatttacaaggagcttccaaaagtagtgaaccgctactttgagaaccctcaagtgatccccgagaacacagtgcctcccccagaaatggttggtatgataacaacgattgctgtgaaagtcaacccggagcgtgaggacagtgagactcgaacacattccatcattccgaggggatcactttctctgaaagtgttggcagaattgcccattattgttgttttaatgtatcagctctacaaactgaacatccacaatgttgttgctgagtttgtgcccttgatcatgaacaccattgccattcaggtgtctgcacaagcgaggcaacataagctttacaacaaggagttgtatgctgacttcattgctgctcagattaaaacattgtcatttttagcttacattatcaggatttaccaggagttggtgactaagtattctcagcagatggtgaaaggaatgctccagttactttcaaattgtccagcagagactgcacacctcagaaaggagcttctgattgctgccaaacacatcctcaccacagagctgagaaaccagttcattccttgcatggacaagctgtttgatgaatccatactaattggctcaggatatactgccagagagactctaaggcccctcgcctacagcacgctggccgacctcgtgcaccatgtccgccagcacctgcccctcagcgacctctccctcgccgtccagctcttcgccaagaacatcgacgatgagtccctgcccagcagcatccagaccatgtcctgcaagctcctgctgaacctggtggactgcatccgttccaagagcgagcaggagagtggcaatgggagagacgtcctgatgcggatgctggaggttttcgttctcaaattccacacaattgctcggtaccagctctctgccatttttaagaagtgtaagcctcagtcagaacttggagccgtggaagcagctctgcctggggtgcccactgcccctgcagctcctggccctgctccctccccagcccctgtccctgccccacctccacccccgcccccacccccacctgccacccctgtgaccccggcccccgtgcctcccttcgagaagcaaggagaaaaggacaaggaagacaagcagacattccaagtcacagactgtcgaagtttggtcaaaaccttggtgtgtggtgtcaagacaatcacgtggggcataacatcatgcaaagcacctggtgaagctcagttcattcccaacaagcagttacaacccaaagagacacagatttacatcaaacttgtgaaatatgcaatgcaagctttagatatttatcaggtccagatagcaggaaatggacagacatacatccgtgtggccaactgccagactgtgagaatgaaagaggagaaggaggtattggagcatttcgctggtgtgttcacaatgatgaaccccttaacgttcaaagaaatcttccaaactacggtcccttatatggtggagagaatctcaaaaaattatgctcttcagattgttgccaattccttcttggcaaatcctactacctctgctctgtttgctacgattctggtggaatatctccttgatcgcctgccagaaatgggctccaacgtggagctctccaacctgtacctcaagctgttcaagctggtctttggctctgtctccctctttgcagctgaaaatgaacaaatgctgaagcctcacttgcacaagattgtgaacagctctatggagctcgcgcagactgccaaggaaccctacaactacttcttgctgctacgggcgctgtttcgctctattggtggaggtagccacgatctcttgtatcaggagttcttgcctctccttccaaacctcctgcaagggctgaacatgcttcagagtggcctgcacaagcagcacatgaaggacctctttgtggagctgtgtctcaccgtccctgtgcggctgagctcgcttttgccgtacctgcccatgcttatggatcccttggtgtctgcactcaatgggtctcagacattggtcagccaaggcctcaggacgctggagctgtgtgtggacaacctgcagcccgacttcctctacgaccacatccagccggtgcgcgcagagctcatgcaggctctgtggcgcaccttacgcaaccctgctgacagcatctcccacgtggcctaccgtgtgctcggtaagtttggcggcagtaacaggaagatgctgaaggagtcgcagaagctgcactacgttgtgaccgaggttcagggccccagcatcactgtggagttttccgactgcaaagcttctctccagctccccatggagaaggccattgaaactgctctggactgcctgaaaagcgccaacactgagccctactaccggaggcaggcgtgggaagtgatcaaatgcttcctggtggccatgatgagcctggaggacaacaagcacgcactctaccagctcctggcacaccccaactttacagaaaagaccatccccaatgttatcatctcacatcgctacaaagcccaggacactccagcccggaagacttttgagcaggccctgacaggcgccttcatgtctgctgtcattaaggacctgcggcccagcgccctgccctttgtcgccagcttgatccgccactatacgatggtggcagtcgcccagcagtgtggccctttcttgctgccttgctaccaggtgggcagccagcccagcacagccatgtttcacagtgaagaaaatggctcgaaaggaatggatcctttggttctcattgatgcaattgctatttgtatggcatatgaagaaaaggagctttgcaaaatcggggaggtggccctagctgtgatatttgatgttgcaagtatcatcctgggctccaaggagagggcctgccagctgcccctgttttcttacatcgtggagcgcctgtgtgcatgttgttatgaacaggcgtggtatgcaaagctggggggtgtggtgtctattaagtttctcatggagcggctgcctctcacttgggttctccagaaccagcagacattcctgaaagcacttctctttgtcatgatggacttaactggagaggtttccaatggggcagtcgctatggcaaagaccacgctggagcagcttctgatgcggtgcgcaacgcctttaaaagacgaggagagagccgaagagatcgtggccgcccaggaaaagtctttccaccatgtgacacacgacttggttcgagaagtcacctctccaaactccactgtgaggaagcaggccatgcattcgctgcaggtgttggcccaggtcactgggaagagtgtcacggtgatcatggaaccccacaaagaggtcctgcaggatatggtcccccctaagaagcacctgctccgacaccagcctgccaacgcacagattggcctgatggaggggaacacgttctgtaccacgttgcagcccaggctcttcacaatggaccttaacgtggtggagcataaggtgttctacacagagctgttgaatttgtgtgaggctgaagattcagctttaacaaagctgccctgttataaaagccttccgtcactcgtacctttacgaattgcggcattaaatgcacttgctgcctgcaattaccttcctcagtccagggagaaaatcatcgctgcactcttcaaagccctgaattccaccaatagtgagctccaagaggccggagaagcctgtatgagaaagtttttagaaggtgctaccatagaagtcgatcaaatccacacacatatgcgacctttgctgatgatgctgggagattaccggagcttgacgctgaatgttgtgaatcgcctgacttcggtcacgaggctcttcccaaattccttcaatgataaattttgtgatcagatgatgcaacatctgcgcaagtggatggaagtggtggtgatcacccacaaagggggccagaggagcgacggaaacgaaatgaagatttgctcagcaattataaacctttttcatctgatcccggctgctcctcagacactggtgaagcctttgctagaggttgtcatgaaaacggagcgggcgatgctgatcgaggcggggagtccattccgagagcccctgatcaagttcctgactcgacatccctcgcagacagtggagctgttcatgatggaagccacactgaacgatccccagtggagcagaatgtttatgagttttttaaaacacaaagacgccagacctctgcgggatgtgctggctgccaaccccaacaggttcatcaccctgctgctgccggggggtgcccagacggctgtgcgccccggttcgcccagcaccagcaccatgcgcctggacctccagttccaggccatcaagatcataagcattatagtgaaaaacgatgactcctggctggccagccagcactctctggtgagccagttgcgacgtgtgtgggtgagtgagaacttccaagagaggcaccgcaaggagaacatggcagccaccaactggaaggagcccaagctgctggcctactgcctgctgaactactgcaaaaggaattacggagatatagaattgctgttccagctgctccgagcctttactggtcgttttctctgcaacatgacattcttaaaagagtatatggaggaagagattcccaaaaattacagcatcgctcagaaacgtgccctgttctttcgctttgtagacttcaacgaccccaacttcggagatgaattaaaagctaaagttctgcagcatatcttgaatcctgctttcttgtacagctttgagaagggggaaggagagcagctcttgggacctcccaatccagaaggagataacccagaaagcatcaccagtgtgtttattaccaaggtcctggaccccgagaagcaggcggacatgctggactcgctgcggatctacctgctgcagtacgccacgctgctggtggagcacgccccccaccacatccatgacaacaacaagaaccgcaacagcaagctgcgccgcctcatgaccttcgcctggccctgcctgctctccaaggcctgcgtggacccagcctgcaagtacagcggacacttgctcctggcgcacattatcgccaaattcgccatacacaagaagatcgtcctgcaggtttttcatagtctcctcaaggctcacgcaatggaagctcgagcgatcgtcagacaggcgatggccattctgaccccggcggtgccggccaggatggaggacgggcaccagatgctgacccactggacccggaagatcattgtggaggaggggcacaccgtcccgcagctggtccacattctgcacctgatagtgcaacacttcaaggtgtactacccggtacggcaccacttggtgcagcacatggtgagcgccatgcagaggctgggcttcacgcccagtgtcaccatcgagcagaggcggctggccgtggacctgtctgaagtcgtcatcaagtgggagctgcagaggatcaaggaccagcagccggattcagatatggacccaaattccagtggagaaggagtcaattctgtctcatcctccattaagagaggcctgtccgtggattctgcccaggaagtgaaacgctttaggacggccaccggagccatcagtgcagtctttgggaggagccagtcgctacctggagcagactctctcctcgccaagcccattgacaagcagcacacagacactgtggtgaacttccttatccgcgtggcctgtcaggttaatgacaacaccaacacagcggggtcccctggggaggtgctctctcgccggtgtgtgaaccttctgaagactgcgttgcggccagacatgtggcccaagtccgaactcaagctgcagtggttcgacaagctgctgatgactgtggagcagccaaaccaagtgaactatgggaatatctgcacgggcctagaagtgctgagcttcctgctaactgtcctccagtccccagccatcctcagtagcttcaaacctctgcagcgtggaattgccgcctgcatgacatgtggaaacaccaaggtgttgcgagccgtccacagccttctctcgcgcctgatgagcattttcccaacagagccgagtacttccagtgtggcctccaaatatgaagagctggagtgcctctacgcagccgtcggaaaggtcatctatgaagggctcaccaactacgagaaggccaccaatgccaatccctcccagctcttcgggacccttatgatcctcaagtctgcctgcagcaacaaccccagctacatagacaggctgatctccgtctttatgcgctccctgcagaagatggtccgggagcatttaaaccctcaggcagcgtcaggaagcaccgaagccacctcaggtacaagcgagctggtgatgctgagtctggagctggtgaagacgcgcctggcagtgatgagcatggagatgcggaagaacttcatccaggccatcctgacatccctcatcgaaaaatcaccagatgccaaaatcctccgggctgtggtcaaaatcgtggaagaatgggtcaagaataactccccaatggcagccaatcagacacctacactccgggagaagtccattttgcttgtgaagatgatgacttacatagaaaaacgctttccggaagaccttgaattaaatgcccagtttttagatcttgttaactatgtctacagggatgagaccctctctggcagcgagctgacggcgaaacttgagcctgcctttctctctgggctgcgctgtgcccagccactcatcagggcaaagtttttcgaggtttttgacaactccatgaaacgtcgtgtctacgagcgcttgctctatgtgacctgttcgcagaactgggaagccatggggaaccacttctggatcaagcagtgcattgagctgcttctggccgtgtgtgagaagagcacccccattggcaccagctgccaaggagccatgctcccgtccatcaccaacgtcatcaacctggccgatagccacgaccgtgccgccttcgccatggtcacacatgtcaagcaggagccccgggagcgggagaacagcgagtccaaagaggaggatgtagagatagacatcgaactagctcctggggatcagaccagcacgcccaaaaccaaagaactttcagaaaaggacattggaaaccagctgcacatgctaaccaacaggcacgacaagtttctggacactctccgagaggtgaagactggagcgctgctcagcgctttcgttcagctgtgccacatttccacgacgctggcagagaagacgtgggtccagcttttccccagattgtggaagatcctctctgacagacagcagcatgcactcgcgggtgagataagtccatttctgtgcagcggcagtcaccaggtgcagcgggactgccagcccagcgcgctgaactgctttgtggaagccatgtcccagtgcgtgccgccaatccccatccgaccctgcgtcctgaagtacctggggaagacacacaacctctggttccggtccacgctgatgttggagcaccaggcttttgaaaagggtctgagtcttcagattaagccgaagcaaacaacggagttttatgagcaggagagcatcaccccgccgcagcaggagatactggattcccttgcggagctttactccctgttacaagaggaagatatgtgggctggtctgtggcagaagcggtgcaagtactcggagacagcgactgcgattgcttacgagcagcacgggttctttgagcaggcacaagaatcctatgaaaaggcaatggataaagccaaaaaagaacatgagaggagtaacgcctcccctgctattttccctgaataccagctctgggaagaccactggattcgatgctccaaggaattgaaccagtgggaagccctgacggagtacggtcagtccaaaggccacatcaacccctacctcgtcctggagtgcgcctggcgggtgtccaactggactgccatgaaggaggcgctggtgcaggtggaagtgagctgtccgaaggagatggcctggaaggtgaacatgtaccgcggatacctggccatctgccaccccgaggagcagcagctcagcttcatcgagcgcctggtggagatggccagcagcctggccatccgcgagtggcggcggctgccccacgtagtgtcccacgtgcacacgcctctcctacaggcagcccagcaaatcatcgaactccaggaagctgcacaaatcaacgcaggcttacagccaaccaacctgggaaggaacaacagcctgcacgacatgaagacggtggtgaagacctggaggaaccgactgcccatcgtgtctgacgacttgtcccactggagcagcatcttcatgtggaggcagcatcattaccaggcgattgtaactgcctatgagaatagctctcagcatgatcccagttcaaataacgctatgcttggggttcatgcatcagcttcagcgatcatccagtatggaaaaatcgcccggaaacaaggactggtcaatgtagctctggatatattaagtcggattcatactattccaactgttcctatcgtggattgcttccagaagattcgacagcaagttaaatgctacctccagctggcaggcgtcatgggcaaaaacgagtgcatgcagggccttgaagttattgaatctacaaatttaaaatacttcacaaaagagatgacagccgaattttatgcactgaagggaatgttcttggctcagatcaacaagtccgaggaggcaaacaaagccttctctgcagctgtgcagatgcacgatgtgctggtgaaagcctgggccatgtggggcgactacctggagaacatctttgtgaaggagcggcagctgcacctgggcgtgtctgccatcacctgctacctgcacgcctgccggcatcagaacgagagcaaatcgaggaaatacttagccaaggtgctgtggcttttgagttttgatgatgacaaaaacactttggcagatgccgtcgacaagtactgcattggtgtgccacccatccagtggctggcctggatcccacagctgctcacctgcctggttggctcggagggaaagctgctcttgaacctcattagccaggttggacgcgtgtatccccaagcggtctactttcccatccggaccctgtacctgaccctgaaaatagaacagcgggaacgctacaagagcgatccagggcccataagagcaacagcacccatgtggcgctgcagccgaatcatgcacatgcagcgagagctccaccccacccttctgtcttccctggaaggcatcgtcgatcagatggtctggttcagagaaaattggcatgaagaggttctcaggcagctccaacagggcctggcgaaatgttactccgtggcgtttgagaaaagtggagcggtgtccgatgctaaaatcaccccccacactctcaattttgtgaagaagttggtgagcacgtttggggtgggcctggagaatgtgtccaacgtctcgaccatgttctccagcgcagcctctgagtctctggcccggcgggcgcaggccactgcacaagaccctgtctttcagaagctgaaaggccagttcacgacggattttgacttcagcgttccaggatccatgaagcttcataatcttatttctaagttgaaaaagtggatcaaaatcttggaggccaagaccaagcaactccccaaattcttcctcatagaggaaaagtgccggttcttgagcaatttctcggcacagacagctgaagtggaaattcctggggagtttctgatgccaaagccaacgcattattacatcaagattgcacggttcatgccccgggtagagattgtgcagaagcacaacaccgcagcccggcggctgtacatccggggacacaatggcaagatctacccatacctcgtcatgaacgacgcctgcctcacagagtcacggcgagaggagcgtgtgttgcagctgctgcgtctgctgaacccctgtttggagaagagaaaggagaccaccaagaggcacttgtttttcacagtgccccgggttgtggcagtttccccacagatgcgcctcgtggaggacaacccctcttcactttcccttgtggagatctacaagcagcgctgcgccaagaagggcatcgagcatgacaaccccatctcccgttactatgaccggctggctacggtgcaggcgcggggaacccaagccagccaccaggtcctccgcgacatcctcaaggaggttcagagtaacatggtgccgcgcagcatgctcaaggagtgggcgctgcacaccttccccaatgccacggactactggacgttccggaagatgttcaccatccagctggctctgataggcttcgcggaattcgtcctgcatttaaatagactcaaccccgagatgttacagatcgctcaggacactggcaaactgaatgttgcctactttcgatttgacataaacgacgcgactggagacctggatgccaaccgtcctgtcccatttcgactcacgcccaacatttctgagtttctgaccaccatcggggtctccggcccgttgacagcgtccatgattgcggtcgcccggtgcttcgcccagccaaactttaaggtggatggcattctgaaaacggttctccgggacgagatcattgcttggcacaaaaaaacacaagaggacacgtcctctcctctctcggccgccgggcagccagagaacatggacagccagcaactggtgtccctggttcagaaagccgtcaccgccatcatgacccgcctgcacaacctcgcccagttcgaaggcggggaaagcaaggtgaacaccctggtggccgcggcaaacagcctggacaatctgtgccgcatggaccccgcctggcacccctggctgtgactgtggccgccacggccacccggaatgtgaagggcgctccgggctctgagcccgcagcttttacgacttctccctgcctcgttccttatattcacagaagccccatagtttcactgggttgcggttattttcctggtagtttgcgtgtaagaaagggagaatatagttttagaggaagctgaactatgacgatgctgggcgaagcggttggaaatggcagagctgaaacttattccaagctttcaaaataatcttttaagaagccaggattctccggtctggaatttctgagtgagtcctttttttatggtgtcctccctctgtgaatgtacaggcggaactgtacgaacagctcccttccatccatttttaactctttcggaaataacacctcacagcagcttcgtgcttttgtacagacctttgtaacaagtgtacagaaaactcattttgtttgagaaacaggagttgatgaacccatcatgctggtttttctctgagcacaaagttttaggctgtacacagccagccttgggaatctcgttgagcgttcggcgtggatccacggggccaggccaccctgcgggagcgccacacgcatccacttcggattcagtgggtgaagacagaactctgagagtctgcaggcggctcctgtgctttttatttctggctcttcggatgtcttctagacatttactatcactgcacctgaagaaaaaatcacttttaccttcctaatttaaaaagacaaaacagaaatgtacgttccttcgctagctttagtctttctgttcccatttttataaatctgagcattgataatgttctatctaaatttgtacagtgtgatttttttttttagaataaatattttataaaagggtt

SEQ ID NO: 192522 - DNA, 12677 bp, Homo sapiens
  Payload ID: 18012
  Gene Name: transformation/transcription domain-associated protein
  Uniprot ID: Q9Y4A5
  ENST ID: ENST00000359863
  CDS Start-End: 210-11789
cgcgccggggcctggtgctcggtcggcgggtgctgccgctttaagcgggggcgggactgcgcgcggccgagcggttgcgacgagggctcggctgggggtcgccggggtcgcgggccgggcctgcaggagccgggccgccgaggtcggggctggttgaactcatggacctgatacttttctcttgagaagcaaaccagcccaaaagaaaaatggcgtttgttgcaacacagggggccacggtggttgaccagaccactttgatgaaaaagtaccttcagtttgtggcagctctcacagatgtgaatacacctgatgaaacaaagttgaaaatgatgcaagaagttagtgaaaattttgagaatgtcacgtcatctcctcagtattctacattcctagaacatatcatccctcgattccttacatttctccaagatggagaagttcagtttcttcaggagaaaccagcacagcaactgcggaagctcgtacttgaaataattcatagaataccaaccaacgaacatcttcgtcctcacacaaaaaatgttttgtctgtgatgtttcgctttttagagacggaaaatgaagaaaatgttcttatttgtctaagaataattattgagctacacaaacagttcaggccaccgatcacacaagaaattcatcattttctggattttgtgaaacagatttacaaggagcttccaaaagtagtgaaccgctactttgagaaccctcaagtgatccccgagaacacagtgcctcccccagaaatggttggtatgataacaacgattgctgtgaaagtcaacccggagcgtgaggacagtgagactcgaacacattccatcattccgaggggatcactttctctgaaagtgttggcagaattgcccattattgttgttttaatgtatcagctctacaaactgaacatccacaatgttgttgctgagtttgtgcccttgatcatgaacaccattgccattcaggtgtctgcacaagcgaggcaacataagctttacaacaaggagttgtatgctgacttcattgctgctcagattaaaacattgtcatttttagcttacattatcaggatttaccaggagttggtgactaagtattctcagcagatggtgaaaggaatgctccagttactttcaaattgtccagcagagactgcacacctcagaaaggagcttctgattgctgccaaacacatcctcaccacagagctgagaaaccagttcattccttgcatggacaagctgtttgatgaatccatactaattggctcaggatatactgccagagagactctaaggcccctcgcctacagcacgctggccgacctcgtgcaccatgtccgccagcacctgcccctcagcgacctctccctcgccgtccagctcttcgccaagaacatcgacgatgagtccctgcccagcagcatccagaccatgtcctgcaagctcctgctgaacctggtggactgcatccgttccaagagcgagcaggagagtggcaatgggagagacgtcctgatgcggatgctggaggttttcgttctcaaattccacacaattgctcggtaccagctctctgccatttttaagaagtgtaagcctcagtcagaacttggagccgtggaagcagctctgcctggggtgcccactgcccctgcagctcctggccctgctccctccccagcccctgtccctgccccacctccacccccgcccccacccccacctgccacccctgtgaccccggcccccgtgcctcccttcgagaagcaaggagaaaaggacaaggaagacaagcagacattccaagtcacagactgtcgaagtttggtcaaaaccttggtgtgtggtgtcaagacaatcacgtggggcataacatcatgcaaagcacctggtgaagctcagttcattcccaacaagcagttacaacccaaagagacacagatttacatcaaacttgtgaaatatgcaatgcaagctttagatatttatcaggtccagatagcaggaaatggacagacatacatccgtgtggccaactgccagactgtgagaatgaaagaggagaaggaggtattggagcatttcgctggtgtgttcacaatgatgaaccccttaacgttcaaagaaatcttccaaactacggtcccttatatggtggagagaatctcaaaaaattatgctcttcagattgttgccaattccttcttggcaaatcctactacctctgctctgtttgctacgattctggtggaatatctccttgatcgcctgccagaaatgggctccaacgtggagctctccaacctgtacctcaagctgttcaagctggtctttggctctgtctccctctttgcagctgaaaatgaacaaatgctgaagcctcacttgcacaagattgtgaacagctctatggagctcgcgcagactgccaaggaaccctacaactacttcttgctgctacgggcgctgtttcgctctattggtggaggtagccacgatctcttgtatcaggagttcttgcctctccttccaaacctcctgcaagggctgaacatgcttcagagtggcctgcacaagcagcacatgaaggacctctttgtggagctgtgtctcaccgtccctgtgcggctgagctcgcttttgccgtacctgcccatgcttatggatcccttggtgtctgcactcaatgggtctcagacattggtcagccaaggcctcaggacgctggagctgtgtgtggacaacctgcagcccgacttcctctacgaccacatccagccggtgcgcgcagagctcatgcaggctctgtggcgcaccttacgcaaccctgctgacagcatctcccacgtggcctaccgtgtgctcggtaagtttggcggcagtaacaggaagatgctgaaggagtcgcagaagctgcactacgttgtgaccgaggttcagggccccagcatcactgtggagttttccgactgcaaagcttctctccagctccccatggagaaggccattgaaactgctctggactgcctgaaaagcgccaacactgagccctactaccggaggcaggcgtgggaagtgatcaaatgcttcctggtggccatgatgagcctggaggacaacaagcacgcactctaccagctcctggcacaccccaactttacagaaaagaccatccccaatgttatcatctcacatcgctacaaagcccaggacactccagcccggaagacttttgagcaggccctgacaggcgccttcatgtctgctgtcattaaggacctgcggcccagcgccctgccctttgtcgccagcttgatccgccactatacgatggtggcagtcgcccagcagtgtggccctttcttgctgccttgctaccaggtgggcagccagcccagcacagccatgtttcacagtgaagaaaatggctcgaaaggaatggatcctttggttctcattgatgcaattgctatttgtatggcatatgaagaaaaggagctttgcaaaatcggggaggtggccctagctgtgatatttgatgttgcaagtatcatcctgggctccaaggagagggcctgccagctgcccctgttttcttacatcgtggagcgcctgtgtgcatgttgttatgaacaggcgtggtatgcaaagctggggggtgtggtgtctattaagtttctcatggagcggctgcctctcacttgggttctccagaaccagcagacattcctgaaagcacttctctttgtcatgatggacttaactggagaggtttccaatggggcagtcgctatggcaaagaccacgctggagcagcttctgatgcggtgcgcaacgcctttaaaagacgaggagagagccgaagagatcgtggccgcccaggaaaagtctttccaccatgtgacacacgacttggttcgagaagtcacctctccaaactccactgtgaggaagcaggccatgcattcgctgcaggtgttggcccaggtcactgggaagagtgtcacggtgatcatggaaccccacaaagaggtcctgcaggatatggtcccccctaagaagcacctgctccgacaccagcctgccaacgcacagattggcctgatggaggggaacacgttctgtaccacgttgcagcccaggctcttcacaatggaccttaacgtggtggagcataaggtgttctacacagagctgttgaatttgtgtgaggctgaagattcagctttaacaaagctgccctgttataaaagccttccgtcactcgtacctttacgaattgcggcattaaatgcacttgctgcctgcaattaccttcctcagtccagggagaaaatcatcgctgcactcttcaaagccctgaattccaccaatagtgagctccaagaggccggagaagcctgtatgagaaagtttttagaaggtgctaccatagaagtcgatcaaatccacacacatatgcgacctttgctgatgatgctgggagattaccggagcttgacgctgaatgttgtgaatcgcctgacttcggtcacgaggctcttcccaaattccttcaatgataaattttgtgatcagatgatgcaacatctgcgcaagtggatggaagtggtggtgatcacccacaaagggggccagaggagcgacggaaacgaaagcatttccgagtgcgggagatgtcccttgtctccattctgtcagtttgaggaaatgaagatttgctcagcaattataaacctttttcatctgatcccggctgctcctcagacactggtgaagcctttgctagaggttgtcatgaaaacggagcgggcgatgctgatcgaggcggggagtccattccgagagcccctgatcaagttcctgactcgacatccctcgcagacagtggagctgttcatgatggaagccacactgaacgatccccagtggagcagaatgtttatgagttttttaaaacacaaagacgccagacctctgcgggatgtgctggctgccaaccccaacaggttcatcaccctgctgctgccggggggtgcccagacggctgtgcgccccggttcgcccagcaccagcaccatgcgcctggacctccagttccaggccatcaagatcataagcattatagtgaaaaacgatgactcctggctggccagccagcactctctggtgagccagttgcgacgtgtgtgggtgagtgagaacttccaagagaggcaccgcaaggagaacatggcagccaccaactggaaggagcccaagctgctggcctactgcctgctgaactactgcaaaaggaattacggagatatagaattgctgttccagctgctccgagcctttactggtcgttttctctgcaacatgacattcttaaaagagtatatggaggaagagattcccaaaaattacagcatcgctcagaaacgtgccctgttctttcgctttgtagacttcaacgaccccaacttcggagatgaattaaaagctaaagttctgcagcatatcttgaatcctgctttcttgtacagctttgagaagggggaaggagagcagctcttgggacctcccaatccagaaggagataacccagaaagcatcaccagtgtgtttattaccaaggtcctggaccccgagaagcaggcggacatgctggactcgctgcggatctacctgctgcagtacgccacgctgctggtggagcacgccccccaccacatccatgacaacaacaagaaccgcaacagcaagctgcgccgcctcatgaccttcgcctggccctgcctgctctccaaggcctgcgtggacccagcctgcaagtacagcggacacttgctcctggcgcacattatcgccaaattcgccatacacaagaagatcgtcctgcaggtttttcatagtctcctcaaggctcacgcaatggaagctcgagcgatcgtcagacaggcgatggccattctgaccccggcggtgccggccaggatggaggacgggcaccagatgctgacccactggacccggaagatcattgtggaggaggggcacaccgtcccgcagctggtccacattctgcacctgatagtgcaacacttcaaggtgtactacccggtacggcaccacttggtgcagcacatggtgagcgccatgcagaggctgggcttcacgcccagtgtcaccatcgagcagaggcggctggccgtggacctgtctgaagtcgtcatcaagtgggagctgcagaggatcaaggaccagcagccggattcagatatggacccaaattccagtggagaaggagtcaattctgtctcatcctccattaagagaggcctgtccgtggattctgcccaggaagtgaaacgctttaggacggccaccggagccatcagtgcagtctttgggaggagccagtcgctacctggagcagactctctcctcgccaagcccattgacaagcagcacacagacactgtggtgaacttccttatccgcgtggcctgtcaggttaatgacaacaccaacacagcggggtcccctggggaggtgctctctcgccggtgtgtgaaccttctgaagactgcgttgcggccagacatgtggcccaagtccgaactcaagctgcagtggttcgacaagctgctgatgactgtggagcagccaaaccaagtgaactatgggaatatctgcacgggcctagaagtgctgagcttcctgctaactgtcctccagtccccagccatcctcagtagcttcaaacctctgcagcgtggaattgccgcctgcatgacatgtggaaacaccaaggtgttgcgagccgtccacagccttctctcgcgcctgatgagcattttcccaacagagccgagtacttccagtgtggcctccaaatatgaagagctggagtgcctctacgcagccgtcggaaaggtcatctatgaagggctcaccaactacgagaaggccaccaatgccaatccctcccagctcttcgggacccttatgatcctcaagtctgcctgcagcaacaaccccagctacatagacaggctgatctccgtctttatgcgctccctgcagaagatggtccgggagcatttaaaccctcaggcagcgtcaggaagcaccgaagccacctcaggtacaagcgagctggtgatgctgagtctggagctggtgaagacgcgcctggcagtgatgagcatggagatgcggaagaacttcatccaggccatcctgacatccctcatcgaaaaatcaccagatgccaaaatcctccgggctgtggtcaaaatcgtggaagaatgggtcaagaataactccccaatggcagccaatcagacacctacactccgggagaagtccattttgcttgtgaagatgatgacttacatagaaaaacgctttccggaagaccttgaattaaatgcccagtttttagatcttgttaactatgtctacagggatgagaccctctctggcagcgagctgacggcgaaacttgagcctgcctttctctctgggctgcgctgtgcccagccactcatcagggcaaagtttttcgaggtttttgacaactccatgaaacgtcgtgtctacgagcgcttgctctatgtgacctgttcgcagaactgggaagccatggggaaccacttctggatcaagcagtgcattgagctgcttctggccgtgtgtgagaagagcacccccattggcaccagctgccaaggagccatgctcccgtccatcaccaacgtcatcaacctggccgatagccacgaccgtgccgccttcgccatggtcacacatgtcaagcaggagccccgggagcgggagaacagcgagtccaaagaggaggatgtagagatagacatcgaactagctcctggggatcagaccagcacgcccaaaaccaaagaactttcagaaaaggacattggaaaccagctgcacatgctaaccaacaggcacgacaagtttctggacactctccgagaggtgaagactggagcgctgctcagcgctttcgttcagctgtgccacatttccacgacgctggcagagaagacgtgggtccagcttttccccagattgtggaagatcctctctgacagacagcagcatgcactcgcgggtgagataagtccatttctgtgcagcggcagtcaccaggtgcagcgggactgccagcccagcgcgctgaactgctttgtggaagccatgtcccagtgcgtgccgccaatccccatccgaccctgcgtcctgaagtacctggggaagacacacaacctctggttccggtccacgctgatgttggagcaccaggcttttgaaaagggtctgagtcttcagattaagccgaagcaaacaacggagttttatgagcaggagagcatcaccccgccgcagcaggagatactggattcccttgcggagctttactccctgttacaagaggaagatatgtgggctggtctgtggcagaagcggtgcaagtactcggagacagcgactgcgattgcttacgagcagcacgggttctttgagcaggcacaagaatcctatgaaaaggcaatggataaagccaaaaaagaacatgagaggagtaacgcctcccctgctattttccctgaataccagctctgggaagaccactggattcgatgctccaaggaattgaaccagtgggaagccctgacggagtacggtcagtccaaaggccacatcaacccctacctcgtcctggagtgcgcctggcgggtgtccaactggactgccatgaaggaggcgctggtgcaggtggaagtgagctgtccgaaggagatggcctggaaggtgaacatgtaccgcggatacctggccatctgccaccccgaggagcagcagctcagcttcatcgagcgcctggtggagatggccagcagcctggccatccgcgagtggcggcggctgccccacgtagtgtcccacgtgcacacgcctctcctacaggcagcccagcaaatcatcgaactccaggaagctgcacaaatcaacgcaggcttacagccaaccaacctgggaaggaacaacagcctgcacgacatgaagacggtggtgaagacctggaggaaccgactgcccatcgtgtctgacgacttgtcccactggagcagcatcttcatgtggaggcagcatcattaccagggtaaaccgacctggtccggcatgcattcatcatcgattgtaactgcctatgagaatagctctcagcatgatcccagttcaaataacgctatgcttggggttcatgcatcagcttcagcgatcatccagtatggaaaaatcgcccggaaacaaggactggtcaatgtagctctggatatattaagtcggattcatactattccaactgttcctatcgtggattgcttccagaagattcgacagcaagttaaatgctacctccagctggcaggcgtcatgggcaaaaacgagtgcatgcagggccttgaagttattgaatctacaaatttaaaatacttcacaaaagagatgacagccgaattttatgcactgaagggaatgttcttggctcagatcaacaagtccgaggaggcaaacaaagccttctctgcagctgtgcagatgcacgatgtgctggtgaaagcctgggccatgtggggcgactacctggagaacatctttgtgaaggagcggcagctgcacctgggcgtgtctgccatcacctgctacctgcacgcctgccggcatcagaacgagagcaaatcgaggaaatacttagccaaggtgctgtggcttttgagttttgatgatgacaaaaacactttggcagatgccgtcgacaagtactgcattggtgtgccacccatccagtggctggcctggatcccacagctgctcacctgcctggttggctcggagggaaagctgctcttgaacctcattagccaggttggacgcgtgtatccccaagcggtctactttcccatccggaccctgtacctgaccctgaaaatagaacagcgggaacgctacaagagcgatccagggcccataagagcaacagcacccatgtggcgctgcagccgaatcatgcacatgcagcgagagctccaccccacccttctgtcttccctggaaggcatcgtcgatcagatggtctggttcagagaaaattggcatgaagaggttctcaggcagctccaacagggcctggcgaaatgttactccgtggcgtttgagaaaagtggagcggtgtccgatgctaaaatcaccccccacactctcaattttgtgaagaagttggtgagcacgtttggggtgggcctggagaatgtgtccaacgtctcgaccatgttctccagcgcagcctctgagtctctggcccggcgggcgcaggccactgcacaagaccctgtctttcagaagctgaaaggccagttcacgacggattttgacttcagcgttccaggatccatgaagcttcataatcttatttctaagttgaaaaagtggatcaaaatcttggaggccaagaccaagcaactccccaaattcttcctcatagaggaaaagtgccggttcttgagcaatttctcggcacagacagctgaagtggaaattcctggggagtttctgatgccaaagccaacgcattattacatcaagattgcacggttcatgccccgggtagagattgtgcagaagcacaacaccgcagcccggcggctgtacatccggggacacaatggcaagatctacccatacctcgtcatgaacgacgcctgcctcacagagtcacggcgagaggagcgtgtgttgcagctgctgcgtctgctgaacccctgtttggagaagagaaaggagaccaccaagaggcacttgtttttcacagtgccccgggttgtggcagtttccccacagatgcgcctcgtggaggacaacccctcttcactttcccttgtggagatctacaagcagcgctgcgccaagaagggcatcgagcatgacaaccccatctcccgttactatgaccggctggctacggtgcaggcgcggggaacccaagccagccaccaggtcctccgcgacatcctcaaggaggttcagagtaacatggtgccgcgcagcatgctcaaggagtgggcgctgcacaccttccccaatgccacggactactggacgttccggaagatgttcaccatccagctggctctgataggcttcgcggaattcgtcctgcatttaaatagactcaaccccgagatgttacagatcgctcaggacactggcaaactgaatgttgcctactttcgatttgacataaacgacgcgactggagacctggatgccaaccgtcctgtcccatttcgactcacgcccaacatttctgagtttctgaccaccatcggggtctccggcccgttgacagcgtccatgattgcggtcgcccggtgcttcgcccagccaaactttaaggtggatggcattctgaaaacggttctccgggacgagatcattgcttggcacaaaaaaacacaagaggacacgtcctctcctctctcggccgccgggcagccagagaacatggacagccagcaactggtgtccctggttcagaaagccgtcaccgccatcatgacccgcctgcacaacctcgcccagttcgaaggcggggaaagcaaggtgaacaccctggtggccgcggcaaacagcctggacaatctgtgccgcatggaccccgcctggcacccctggctgtgactgtggccgccacggccacccggaatgtgaagggcgctccgggctctgagcccgcagcttttacgacttctccctgcctcgttccttatattcacagaagccccatagtttcactgggttgcggttattttcctggtagtttgcgtgtaagaaagggagaatatagttttagaggaagctgaactatgacgatgctgggcgaagcggttggaaatggcagagctgaaacttattccaagctttcaaaataatcttttaagaagccaggattctccggtctggaatttctgagtgagtcctttttttatggtgtcctccctctgtgaatgtacaggcggaactgtacgaacagctcccttccatccatttttaactctttcggaaataacacctcacagcagcttcgtgcttttgtacagacctttgtaacaagtgtacagaaaactcattttgtttgagaaacaggagttgatgaacccatcatgctggtttttctctgagcacaaagttttaggctgtacacagccagccttgggaatctcgttgagcgttcggcgtggatccacggggccaggccaccctgcgggagcgccacacgcatccacttcggattcagtgggtgaagacagaactctgagagtctgcaggcggctcctgtgctttttatttctggctcttcggatgtcttctagacatttactatcactgcacctgaagaaaaaatcacttttaccttcctaatttaaaaagacaaaacagaaatgtacgttccttcgctagctttagtctttctgttcccatttttataaatctgagcattgataatgttctatctaaatttgtacagtgtgatttttttttttagaataaatattttataaaagggtt

SEQ ID NO: 192523 - DNA, 11654 bp, Homo sapiens
  Payload ID: 18012
  Gene Name: transformation/transcription domain-associated protein
  ENST ID: ENST00000456197
  CDS Start-End: 1-10766
aaacattgtcatttttagcttacattatcaggatttaccaggagttggtgactaagtattctcagcagatggtgaaaggaatgctccagttactttcaaattgtccagcagagactgcacacctcagaaaggagcttctgattgctgccaaacacatcctcaccacagagctgagaaaccagttcattccttgcatggacaagctgtttgatgaatccatactaattggctcaggatatactgccagagagactctaaggcccctcgcctacagcacgctggccgacctcgtgcaccatgtccgccagcacctgcccctcagcgacctctccctcgccgtccagctcttcgccaagaacatcgacgatgagtccctgcccagcagcatccagaccatgtcctgcaagctcctgctgaacctggtggactgcatccgttccaagagcgagcaggagagtggcaatgggagagacgtcctgatgcggatgctggaggttttcgttctcaaattccacacaattgctcggtaccagctctctgccatttttaagaagtgtaagcctcagtcagaacttggagccgtggaagcagctctgcctggggtgcccactgcccctgcagctcctggccctgctccctccccagcccctgtccctgccccacctccacccccgcccccacccccacctgccacccctgtgaccccggcccccgtgcctcccttcgagaagcaaggagaaaaggacaaggaagacaagcagacattccaagtcacagactgtcgaagtttggtcaaaaccttggtgtgtggtgtcaagacaatcacgtggggcataacatcatgcaaagcacctggtgaagctcagttcattcccaacaagcagttacaacccaaagagacacagatttacatcaaacttgtgaaatatgcaatgcaagctttagatatttatcaggtccagatagcaggaaatggacagacatacatccgtgtggccaactgccagactgtgagaatgaaagaggagaaggaggtattggagcatttcgctggtgtgttcacaatgatgaaccccttaacgttcaaagaaatcttccaaactacggtcccttatatggtggagagaatctcaaaaaattatgctcttcagattgttgccaattccttcttggcaaatcctactacctctgctctgtttgctacgattctggtggaatatctccttgatcgcctgccagaaatgggctccaacgtggagctctccaacctgtacctcaagctgttcaagctggtctttggctctgtctccctctttgcagctgaaaatgaacaaatgctgaagcctcacttgcacaagattgtgaacagctctatggagctcgcgcagactgccaaggaaccctacaactacttcttgctgctacgggcgctgtttcgctctattggtggaggtagccacgatctcttgtatcaggagttcttgcctctccttccaaacctcctgcaagggctgaacatgcttcagagtggcctgcacaagcagcacatgaaggacctctttgtggagctgtgtctcaccgtccctgtgcggctgagctcgcttttgccgtacctgcccatgcttatggatcccttggtgtctgcactcaatgggtctcagacattggtcagccaaggcctcaggacgctggagctgtgtgtggacaacctgcagcccgacttcctctacgaccacatccagccggtgcgcgcagagctcatgcaggctctgtggcgcaccttacgcaaccctgctgacagcatctcccacgtggcctaccgtgtgctcggtaagtttggcggcagtaacaggaagatgctgaaggagtcgcagaagctgcactacgttgtgaccgaggttcagggccccagcatcactgtggagttttccgactgcaaagcttctctccagctccccatggagaaggccattgaaactgctctggactgcctgaaaagcgccaacactgagccctactaccggaggcaggcgtgggaagtgatcaaatgcttcctggtggccatgatgagcctggaggacaacaagcacgcactctaccagctcctggcacaccccaactttacagaaaagaccatccccaatgttatcatctcacatcgctacaaagcccaggacactccagcccggaagacttttgagcaggccctgacaggcgccttcatgtctgctgtcattaaggacctgcggcccagcgccctgccctttgtcgccagcttgatccgccactatacgatggtggcagtcgcccagcagtgtggccctttcttgctgccttgctaccaggtgggcagccagcccagcacagccatgtttcacagtgaagaaaatggctcgaaaggaatggatcctttggttctcattgatgcaattgctatttgtatggcatatgaagaaaaggagctttgcaaaatcggggaggtggccctagctgtgatatttgatgttgcaagtatcatcctgggctccaaggagagggcctgccagctgcccctgttttcttacatcgtggagcgcctgtgtgcatgttgttatgaacaggcgtggtatgcaaagctggggggtgtggtgtctattaagtttctcatggagcggctgcctctcacttgggttctccagaaccagcagacattcctgaaagcacttctctttgtcatgatggacttaactggagaggtttccaatggggcagtcgctatggcaaagaccacgctggagcagcttctgatgcggtgcgcaacgcctttaaaagacgaggagagagccgaagagatcgtggccgcccaggaaaagtctttccaccatgtgacacacgacttggttcgagaagtcacctctccaaactccactgtgaggaagcaggccatgcattcgctgcaggtgttggcccaggtcactgggaagagtgtcacggtgatcatggaaccccacaaagaggtcctgcaggatatggtcccccctaagaagcacctgctccgacaccagcctgccaacgcacagattggcctgatggaggggaacacgttctgtaccacgttgcagcccaggctcttcacaatggaccttaacgtggtggagcataaggtgttctacacagagctgttgaatttgtgtgaggctgaagattcagctttaacaaagctgccctgttataaaagccttccgtcactcgtacctttacgaattgcggcattaaatgcacttgctgcctgcaattaccttcctcagtccagggagaaaatcatcgctgcactcttcaaagccctgaattccaccaatagtgagctccaagaggccggagaagcctgtatgagaaagtttttagaaggtgctaccatagaagtcgatcaaatccacacacatatgcgacctttgctgatgatgctgggagattaccggagcttgacgctgaatgttgtgaatcgcctgacttcggtcacgaggctcttcccaaattccttcaatgataaattttgtgatcagatgatgcaacatctgcgcaagtggatggaagtggtggtgatcacccacaaagggggccagaggagcgacggaaacgaaagcatttccgagtgcgggagatgtcccttgtctccattctgtcagtttgagcctgccatggaaggggtagaggaaatgaagatttgctcagcaattataaacctttttcatctgatcccggctgctcctcagacactggtgaagcctttgctagaggttgtcatgaaaacggagcgggcgatgctgatcgaggcggggagtccattccgagagcccctgatcaagttcctgactcgacatccctcgcagacagtggagctgttcatgatggaagccacactgaacgatccccagtggagcagaatgtttatgagttttttaaaacacaaagacgccagacctctgcgggatgtgctggctgccaaccccaacaggttcatcaccctgctgctgccggggggtgcccagacggctgtgcgccccggttcgcccagcaccagcaccatgcgcctggacctccagttccaggccatcaagatcataagcattatagtgaaaaacgatgactcctggctggccagccagcactctctggtgagccagttgcgacgtgtgtgggtgagtgagaacttccaagagaggcaccgcaaggagaacatggcagccaccaactggaaggagcccaagctgctggcctactgcctgctgaactactgcaaaaggaattacggagatatagaattgctgttccagctgctccgagcctttactggtcgttttctctgcaacatgacattcttaaaagagtatatggaggaagagattcccaaaaattacagcatcgctcagaaacgtgccctgttctttcgctttgtagacttcaacgaccccaacttcggagatgaattaaaagctaaagttctgcagcatatcttgaatcctgctttcttgtacagctttgagaagggggaaggagagcagctcttgggacctcccaatccagaaggagataacccagaaagcatcaccagtgtgtttattaccaaggtcctggaccccgagaagcaggcggacatgctggactcgctgcggatctacctgctgcagtacgccacgctgctggtggagcacgccccccaccacatccatgacaacaacaagaaccgcaacagcaagctgcgccgcctcatgaccttcgcctggccctgcctgctctccaaggcctgcgtggacccagcctgcaagtacagcggacacttgctcctggcgcacattatcgccaaattcgccatacacaagaagatcgtcctgcaggtttttcatagtctcctcaaggctcacgcaatggaagctcgagcgatcgtcagacaggcgatggccattctgaccccggcggtgccggccaggatggaggacgggcaccagatgctgacccactggacccggaagatcattgtggaggaggggcacaccgtcccgcagctggtccacattctgcacctgatagtgcaacacttcaaggtgtactacccggtacggcaccacttggtgcagcacatggtgagcgccatgcagaggctgggcttcacgcccagtgtcaccatcgagcagaggcggctggccgtggacctgtctgaagtcgtcatcaagtgggagctgcagaggatcaaggaccagcagccggattcagatatggacccaaattccagtggagaaggagtcaattctgtctcatcctccattaagagaggcctgtccgtggattctgcccaggaagtgaaacgctttaggacggccaccggagccatcagtgcagtctttgggaggagccagtcgctacctggagcagactctctcctcgccaagcccattgacaagcagcacacagacactgtggtgaacttccttatccgcgtggcctgtcaggttaatgacaacaccaacacagcggggtcccctggggaggtgctctctcgccggtgtgtgaaccttctgaagactgcgttgcggccagacatgtggcccaagtccgaactcaagctgcagtggttcgacaagctgctgatgactgtggagcagccaaaccaagtgaactatgggaatatctgcacgggcctagaagtgctgagcttcctgctaactgtcctccagtccccagccatcctcagtagcttcaaacctctgcagcgtggaattgccgcctgcatgacatgtggaaacaccaaggtgttgcgagccgtccacagccttctctcgcgcctgatgagcattttcccaacagagccgagtacttccagtgtggcctccaaatatgaagagctggagtgcctctacgcagccgtcggaaaggtcatctatgaagggctcaccaactacgagaaggccaccaatgccaatccctcccagctcttcgggacccttatgatcctcaagtctgcctgcagcaacaaccccagctacatagacaggctgatctccgtctttatgcgctccctgcagaagatggtccgggagcatttaaaccctcaggcagcgtcaggaagcaccgaagccacctcaggtacaagcgagctggtgatgctgagtctggagctggtgaagacgcgcctggcagtgatgagcatggagatgcggaagaacttcatccaggccatcctgacatccctcatcgaaaaatcaccagatgccaaaatcctccgggctgtggtcaaaatcgtggaagaatgggtcaagaataactccccaatggcagccaatcagacacctacactccgggagaagtccattttgcttgtgaagatgatgacttacatagaaaaacgctttccggaagaccttgaattaaatgcccagtttttagatcttgttaactatgtctacagggatgagaccctctctggcagcgagctgacggcgaaacttgagcctgcctttctctctgggctgcgctgtgcccagccactcatcagggcaaagtttttcgaggtttttgacaactccatgaaacgtcgtgtctacgagcgcttgctctatgtgacctgttcgcagaactgggaagccatggggaaccacttctggatcaagcagtgcattgagctgcttctggccgtgtgtgagaagagcacccccattggcaccagctgccaaggagccatgctcccgtccatcaccaacgtcatcaacctggccgatagccacgaccgtgccgccttcgccatggtcacacatgtcaagcaggagccccgggagcgggagaacagcgagtccaaagaggaggatgtagagatagacatcgaactagctcctggggatcagaccagcacgcccaaaaccaaagaactttcagaaaaggacattggaaaccagctgcacatgctaaccaacaggcacgacaagtttctggacactctccgagaggtgaagactggagcgctgctcagcgctttcgttcagctgtgccacatttccacgacgctggcagagaagacgtgggtccagcttttccccagattgtggaagatcctctctgacagacagcagcatgcactcgcgggtgagataagtccatttctgtgcagcggcagtcaccaggtgcagcgggactgccagcccagcgcgctgaactgctttgtggaagccatgtcccagtgcgtgccgccaatccccatccgaccctgcgtcctgaagtacctggggaagacacacaacctctggttccggtccacgctgatgttggagcaccaggcttttgaaaagggtctgagtcttcagattaagccgaagcaaacaacggagttttatgagcaggagagcatcaccccgccgcagcaggagatactggattcccttgcggagctttactccctgttacaagaggaagatatgtgggctggtctgtggcagaagcggtgcaagtactcggagacagcgactgcgattgcttacgagcagcacgggttctttgagcaggcacaagaatcctatgaaaaggcaatggataaagccaaaaaagaacatgagaggagtaacgcctcccctgctattttccctgaataccagctctgggaagaccactggattcgatgctccaaggaattgaaccagtgggaagccctgacggagtacggtcagtccaaaggccacatcaacccctacctcgtcctggagtgcgcctggcgggtgtccaactggactgccatgaaggaggcgctggtgcaggtggaagtgagctgtccgaaggagatggcctggaaggtgaacatgtaccgcggatacctggccatctgccaccccgaggagcagcagctcagcttcatcgagcgcctggtggagatggccagcagcctggccatccgcgagtggcggcggctgccccacgtagtgtcccacgtgcacacgcctctcctacaggcagcccagcaaatcatcgaactccaggaagctgcacaaatcaacgcaggcttacagccaaccaacctgggaaggaacaacagcctgcacgacatgaagacggtggtgaagacctggaggaaccgactgcccatcgtgtctgacgacttgtcccactggagcagcatcttcatgtggaggcagcatcattaccaggcgattgtaactgcctatgagaatagctctcagcatgatcccagttcaaataacgctatgcttggggttcatgcatcagcttcagcgatcatccagtatggaaaaatcgcccggaaacaaggactggtcaatgtagctctggatatattaagtcggattcatactattccaactgttcctatcgtggattgcttccagaagattcgacagcaagttaaatgctacctccagctggcaggcgtcatgggcaaaaacgagtgcatgcagggccttgaagttattgaatctacaaatttaaaatacttcacaaaagagatgacagccgaattttatgcactgaagggaatgttcttggctcagatcaacaagtccgaggaggcaaacaaagccttctctgcagctgtgcagatgcacgatgtgctggtgaaagcctgggccatgtggggcgactacctggagaacatctttgtgaaggagcggcagctgcacctgggcgtgtctgccatcacctgctacctgcacgcctgccggcatcagaacgagagcaaatcgaggaaatacttagccaaggtgctgtggcttttgagttttgatgatgacaaaaacactttggcagatgccgtcgacaagtactgcattggtgtgccacccatccagtggctggcctggatcccacagctgctcacctgcctggttggctcggagggaaagctgctcttgaacctcattagccaggttggacgcgtgtatccccaagcggtctactttcccatccggaccctgtacctgaccctgaaaatagaacagcgggaacgctacaagagcgattctggacagcagcagccaagttcagtgggtaaccagtcccattctgcatcagatccagggcccataagagcaacagcacccatgtggcgctgcagccgaatcatgcacatgcagcgagagctccaccccacccttctgtcttccctggaaggcatcgtcgatcagatggtctggttcagagaaaattggcatgaagaggttctcaggcagctccaacagggcctggcgaaatgttactccgtggcgtttgagaaaagtggagcggtgtccgatgctaaaatcaccccccacactctcaattttgtgaagaagttggtgagcacgtttggggtgggcctggagaatgtgtccaacgtctcgaccatgttctccagcgcagcctctgagtctctggcccggcgggcgcaggccactgcacaagaccctgtctttcagaagctgaaaggccagttcacgacggattttgacttcagcgttccaggatccatgaagcttcataatcttatttctaagttgaaaaagtggatcaaaatcttggaggccaagaccaagcaactccccaaattcttcctcatagaggaaaagtgccggttcttgagcaatttctcggcacagacagctgaagtggaaattcctggggagtttctgatgccaaagccaacgcattattacatcaagattgcacggttcatgccccgggtagagattgtgcagaagcacaacaccgcagcccggcggctgtacatccggggacacaatggcaagatctacccatacctcgtcatgaacgacgcctgcctcacagagtcacggcgagaggagcgtgtgttgcagctgctgcgtctgctgaacccctgtttggagaagagaaaggagaccaccaagaggcacttgtttttcacagtgccccgggttgtggcagtttccccacagatgcgcctcgtggaggacaacccctcttcactttcccttgtggagatctacaagcagcgctgcgccaagaagggcatcgagcatgacaaccccatctcccgttactatgaccggctggctacggtgcaggcgcggggaacccaagccagccaccaggtcctccgcgacatcctcaaggaggttcagagtaacatggtgccgcgcagcatgctcaaggagtgggcgctgcacaccttccccaatgccacggactactggacgttccggaagatgttcaccatccagctggctctgataggcttcgcggaattcgtcctgcatttaaatagactcaaccccgagatgttacagatcgctcaggacactggcaaactgaatgttgcctactttcgatttgacataaacgacgcgactggagacctggatgccaaccgtcctgtcccatttcgactcacgcccaacatttctgagtttctgaccaccatcggggtctccggcccgttgacagcgtccatgattgcggtcgcccggtgcttcgcccagccaaactttaaggtggatggcattctgaaaacggttctccgggacgagatcattgcttggcacaaaaaaacacaagaggacacgtcctctcctctctcggccgccgggcagccagagaacatggacagccagcaactggtgtccctggttcagaaagccgtcaccgccatcatgacccgcctgcacaacctcgcccagttcgaaggcggggaaagcaaggtgaacaccctggtggccgcggcaaacagcctggacaatctgtgccgcatggaccccgcctggcacccctggctgtgactgtggccgccacggccacccggaatgtgaagggcgctccgggctctgagcccgcagcttttacgacttctccctgcctcgttccttatattcacagaagccccatagtttcactgggttgcggttattttcctggtagtttgcgtgtaagaaagggagaatatagttttagaggaagctgaactatgacgatgctgggcgaagcggttggaaatggcagagctgaaacttattccaagctttcaaaataatcttttaagaagccaggattctccggtctggaatttctgagtgagtcctttttttatggtgtcctccctctgtgaatgtacaggcggaactgtacgaacagctcccttccatccatttttaactctttcggaaataacacctcacagcagcttcgtgcttttgtacagacctttgtaacaagtgtacagaaaactcattttgtttgagaaacaggagttgatgaacccatcatgctggtttttctctgagcacaaagttttaggctgtacacagccagccttgggaatctcgttgagcgttcggcgtggatccacggggccaggccaccctgcgggagcgccacacgcatccacttcggattcagtgggtgaagacagaactctgagagtctgcaggcggctcctgtgctttttatttctggctcttcggatgtcttctagacatttactatcactgcacctgaagaaaaaatcacttttaccttcctaatttaaaaagacaaaacagaaatgtacgttccttcgctagctttagtctttctgttcccatttttataaatctgagcattgataatgttctatctaaatttgtacagtgtgatttttttttttagaataaatattttataaaagggtt

SEQ ID NO: 192524 - DNA, 550 bp, Homo sapiens
  Payload ID: 18012
  Gene Name: transformation/transcription domain-associated protein
  ENST ID: ENST00000417523
  CDS Start-End: 336-550
aggcctctctccatccagttttgatggaggtagctctgcctgccatgtggatccagcctcggagggtctcggtccatctccagccgtcaccttcccaaagaccctcctggcctcctctccattctgcgggccgagaagaaccccaggagagcagcggggaccgggagcgaggagtgggggtggcaaaccctaccctgcctgccaccttcagtccagtggtggacaatacctggaccccatagctgccaactcgggaagccgcgcccccccccaggctggttgaactcatggacctgatacttttctcttgagaagcaaaccagcccaaaagaaaaatggcgtttgttgcaacacagggggccacggtggttgaccagaccactttgatgaaaaagtaccttcagtttgtggcagctctcacagatgtgaatacacctgatgaaacaaagttgaaaatgatgcaagaagttagtgaaaattttgagaatgtcacgtcatctcctcagtattctacattcctagaacatatcatccctcgattccttacatt

SEQ ID NO: 192525 - DNA, 12492 bp, Homo sapiens
  Payload ID: 18012
  Gene Name: transformation/transcription domain-associated protein
  ENST ID: ENST00000446306
  CDS Start-End: 62-11608
gctggttgaactcatggacctgatacttttctcttgagaagcaaaccagcccaaaagaaaaatggcgtttgttgcaacacagggggccacggtggttgaccagaccactttgatgaaaaagtaccttcagtttgtggcagctctcacagatgtgaatacacctgatgaaacaaagttgaaaatgatgcaagaagttagtgaaaattttgagaatgtcacgtcatctcctcagtattctacattcctagaacatatcatccctcgattccttacatttctccaagatggagaagttcagtttcttcaggagaaaccagcacagcaactgcggaagctcgtacttgaaataattcatagaataccaaccaacgaacatcttcgtcctcacacaaaaaatgttttgtctgtgatgtttcgctttttagagacggaaaatgaagaaaatgttcttatttgtctaagaataattattgagctacacaaacagttcaggccaccgatcacacaagaaattcatcattttctggattttgtgaaacagatttacaaggagcttccaaaagtagtgaaccgctactttgagaaccctcaagtgatccccgagaacacagtgcctcccccagaaatggttggtatgataacaacgattgctgtgaaagtcaacccggagcgtgaggacagtgagactcgaacacattccatcattccgaggggatcactttctctgaaagtgttggcagaattgcccattattgttgttttaatgtatcagctctacaaactgaacatccacaatgttgttgctgagtttgtgcccttgatcatgaacaccattgccattcaggtgtctgcacaagcgaggcaacataagctttacaacaaggagttgtatgctgacttcattgctgctcagattaaaacattgtcatttttagcttacattatcaggatttaccaggagttggtgactaagtattctcagcagatggtgaaaggaatgctccagttactttcaaattgtccagcagagactgcacacctcagaaaggagcttctgattgctgccaaacacatcctcaccacagagctgagaaaccagttcattccttgcatggacaagctgtttgatgaatccatactaattggctcaggatatactgccagagagactctaaggcccctcgcctacagcacgctggccgacctcgtgcaccatgtccgccagcacctgcccctcagcgacctctccctcgccgtccagctcttcgccaagaacatcgacgatgagtccctgcccagcagcatccagaccatgtcctgcaagctcctgctgaacctggtggactgcatccgttccaagagcgagcaggagagtggcaatgggagagacgtcctgatgcggatgctggaggttttcgttctcaaattccacacaattgctcggtaccagctctctgccatttttaagaagtgtaagcctcagtcagaacttggagccgtggaagcagctctgcctggggtgcccactgcccctgcagctcctggccctgctccctccccagcccctgtccctgccccacctccacccccgcccccacccccacctgccacccctgtgaccccggcccccgtgcctcccttcgagaagcaaggagaaaaggacaaggaagacaagcagacattccaagtcacagactgtcgaagtttggtcaaaaccttggtgtgtggtgtcaagacaatcacgtggggcataacatcatgcaaagcacctggtgctcagttcattcccaacaagcagttacaacccaaagagacacagatttacatcaaacttgtgaaatatgcaatgcaagctttagatatttatcaggtccagatagcaggaaatggacagacatacatccgtgtggccaactgccagactgtgagaatgaaagaggagaaggaggtattggagcatttcgctggtgtgttcacaatgatgaaccccttaacgttcaaagaaatcttccaaactacggtcccttatatggtggagagaatctcaaaaaattatgctcttcagattgttgccaattccttcttggcaaatcctactacctctgctctgtttgctacgattctggtggaatatctccttgatcgcctgccagaaatgggctccaacgtggagctctccaacctgtacctcaagctgttcaagctggtctttggctctgtctccctctttgcagctgaaaatgaacaaatgctgaagcctcacttgcacaagattgtgaacagctctatggagctcgcgcagactgccaaggaaccctacaactacttcttgctgctacgggcgctgtttcgctctattggtggaggtagccacgatctcttgtatcaggagttcttgcctctccttccaaacctcctgcaagggctgaacatgcttcagagtggcctgcacaagcagcacatgaaggacctctttgtggagctgtgtctcaccgtccctgtgcggctgagctcgcttttgccgtacctgcccatgcttatggatcccttggtgtctgcactcaatgggtctcagacattggtcagccaaggcctcaggacgctggagctgtgtgtggacaacctgcagcccgacttcctctacgaccacatccagccggtgcgcgcagagctcatgcaggctctgtggcgcaccttacgcaaccctgctgacagcatctcccacgtggcctaccgtgtgctcggtaagtttggcggcagtaacaggaagatgctgaaggagtcgcagaagctgcactacgttgtgaccgaggttcagggccccagcatcactgtggagttttccgactgcaaagcttctctccagctccccatggagaaggccattgaaactgctctggactgcctgaaaagcgccaacactgagccctactaccggaggcaggcgtgggaagtgatcaaatgcttcctggtggccatgatgagcctggaggacaacaagcacgcactctaccagctcctggcacaccccaactttacagaaaagaccatccccaatgttatcatctcacatcgctacaaagcccaggacactccagcccggaagacttttgagcaggccctgacaggcgccttcatgtctgctgtcattaaggacctgcggcccagcgccctgccctttgtcgccagcttgatccgccactatacgatggtggcagtcgcccagcagtgtggccctttcttgctgccttgctaccaggtgggcagccagcccagcacagccatgtttcacagtgaagaaaatggctcgaaaggaatggatcctttggttctcattgatgcaattgctatttgtatggcatatgaagaaaaggagctttgcaaaatcggggaggtggccctagctgtgatatttgatgttgcaagtatcatcctgggctccaaggagagggcctgccagctgcccctgttttcttacatcgtggagcgcctgtgtgcatgttgttatgaacaggcgtggtatgcaaagctggggggtgtggtgtctattaagtttctcatggagcggctgcctctcacttgggttctccagaaccagcagacattcctgaaagcacttctctttgtcatgatggacttaactggagaggtttccaatggggcagtcgctatggcaaagaccacgctggagcagcttctgatgcggtgcgcaacgcctttaaaagacgaggagagagccgaagagatcgtggccgcccaggaaaagtctttccaccatgtgacacacgacttggttcgagaagtcacctctccaaactccactgtgaggaagcaggccatgcattcgctgcaggtgttggcccaggtcactgggaagagtgtcacggtgatcatggaaccccacaaagaggtcctgcaggatatggtcccccctaagaagcacctgctccgacaccagcctgccaacgcacagattggcctgatggaggggaacacgttctgtaccacgttgcagcccaggctcttcacaatggaccttaacgtggtggagcataaggtgttctacacagagctgttgaatttgtgtgaggctgaagattcagctttaacaaagctgccctgttataaaagccttccgtcactcgtacctttacgaattgcggcattaaatgcacttgctgcctgcaattaccttcctcagtccagggagaaaatcatcgctgcactcttcaaagccctgaattccaccaatagtgagctccaagaggccggagaagcctgtatgagaaagtttttagaaggtgctaccatagaagtcgatcaaatccacacacatatgcgacctttgctgatgatgctgggagattaccggagcttgacgctgaatgttgtgaatcgcctgacttcggtcacgaggctcttcccaaattccttcaatgataaattttgtgatcagatgatgcaacatctgcgcaagtggatggaagtggtggtgatcacccacaaagggggccagaggagcgacggaaacgaaatgaagatttgctcagcaattataaacctttttcatctgatcccggctgctcctcagacactggtgaagcctttgctagaggttgtcatgaaaacggagcgggcgatgctgatcgaggcggggagtccattccgagagcccctgatcaagttcctgactcgacatccctcgcagacagtggagctgttcatgatggaagccacactgaacgatccccagtggagcagaatgtttatgagttttttaaaacacaaagacgccagacctctgcgggatgtgctggctgccaaccccaacaggttcatcaccctgctgctgccggggggtgcccagacggctgtgcgccccggttcgcccagcaccagcaccatgcgcctggacctccagttccaggccatcaagatcataagcattatagtgaaaaacgatgactcctggctggccagccagcactctctggtgagccagttgcgacgtgtgtgggtgagtgagaacttccaagagaggcaccgcaaggagaacatggcagccaccaactggaaggagcccaagctgctggcctactgcctgctgaactactgcaaaaggaattacggagatatagaattgctgttccagctgctccgagcctttactggtcgttttctctgcaacatgacattcttaaaagagtatatggaggaagagattcccaaaaattacagcatcgctcagaaacgtgccctgttctttcgctttgtagacttcaacgaccccaacttcggagatgaattaaaagctaaagttctgcagcatatcttgaatcctgctttcttgtacagctttgagaagggggaaggagagcagctcttgggacctcccaatccagaaggagataacccagaaagcatcaccagtgtgtttattaccaaggtcctggaccccgagaagcaggcggacatgctggactcgctgcggatctacctgctgcagtacgccacgctgctggtggagcacgccccccaccacatccatgacaacaacaagaaccgcaacagcaagctgcgccgcctcatgaccttcgcctggccctgcctgctctccaaggcctgcgtggacccagcctgcaagtacagcggacacttgctcctggcgcacattatcgccaaattcgccatacacaagaagatcgtcctgcaggtttttcatagtctcctcaaggctcacgcaatggaagctcgagcgatcgtcagacaggcgatggccattctgaccccggcggtgccggccaggatggaggacgggcaccagatgctgacccactggacccggaagatcattgtggaggaggggcacaccgtcccgcagctggtccacattctgcacctgatagtgcaacacttcaaggtgtactacccggtacggcaccacttggtgcagcacatggtgagcgccatgcagaggctgggcttcacgcccagtgtcaccatcgagcagaggcggctggccgtggacctgtctgaagtcgtcatcaagtgggagctgcagaggatcaaggaccagcagccggattcagatatggacccaaattccagtggagaaggagtcaattctgtctcatcctccattaagagaggcctgtccgtggattctgcccaggaagtgaaacgctttaggacggccaccggagccatcagtgcagtctttgggaggagccagtcgctacctggagcagactctctcctcgccaagcccattgacaagcagcacacagacactgtggtgaacttccttatccgcgtggcctgtcaggttaatgacaacaccaacacagcggggtcccctggggaggtgctctctcgccggtgtgtgaaccttctgaagactgcgttgcggccagacatgtggcccaagtccgaactcaagctgcagtggttcgacaagctgctgatgactgtggagcagccaaaccaagtgaactatgggaatatctgcacgggcctagaagtgctgagcttcctgctaactgtcctccagtccccagccatcctcagtagcttcaaacctctgcagcgtggaattgccgcctgcatgacatgtggaaacaccaaggtgttgcgagccgtccacagccttctctcgcgcctgatgagcattttcccaacagagccgagtacttccagtgtggcctccaaatatgaagagctggagtgcctctacgcagccgtcggaaaggtcatctatgaagggctcaccaactacgagaaggccaccaatgccaatccctcccagctcttcgggacccttatgatcctcaagtctgcctgcagcaacaaccccagctacatagacaggctgatctccgtctttatgcgctccctgcagaagatggtccgggagcatttaaaccctcaggcagcgtcaggaagcaccgaagccacctcagcaggtacaagcgagctggtgatgctgagtctggagctggtgaagacgcgcctggcagtgatgagcatggagatgcggaagaacttcatccaggccatcctgacatccctcatcgaaaaatcaccagatgccaaaatcctccgggctgtggtcaaaatcgtggaagaatgggtcaagaataactccccaatggcagccaatcagacacctacactccgggagaagtccattttgcttgtgaagatgatgacttacatagaaaaacgctttccggaagaccttgaattaaatgcccagtttttagatcttgttaactatgtctacagggatgagaccctctctggcagcgagctgacggcgaaacttgagcctgcctttctctctgggctgcgctgtgcccagccactcatcagggcaaagtttttcgaggtttttgacaactccatgaaacgtcgtgtctacgagcgcttgctctatgtgacctgttcgcagaactgggaagccatggggaaccacttctggatcaagcagtgcattgagctgcttctggccgtgtgtgagaagagcacccccattggcaccagctgccaaggagccatgctcccgtccatcaccaacgtcatcaacctggccgatagccacgaccgtgccgccttcgccatggtcacacatgtcaagcaggagccccgggagcgggagaacagcgagtccaaagaggaggatgtagagatagacatcgaactagctcctggggatcagaccagcacgcccaaaaccaaagaactttcagaaaaggacattggaaaccagctgcacatgctaaccaacaggcacgacaagtttctggacactctccgagaggtgaagactggagcgctgctcagcgctttcgttcagctgtgccacatttccacgacgctggcagagaagacgtgggtccagcttttccccagattgtggaagatcctctctgacagacagcagcatgcactcgcgggtgagataagtccatttctgtgcagcggcagtcaccaggtgcagcgggactgccagcccagcgcgctgaactgctttgtggaagccatgtcccagtgcgtgccgccaatccccatccgaccctgcgtcctgaagtacctggggaagacacacaacctctggttccggtccacgctgatgttggagcaccaggcttttgaaaagggtctgagtcttcagattaagccgaagcaaacaacggagttttatgagcaggagagcatcaccccgccgcagcaggagatactggattcccttgcggagctttactccctgttacaagaggaagatatgtgggctggtctgtggcagaagcggtgcaagtactcggagacagcgactgcgattgcttacgagcagcacgggttctttgagcaggcacaagaatcctatgaaaaggcaatggataaagccaaaaaagaacatgagaggagtaacgcctcccctgctattttccctgaataccagctctgggaagaccactggattcgatgctccaaggaattgaaccagtgggaagccctgacggagtacggtcagtccaaaggccacatcaacccctacctcgtcctggagtgcgcctggcgggtgtccaactggactgccatgaaggaggcgctggtgcaggtggaagtgagctgtccgaaggagatggcctggaaggtgaacatgtaccgcggatacctggccatctgccaccccgaggagcagcagctcagcttcatcgagcgcctggtggagatggccagcagcctggccatccgcgagtggcggcggctgccccacgtagtgtcccacgtgcacacgcctctcctacaggcagcccagcaaatcatcgaactccaggaagctgcacaaatcaacgcaggcttacagccaaccaacctgggaaggaacaacagcctgcacgacatgaagacggtggtgaagacctggaggaaccgactgcccatcgtgtctgacgacttgtcccactggagcagcatcttcatgtggaggcagcatcattaccaggcgattgtaactgcctatgagaatagctctcagcatgatcccagttcaaataacgctatgcttggggttcatgcatcagcttcagcgatcatccagtatggaaaaatcgcccggaaacaaggactggtcaatgtagctctggatatattaagtcggattcatactattccaactgttcctatcgtggattgcttccagaagattcgacagcaagttaaatgctacctccagctggcaggcgtcatgggcaaaaacgagtgcatgcagggccttgaagttattgaatctacaaatttaaaatacttcacaaaagagatgacagccgaattttatgcactgaagggaatgttcttggctcagatcaacaagtccgaggaggcaaacaaagccttctctgcagctgtgcagatgcacgatgtgctggtgaaagcctgggccatgtggggcgactacctggagaacatctttgtgaaggagcggcagctgcacctgggcgtgtctgccatcacctgctacctgcacgcctgccggcatcagaacgagagcaaatcgaggaaatacttagccaaggtgctgtggcttttgagttttgatgatgacaaaaacactttggcagatgccgtcgacaagtactgcattggtgtgccacccatccagtggctggcctggatcccacagctgctcacctgcctggttggctcggagggaaagctgctcttgaacctcattagccaggttggacgcgtgtatccccaagcggtctactttcccatccggaccctgtacctgaccctgaaaatagaacagcgggaacgctacaagagcgattctggacagcagcagccaagttcagtgggtaaccagtcccattctgcatcagatccagggcccataagagcaacagcacccatgtggcgctgcagccgaatcatgcacatgcagcgagagctccaccccacccttctgtcttccctggaaggcatcgtcgatcagatggtctggttcagagaaaattggcatgaagaggttctcaggcagctccaacagggcctggcgaaatgttactccgtggcgtttgagaaaagtggagcggtgtccgatgctaaaatcaccccccacactctcaattttgtgaagaagttggtgagcacgtttggggtgggcctggagaatgtgtccaacgtctcgaccatgttctccagcgcagcctctgagtctctggcccggcgggcgcaggccactgcacaagaccctgtctttcagaagctgaaaggccagttcacgacggattttgacttcagcgttccaggatccatgaagcttcataatcttatttctaagttgaaaaagtggatcaaaatcttggaggccaagaccaagcaactccccaaattcttcctcatagaggaaaagtgccggttcttgagcaatttctcggcacagacagctgaagtggaaattcctggggagtttctgatgccaaagccaacgcattattacatcaagattgcacggttcatgccccgggtagagattgtgcagaagcacaacaccgcagcccggcggctgtacatccggggacacaatggcaagatctacccatacctcgtcatgaacgacgcctgcctcacagagtcacggcgagaggagcgtgtgttgcagctgctgcgtctgctgaacccctgtttggagaagagaaaggagaccaccaagaggcacttgtttttcacagtgccccgggttgtggcagtttccccacagatgcgcctcgtggaggacaacccctcttcactttcccttgtggagatctacaagcagcgctgcgccaagaagggcatcgagcatgacaaccccatctcccgttactatgaccggctggctacggtgcaggcgcggggaacccaagccagccaccaggtcctccgcgacatcctcaaggaggttcagagtaacatggtgccgcgcagcatgctcaaggagtgggcgctgcacaccttccccaatgccacggactactggacgttccggaagatgttcaccatccagctggctctgataggcttcgcggaattcgtcctgcatttaaatagactcaaccccgagatgttacagatcgctcaggacactggcaaactgaatgttgcctactttcgatttgacataaacgacgcgactggagacctggatgccaaccgtcctgtcccatttcgactcacgcccaacatttctgagtttctgaccaccatcggggtctccggcccgttgacagcgtccatgattgcggtcgcccggtgcttcgcccagccaaactttaaggtggatggcattctgaaaacggttctccgggacgagatcattgcttggcacaaaaaaacacaagaggacacgtcctctcctctctcggccgccgggcagccagagaacatggacagccagcaactggtgtccctggttcagaaagccgtcaccgccatcatgacccgcctgcacaacctcgcccagttcgaaggcggggaaagcaaggtgaacaccctggtggccgcggcaaacagcctggacaatctgtgccgcatggaccccgcctggcacccctggctgtgactgtggccgccacggccacccggaatgtgaagggcgctccgggctctgagcccgcagcttttacgacttctccctgcctcgttccttatattcacagaagccccatagtttcactgggttgcggttattttcctggtagtttgcgtgtaagaaagggagaatatagttttagaggaagctgaactatgacgatgctgggcgaagcggttggaaatggcagagctgaaacttattccaagctttcaaaataatcttttaagaagccaggattctccggtctggaatttctgagtgagtcctttttttatggtgtcctccctctgtgaatgtacaggcggaactgtacgaacagctcccttccatccatttttaactctttcggaaataacacctcacagcagcttcgtgcttttgtacagacctttgtaacaagtgtacagaaaactcattttgtttgagaaacaggagttgatgaacccatcatgctggtttttctctgagcacaaagttttaggctgtacacagccagccttgggaatctcgttgagcgttcggcgtggatccacggggccaggccaccctgcgggagcgccacacgcatccacttcggattcagtgggtgaagacagaactctgagagtctgcaggcggctcctgtgctttttatttctggctcttcggatgtcttctagacatttactatcactgcacctgaagaaaaaatcacttttaccttcctaatttaaaaagacaaaacagaaatgtacgttccttcgctagctttagtctttctgttcccatttttataaatctgagcattgataatgttctatctaaatttgtacagtgtgatttttttttttagaataaatattttataaaag

SEQ ID NO: 192526 - DNA, 12644 bp, Homo sapiens
  Payload ID: 18012
  Gene Name: transformation/transcription domain-associated protein
  ENST ID: ENST00000628380
  CDS Start-End: 210-11756
cgcgccggggcctggtgctcggtcggcgggtgctgccgctttaagcgggggcgggactgcgcgcggccgagcggttgcgacgagggctcggctgggggtcgccggggtcgcgggccgggcctgcaggagccgggccgccgaggtcggggctggttgaactcatggacctgatacttttctcttgagaagcaaaccagcccaaaagaaaaatggcgtttgttgcaacacagggggccacggtggttgaccagaccactttgatgaaaaagtaccttcagtttgtggcagctctcacagatgtgaatacacctgatgaaacaaagttgaaaatgatgcaagaagttagtgaaaattttgagaatgtcacgtcatctcctcagtattctacattcctagaacatatcatccctcgattccttacatttctccaagatggagaagttcagtttcttcaggagaaaccagcacagcaactgcggaagctcgtacttgaaataattcatagaataccaaccaacgaacatcttcgtcctcacacaaaaaatgttttgtctgtgatgtttcgctttttagagacggaaaatgaagaaaatgttcttatttgtctaagaataattattgagctacacaaacagttcaggccaccgatcacacaagaaattcatcattttctggattttgtgaaacagatttacaaggagcttccaaaagtagtgaaccgctactttgagaaccctcaagtgatccccgagaacacagtgcctcccccagaaatggttggtatgataacaacgattgctgtgaaagtcaacccggagcgtgaggacagtgagactcgaacacattccatcattccgaggggatcactttctctgaaagtgttggcagaattgcccattattgttgttttaatgtatcagctctacaaactgaacatccacaatgttgttgctgagtttgtgcccttgatcatgaacaccattgccattcaggtgtctgcacaagcgaggcaacataagctttacaacaaggagttgtatgctgacttcattgctgctcagattaaaacattgtcatttttagcttacattatcaggatttaccaggagttggtgactaagtattctcagcagatggtgaaaggaatgctccagttactttcaaattgtccagcagagactgcacacctcagaaaggagcttctgattgctgccaaacacatcctcaccacagagctgagaaaccagttcattccttgcatggacaagctgtttgatgaatccatactaattggctcaggatatactgccagagagactctaaggcccctcgcctacagcacgctggccgacctcgtgcaccatgtccgccagcacctgcccctcagcgacctctccctcgccgtccagctcttcgccaagaacatcgacgatgagtccctgcccagcagcatccagaccatgtcctgcaagctcctgctgaacctggtggactgcatccgttccaagagcgagcaggagagtggcaatgggagagacgtcctgatgcggatgctggaggttttcgttctcaaattccacacaattgctcggtaccagctctctgccatttttaagaagtgtaagcctcagtcagaacttggagccgtggaagcagctctgcctggggtgcccactgcccctgcagctcctggccctgctccctccccagcccctgtccctgccccacctccacccccgcccccacccccacctgccacccctgtgaccccggcccccgtgcctcccttcgagaagcaaggagaaaaggacaaggaagacaagcagacattccaagtcacagactgtcgaagtttggtcaaaaccttggtgtgtggtgtcaagacaatcacgtggggcataacatcatgcaaagcacctggtgctcagttcattcccaacaagcagttacaacccaaagagacacagatttacatcaaacttgtgaaatatgcaatgcaagctttagatatttatcaggtccagatagcaggaaatggacagacatacatccgtgtggccaactgccagactgtgagaatgaaagaggagaaggaggtattggagcatttcgctggtgtgttcacaatgatgaaccccttaacgttcaaagaaatcttccaaactacggtcccttatatggtggagagaatctcaaaaaattatgctcttcagattgttgccaattccttcttggcaaatcctactacctctgctctgtttgctacgattctggtggaatatctccttgatcgcctgccagaaatgggctccaacgtggagctctccaacctgtacctcaagctgttcaagctggtctttggctctgtctccctctttgcagctgaaaatgaacaaatgctgaagcctcacttgcacaagattgtgaacagctctatggagctcgcgcagactgccaaggaaccctacaactacttcttgctgctacgggcgctgtttcgctctattggtggaggtagccacgatctcttgtatcaggagttcttgcctctccttccaaacctcctgcaagggctgaacatgcttcagagtggcctgcacaagcagcacatgaaggacctctttgtggagctgtgtctcaccgtccctgtgcggctgagctcgcttttgccgtacctgcccatgcttatggatcccttggtgtctgcactcaatgggtctcagacattggtcagccaaggcctcaggacgctggagctgtgtgtggacaacctgcagcccgacttcctctacgaccacatccagccggtgcgcgcagagctcatgcaggctctgtggcgcaccttacgcaaccctgctgacagcatctcccacgtggcctaccgtgtgctcggtaagtttggcggcagtaacaggaagatgctgaaggagtcgcagaagctgcactacgttgtgaccgaggttcagggccccagcatcactgtggagttttccgactgcaaagcttctctccagctccccatggagaaggccattgaaactgctctggactgcctgaaaagcgccaacactgagccctactaccggaggcaggcgtgggaagtgatcaaatgcttcctggtggccatgatgagcctggaggacaacaagcacgcactctaccagctcctggcacaccccaactttacagaaaagaccatccccaatgttatcatctcacatcgctacaaagcccaggacactccagcccggaagacttttgagcaggccctgacaggcgccttcatgtctgctgtcattaaggacctgcggcccagcgccctgccctttgtcgccagcttgatccgccactatacgatggtggcagtcgcccagcagtgtggccctttcttgctgccttgctaccaggtgggcagccagcccagcacagccatgtttcacagtgaagaaaatggctcgaaaggaatggatcctttggttctcattgatgcaattgctatttgtatggcatatgaagaaaaggagctttgcaaaatcggggaggtggccctagctgtgatatttgatgttgcaagtatcatcctgggctccaaggagagggcctgccagctgcccctgttttcttacatcgtggagcgcctgtgtgcatgttgttatgaacaggcgtggtatgcaaagctggggggtgtggtgtctattaagtttctcatggagcggctgcctctcacttgggttctccagaaccagcagacattcctgaaagcacttctctttgtcatgatggacttaactggagaggtttccaatggggcagtcgctatggcaaagaccacgctggagcagcttctgatgcggtgcgcaacgcctttaaaagacgaggagagagccgaagagatcgtggccgcccaggaaaagtctttccaccatgtgacacacgacttggttcgagaagtcacctctccaaactccactgtgaggaagcaggccatgcattcgctgcaggtgttggcccaggtcactgggaagagtgtcacggtgatcatggaaccccacaaagaggtcctgcaggatatggtcccccctaagaagcacctgctccgacaccagcctgccaacgcacagattggcctgatggaggggaacacgttctgtaccacgttgcagcccaggctcttcacaatggaccttaacgtggtggagcataaggtgttctacacagagctgttgaatttgtgtgaggctgaagattcagctttaacaaagctgccctgttataaaagccttccgtcactcgtacctttacgaattgcggcattaaatgcacttgctgcctgcaattaccttcctcagtccagggagaaaatcatcgctgcactcttcaaagccctgaattccaccaatagtgagctccaagaggccggagaagcctgtatgagaaagtttttagaaggtgctaccatagaagtcgatcaaatccacacacatatgcgacctttgctgatgatgctgggagattaccggagcttgacgctgaatgttgtgaatcgcctgacttcggtcacgaggctcttcccaaattccttcaatgataaattttgtgatcagatgatgcaacatctgcgcaagtggatggaagtggtggtgatcacccacaaagggggccagaggagcgacggaaacgaaatgaagatttgctcagcaattataaacctttttcatctgatcccggctgctcctcagacactggtgaagcctttgctagaggttgtcatgaaaacggagcgggcgatgctgatcgaggcggggagtccattccgagagcccctgatcaagttcctgactcgacatccctcgcagacagtggagctgttcatgatggaagccacactgaacgatccccagtggagcagaatgtttatgagttttttaaaacacaaagacgccagacctctgcgggatgtgctggctgccaaccccaacaggttcatcaccctgctgctgccggggggtgcccagacggctgtgcgccccggttcgcccagcaccagcaccatgcgcctggacctccagttccaggccatcaagatcataagcattatagtgaaaaacgatgactcctggctggccagccagcactctctggtgagccagttgcgacgtgtgtgggtgagtgagaacttccaagagaggcaccgcaaggagaacatggcagccaccaactggaaggagcccaagctgctggcctactgcctgctgaactactgcaaaaggaattacggagatatagaattgctgttccagctgctccgagcctttactggtcgttttctctgcaacatgacattcttaaaagagtatatggaggaagagattcccaaaaattacagcatcgctcagaaacgtgccctgttctttcgctttgtagacttcaacgaccccaacttcggagatgaattaaaagctaaagttctgcagcatatcttgaatcctgctttcttgtacagctttgagaagggggaaggagagcagctcttgggacctcccaatccagaaggagataacccagaaagcatcaccagtgtgtttattaccaaggtcctggaccccgagaagcaggcggacatgctggactcgctgcggatctacctgctgcagtacgccacgctgctggtggagcacgccccccaccacatccatgacaacaacaagaaccgcaacagcaagctgcgccgcctcatgaccttcgcctggccctgcctgctctccaaggcctgcgtggacccagcctgcaagtacagcggacacttgctcctggcgcacattatcgccaaattcgccatacacaagaagatcgtcctgcaggtttttcatagtctcctcaaggctcacgcaatggaagctcgagcgatcgtcagacaggcgatggccattctgaccccggcggtgccggccaggatggaggacgggcaccagatgctgacccactggacccggaagatcattgtggaggaggggcacaccgtcccgcagctggtccacattctgcacctgatagtgcaacacttcaaggtgtactacccggtacggcaccacttggtgcagcacatggtgagcgccatgcagaggctgggcttcacgcccagtgtcaccatcgagcagaggcggctggccgtggacctgtctgaagtcgtcatcaagtgggagctgcagaggatcaaggaccagcagccggattcagatatggacccaaattccagtggagaaggagtcaattctgtctcatcctccattaagagaggcctgtccgtggattctgcccaggaagtgaaacgctttaggacggccaccggagccatcagtgcagtctttgggaggagccagtcgctacctggagcagactctctcctcgccaagcccattgacaagcagcacacagacactgtggtgaacttccttatccgcgtggcctgtcaggttaatgacaacaccaacacagcggggtcccctggggaggtgctctctcgccggtgtgtgaaccttctgaagactgcgttgcggccagacatgtggcccaagtccgaactcaagctgcagtggttcgacaagctgctgatgactgtggagcagccaaaccaagtgaactatgggaatatctgcacgggcctagaagtgctgagcttcctgctaactgtcctccagtccccagccatcctcagtagcttcaaacctctgcagcgtggaattgccgcctgcatgacatgtggaaacaccaaggtgttgcgagccgtccacagccttctctcgcgcctgatgagcattttcccaacagagccgagtacttccagtgtggcctccaaatatgaagagctggagtgcctctacgcagccgtcggaaaggtcatctatgaagggctcaccaactacgagaaggccaccaatgccaatccctcccagctcttcgggacccttatgatcctcaagtctgcctgcagcaacaaccccagctacatagacaggctgatctccgtctttatgcgctccctgcagaagatggtccgggagcatttaaaccctcaggcagcgtcaggaagcaccgaagccacctcagcaggtacaagcgagctggtgatgctgagtctggagctggtgaagacgcgcctggcagtgatgagcatggagatgcggaagaacttcatccaggccatcctgacatccctcatcgaaaaatcaccagatgccaaaatcctccgggctgtggtcaaaatcgtggaagaatgggtcaagaataactccccaatggcagccaatcagacacctacactccgggagaagtccattttgcttgtgaagatgatgacttacatagaaaaacgctttccggaagaccttgaattaaatgcccagtttttagatcttgttaactatgtctacagggatgagaccctctctggcagcgagctgacggcgaaacttgagcctgcctttctctctgggctgcgctgtgcccagccactcatcagggcaaagtttttcgaggtttttgacaactccatgaaacgtcgtgtctacgagcgcttgctctatgtgacctgttcgcagaactgggaagccatggggaaccacttctggatcaagcagtgcattgagctgcttctggccgtgtgtgagaagagcacccccattggcaccagctgccaaggagccatgctcccgtccatcaccaacgtcatcaacctggccgatagccacgaccgtgccgccttcgccatggtcacacatgtcaagcaggagccccgggagcgggagaacagcgagtccaaagaggaggatgtagagatagacatcgaactagctcctggggatcagaccagcacgcccaaaaccaaagaactttcagaaaaggacattggaaaccagctgcacatgctaaccaacaggcacgacaagtttctggacactctccgagaggtgaagactggagcgctgctcagcgctttcgttcagctgtgccacatttccacgacgctggcagagaagacgtgggtccagcttttccccagattgtggaagatcctctctgacagacagcagcatgcactcgcgggtgagataagtccatttctgtgcagcggcagtcaccaggtgcagcgggactgccagcccagcgcgctgaactgctttgtggaagccatgtcccagtgcgtgccgccaatccccatccgaccctgcgtcctgaagtacctggggaagacacacaacctctggttccggtccacgctgatgttggagcaccaggcttttgaaaagggtctgagtcttcagattaagccgaagcaaacaacggagttttatgagcaggagagcatcaccccgccgcagcaggagatactggattcccttgcggagctttactccctgttacaagaggaagatatgtgggctggtctgtggcagaagcggtgcaagtactcggagacagcgactgcgattgcttacgagcagcacgggttctttgagcaggcacaagaatcctatgaaaaggcaatggataaagccaaaaaagaacatgagaggagtaacgcctcccctgctattttccctgaataccagctctgggaagaccactggattcgatgctccaaggaattgaaccagtgggaagccctgacggagtacggtcagtccaaaggccacatcaacccctacctcgtcctggagtgcgcctggcgggtgtccaactggactgccatgaaggaggcgctggtgcaggtggaagtgagctgtccgaaggagatggcctggaaggtgaacatgtaccgcggatacctggccatctgccaccccgaggagcagcagctcagcttcatcgagcgcctggtggagatggccagcagcctggccatccgcgagtggcggcggctgccccacgtagtgtcccacgtgcacacgcctctcctacaggcagcccagcaaatcatcgaactccaggaagctgcacaaatcaacgcaggcttacagccaaccaacctgggaaggaacaacagcctgcacgacatgaagacggtggtgaagacctggaggaaccgactgcccatcgtgtctgacgacttgtcccactggagcagcatcttcatgtggaggcagcatcattaccaggcgattgtaactgcctatgagaatagctctcagcatgatcccagttcaaataacgctatgcttggggttcatgcatcagcttcagcgatcatccagtatggaaaaatcgcccggaaacaaggactggtcaatgtagctctggatatattaagtcggattcatactattccaactgttcctatcgtggattgcttccagaagattcgacagcaagttaaatgctacctccagctggcaggcgtcatgggcaaaaacgagtgcatgcagggccttgaagttattgaatctacaaatttaaaatacttcacaaaagagatgacagccgaattttatgcactgaagggaatgttcttggctcagatcaacaagtccgaggaggcaaacaaagccttctctgcagctgtgcagatgcacgatgtgctggtgaaagcctgggccatgtggggcgactacctggagaacatctttgtgaaggagcggcagctgcacctgggcgtgtctgccatcacctgctacctgcacgcctgccggcatcagaacgagagcaaatcgaggaaatacttagccaaggtgctgtggcttttgagttttgatgatgacaaaaacactttggcagatgccgtcgacaagtactgcattggtgtgccacccatccagtggctggcctggatcccacagctgctcacctgcctggttggctcggagggaaagctgctcttgaacctcattagccaggttggacgcgtgtatccccaagcggtctactttcccatccggaccctgtacctgaccctgaaaatagaacagcgggaacgctacaagagcgattctggacagcagcagccaagttcagtgggtaaccagtcccattctgcatcagatccagggcccataagagcaacagcacccatgtggcgctgcagccgaatcatgcacatgcagcgagagctccaccccacccttctgtcttccctggaaggcatcgtcgatcagatggtctggttcagagaaaattggcatgaagaggttctcaggcagctccaacagggcctggcgaaatgttactccgtggcgtttgagaaaagtggagcggtgtccgatgctaaaatcaccccccacactctcaattttgtgaagaagttggtgagcacgtttggggtgggcctggagaatgtgtccaacgtctcgaccatgttctccagcgcagcctctgagtctctggcccggcgggcgcaggccactgcacaagaccctgtctttcagaagctgaaaggccagttcacgacggattttgacttcagcgttccaggatccatgaagcttcataatcttatttctaagttgaaaaagtggatcaaaatcttggaggccaagaccaagcaactccccaaattcttcctcatagaggaaaagtgccggttcttgagcaatttctcggcacagacagctgaagtggaaattcctggggagtttctgatgccaaagccaacgcattattacatcaagattgcacggttcatgccccgggtagagattgtgcagaagcacaacaccgcagcccggcggctgtacatccggggacacaatggcaagatctacccatacctcgtcatgaacgacgcctgcctcacagagtcacggcgagaggagcgtgtgttgcagctgctgcgtctgctgaacccctgtttggagaagagaaaggagaccaccaagaggcacttgtttttcacagtgccccgggttgtggcagtttccccacagatgcgcctcgtggaggacaacccctcttcactttcccttgtggagatctacaagcagcgctgcgccaagaagggcatcgagcatgacaaccccatctcccgttactatgaccggctggctacggtgcaggcgcggggaacccaagccagccaccaggtcctccgcgacatcctcaaggaggttcagagtaacatggtgccgcgcagcatgctcaaggagtgggcgctgcacaccttccccaatgccacggactactggacgttccggaagatgttcaccatccagctggctctgataggcttcgcggaattcgtcctgcatttaaatagactcaaccccgagatgttacagatcgctcaggacactggcaaactgaatgttgcctactttcgatttgacataaacgacgcgactggagacctggatgccaaccgtcctgtcccatttcgactcacgcccaacatttctgagtttctgaccaccatcggggtctccggcccgttgacagcgtccatgattgcggtcgcccggtgcttcgcccagccaaactttaaggtggatggcattctgaaaacggttctccgggacgagatcattgcttggcacaaaaaaacacaagaggacacgtcctctcctctctcggccgccgggcagccagagaacatggacagccagcaactggtgtccctggttcagaaagccgtcaccgccatcatgacccgcctgcacaacctcgcccagttcgaaggcggggaaagcaaggtgaacaccctggtggccgcggcaaacagcctggacaatctgtgccgcatggaccccgcctggcacccctggctgtgactgtggccgccacggccacccggaatgtgaagggcgctccgggctctgagcccgcagcttttacgacttctccctgcctcgttccttatattcacagaagccccatagtttcactgggttgcggttattttcctggtagtttgcgtgtaagaaagggagaatatagttttagaggaagctgaactatgacgatgctgggcgaagcggttggaaatggcagagctgaaacttattccaagctttcaaaataatcttttaagaagccaggattctccggtctggaatttctgagtgagtcctttttttatggtgtcctccctctgtgaatgtacaggcggaactgtacgaacagctcccttccatccatttttaactctttcggaaataacacctcacagcagcttcgtgcttttgtacagacctttgtaacaagtgtacagaaaactcattttgtttgagaaacaggagttgatgaacccatcatgctggtttttctctgagcacaaagttttaggctgtacacagccagccttgggaatctcgttgagcgttcggcgtggatccacggggccaggccaccctgcgggagcgccacacgcatccacttcggattcagtgggtgaagacagaactctgagagtctgcaggcggctcctgtgctttttatttctggctcttcggatgtcttctagacatttactatcactgcacctgaagaaaaaatcacttttaccttcctaatttaaaaagacaaaacagaaatgtacgttccttcgctagctttagtctttctgttcccatttttataaatctgagcattgataatgttctatctaaatttgtacagtgtgatttttttttttagaataaatattttataaaagggtt

SEQ ID NO: 192527 - DNA, 1845 bp, Homo sapiens
  Payload ID: 18013
  Gene Name: transformer 2 alpha homolog (Drosophila)
  Uniprot ID: Q13595
  ENST ID: ENST00000297071
  CDS Start-End: 218-1066
gcccgccccctttacgtcgtgctctgaggaggccaggagatttctggcggcgccggcgccattttgctggagcctgcgaccgagtgggagtggagtggagcggctgtggttgccgactctttcctcttccccacggtccagtcagcgggttaattaggccatcggccctcgagccgagacttgtctcttatttagttctggggagcgcctcgtcgacatgagtgatgtggaggaaaacaacttcgagggcagagagtctcgctctcagtcaaaatctccaacgggaactcctgctcgtgtaaaatcggagagcaggtcaggatctcgtagtccatcaagggtttccaaacactctgaatcccattctcgatcaagatcaaaatccaggtcgaggtcaaggagacattctcatagacgttacactcgatccagatcccactctcactctcataggagacgatctcgaagtagatcatatacaccagaataccggcggcgaaggagccgaagccattctccaatgtctaaccggagaagacatactggcagcagggcaaatccagatcccaacacttgccttggagtgtttggcctcagtttgtacacaacagagagggatcttcgtgaagtattttctcgatatggaccattgagtggtgtcaatgtggtttatgatcagcgaactgggcgatctcgaggatttgcttttgtgtattttgagagaatagatgactcaaaggaggctatggaaagggcaaatggaatggagctggatggtagaagaattcgggtggattattctataaccaagagagcgcacacaccaacaccaggcatctacatgggcagaccaactcatagtggtgggggtggtggaggaggcggcggcggtggaggtggaggtggtggcagacgtcgagattcttactatgatagaggatatgatcgtgggtatgacagatatgaagactatgattaccgatacagaagacgatcaccttctccttattatagtcgatatagatcacgatcaagatctcgttcctacagcccaagacgctattgataacggaatggttgcaattaaggacattttttttcctcttttttttttttttttttttaattctgagatttccccaagctgtggattcttcctactccttaagaaaaaaactttggtttatttagcatctacacttttgtcagttgtgttgctgttttccacccattttattatactcttaaaagatgtaattgttgtcattttgaacagttaaacatcttgagtataaaaagaaccccaatgttatgttatgctttgtaaatttttttttttgcttttacctagataaacttctagctaatcaaataaggaaagaaactgtctttttaaagcttcttttgtgttagatactgtattagagatctgcatttatcatgagttcctttttttttttaactttatttttgggaaagtaacacatgaagtagttcagtcatgtcaggtttgtctggggtggaatggaacagtcaggtagttgaaagtttttttttagagatgaaaagcttgtgaactcctgtaaaacatgctgtatttgaaatacatctgttaaaacttaaaaactaaagtgtgattttttttgttgttgttaagtttattgaagtttattcccttaatcagtgaaggacaacccttatttattacctagagcagttgtataattcgctgttagaaattttggtattgggacagtggataagcaggttatcacatagcatagaattcttaaaagatacatgtggggaaaagtagtctcaaataaaagctaatttctttgaaaa

SEQ ID NO: 192528 - DNA, 2229 bp, Homo sapiens
  Payload ID: 18013
  Gene Name: transformer 2 alpha homolog (Drosophila)
  Uniprot ID: Q13595
  ENST ID: ENST00000392502
  CDS Start-End: 912-1454
gcccgccccctttacgtcgtgctctgaggaggccaggagatttctggcggcgccggcgccattttgctggagcctgcgaccgagtgggagtggagtggagcggctgtggttgccgactctttcctcttccccacggtccagtcagcgggttaattaggccatcggccctcgagccgagacttgtctcttatttagttctggggagcgcctcgtcgacatgagtgatgtggaggaaaacaacttcgagggcagatgagcggccgcgtctctgttggaaccggcggcgttgcgtctaaaaaggcgaaagccttgaggttgaaggtgggacgagcctaatgaagtggttaatgttcgtgaagaaattgaagagttttttccaagaatgtggaagataaatcaagataaaagaaggctaatgaaaagtattaaagatcagaaaattaaaattgaatgggggaaaaaattgaacagaagattggtcagatagaagcacttgaatatttttttaaggctattttgaattgtttgaattggggaagaatacacgaagtatgaaaaatgaaaaactcaatgaagaatgaagagaagtagaaagcaagagtgaagtagaattaaaagaatctggaagaatgaatgggtcctaggagtctcgctctcagtcaaaatctccaacgggaactcctgctcgtgtaaaatcggagagcaggtcaggatctcgtagtccatcaagggtttccaaacactctgaatcccattctcgatcaagatcaaaatccaggtcgaggtcaaggagacattctcatagacgttacactcgatccagatcccactctcactctcataggagacgatctcgaagtagatcatatacaccagaataccggcggcgaaggagccgaagccattctccaatgtctaaccggagaagacatactggcagcagggcaaatccagatcccaacacttgccttggagtgtttggcctcagtttgtacacaacagagagggatcttcgtgaagtattttctcgatatggaccattgagtggtgtcaatgtggtttatgatcagcgaactgggcgatctcgaggatttgcttttgtgtattttgagagaatagatgactcaaaggaggctatggaaagggcaaatggaatggagctggatggtagaagaattcgggtggattattctataaccaagagagcgcacacaccaacaccaggcatctacatgggcagaccaactcatagtggtgggggtggtggaggaggcggcggcggtggaggtggaggtggtggcagacgtcgagattcttactatgatagaggatatgatcgtgggtatgacagatatgaagactatgattaccgatacagacgatcaccttctccttattatagtcgatatagatcacgatcaagatctcgttcctacagcccaagacgctattgataacggaatggttgcaattaaggacattttttttcctcttttttttttttttttttttaattctgagatttccccaagctgtggattcttcctactccttaagaaaaaaactttggtttatttagcatctacacttttgtcagttgtgttgctgttttccacccattttattatactcttaaaagatgtaattgttgtcattttgaacagttaaacatcttgagtataaaaagaaccccaatgttatgttatgctttgtaaatttttttttttgcttttacctagataaacttctagctaatcaaataaggaaagaaactgtctttttaaagcttcttttgtgttagatactgtattagagatctgcatttatcatgagttcctttttttttttaactttatttttgggaaagtaacacatgaagtagttcagtcatgtcaggtttgtctggggtggaatggaacagtcaggtagttgaaagtttttttttagagatgaaaagcttgtgaactcctgtaaaacatgctgtatttgaaatacatctgttaaaacttaaaaactaaagtgtgattttttttgttgttgttaagtttattgaagtttattcccttaatcagtgaaggacaacccttatttattacctagagcagttgtataattcgctgttagaaattttggtattgggacagtggataagcaggttatcacatagcatagaattcttaaaagatacatgtggggaaaagtagtctcaaataaaagctaatttctttg

SEQ ID NO: 192529 - DNA, 582 bp, Homo sapiens
  Payload ID: 18013
  Gene Name: transformer 2 alpha homolog (Drosophila)
  ENST ID: ENST00000448549
  CDS Start-End: 200-391
gtgctctgaggaggccaggagatttctggcggcgccggcgccattttgctggagcctgcgaccgagtgggagtggagtggagcggctgtggttgccgactctttcctcttccccacggtccagtcagcgggttaattaggccatcggccctcgagccgagacttgtctcttatttagttctggggagcgcctcgtcgacatgagtgatgtggaggaaaacaacttcgagggcagagttaatgttcgtgaagaaattgaagagttttttccaagaatgtggaagataaatcaagataaaagaaggctaatgaaaagagtctcgctctcagtcaaaatctccaacgggaactcctgctcgtgtaaaatcggagagcaggtcaggatctcgtagtccatcaagggtttccaaacactctgaatcccattctcgatcaagatcaaaatccaggtcgaggtcaaggagacattctcatagacgttacactcgatccagatcccactctcactctcataggagacgatctcgaagtagatcatatacaccagaataccggcggcgaaggagccgaagccattctccaa

SEQ ID NO: 192530 - DNA, 2142 bp, Homo sapiens
  Payload ID: 18013
  Gene Name: transformer 2 alpha homolog (Drosophila)
  Uniprot ID: Q13595
  ENST ID: ENST00000538367
  CDS Start-End: 822-1367
gcccgccccctttacgtcgtgctctgaggaggccaggagatttctggcggcgccggcgccattttgctggagcctgcgaccgagtgggagtggagtggagcggctgtggttgccgactctttcctcttccccacggtccagtcagcgggttaattaggccatcggccctcgagccgagacttgtctcttatttagttctggggagcgcctcgtcgacatgagtgatgtggaggaaaacaacttcgagggcagagttaatgttcgtgaagaaattgaagagttttttccaagaatgtggaagataaatcaagataaaagaaggctaatgaaaagtattaaagatcagaaaattaaaattgaatgggggaaaaaattgaacagaagattggtcagatagaagcacttgaatatttttttaaggctattttgaattgtttgaattggggaagaatacacgaagtatgaaaaatgaaaaactcaatgaagaatgaagagaagtagaaagcaagagtgaagtagaattaaaagaatctggaagaatgaatgggtcctaggagtctcgctctcagtcaaaatctccaacgggaactcctgctcgtgtaaaatcggagagcaggtcaggatctcgtagtccatcaagggtttccaaacactctgaatcccattctcgatcaagatcaaaatccaggtcgaggtcaaggagacattctcatagacgttacactcgatccagatcccactctcactctcataggagacgatctcgaagtagatcatatacaccagaataccggcggcgaaggagccgaagccattctccaatgtctaaccggagaagacatactggcagcagggcaaatccagatcccaacacttgccttggagtgtttggcctcagtttgtacacaacagagagggatcttcgtgaagtattttctcgatatggaccattgagtggtgtcaatgtggtttatgatcagcgaactgggcgatctcgaggatttgcttttgtgtattttgagagaatagatgactcaaaggaggctatggaaagggcaaatggaatggagctggatggtagaagaattcgggtggattattctataaccaagagagcgcacacaccaacaccaggcatctacatgggcagaccaactcatagtggtgggggtggtggaggaggcggcggcggtggaggtggaggtggtggcagacgtcgagattcttactatgatagaggatatgatcgtgggtatgacagatatgaagactatgattaccgatacagaagacgatcaccttctccttattatagtcgatatagatcacgatcaagatctcgttcctacagcccaagacgctattgataacggaatggttgcaattaaggacattttttttcctcttttttttttttttttttttaattctgagatttccccaagctgtggattcttcctactccttaagaaaaaaactttggtttatttagcatctacacttttgtcagttgtgttgctgttttccacccattttattatactcttaaaagatgtaattgttgtcattttgaacagttaaacatcttgagtataaaaagaaccccaatgttatgttatgctttgtaaatttttttttttgcttttacctagataaacttctagctaatcaaataaggaaagaaactgtctttttaaagcttcttttgtgttagatactgtattagagatctgcatttatcatgagttcctttttttttttaactttatttttgggaaagtaacacatgaagtagttcagtcatgtcaggtttgtctggggtggaatggaacagtcaggtagttgaaagtttttttttagagatgaaaagcttgtgaactcctgtaaaacatgctgtatttgaaatacatctgttaaaacttaaaaactaaagtgtgattttttttgttgttgttaagtttattgaagtttattcccttaatcagtgaaggacaacccttatttattacctagagcagttgtataattcgctgttagaaattttggtattgggacagtggataagcaggttatcacatagcatagaattcttaaaagatacatgtggggaaaagtagtctcaaataaaagctaatttctttg

SEQ ID NO: 192531 - DNA, 1931 bp, Homo sapiens
  Payload ID: 18013
  Gene Name: transformer 2 alpha homolog (Drosophila)
  Uniprot ID: Q13595
  ENST ID: ENST00000621813
  CDS Start-End: 611-1156
gcccgccccctttacgtcgtgctctgaggaggccaggagatttctggcggcgccggcgccattttgctggagcctgcgaccgagtgggagtggagtggagcggctgtggttgccgactctttcctcttccccacggtccagtcagcgggttaattaggccatcggccctcgagccgagacttgtctcttatttagttctggggagcgcctcgtcgacatgagtgatgtggaggaaaacaacttcgagggcagatgagcggccgcgtctctgttggaaccggcggcgttgcgtctaaaaaggcgaaagccttgaggttgaaggtgggacgagcctaatgaagtggagtctcgctctcagtcaaaatctccaacgggaactcctgctcgtgtaaaatcggagagcaggtcaggatctcgtagtccatcaagggtttccaaacactctgaatcccattctcgatcaagatcaaaatccaggtcgaggtcaaggagacattctcatagacgttacactcgatccagatcccactctcactctcataggagacgatctcgaagtagatcatatacaccagaataccggcggcgaaggagccgaagccattctccaatgtctaaccggagaagacatactggcagcagggcaaatccagatcccaacacttgccttggagtgtttggcctcagtttgtacacaacagagagggatcttcgtgaagtattttctcgatatggaccattgagtggtgtcaatgtggtttatgatcagcgaactgggcgatctcgaggatttgcttttgtgtattttgagagaatagatgactcaaaggaggctatggaaagggcaaatggaatggagctggatggtagaagaattcgggtggattattctataaccaagagagcgcacacaccaacaccaggcatctacatgggcagaccaactcatagtggtgggggtggtggaggaggcggcggcggtggaggtggaggtggtggcagacgtcgagattcttactatgatagaggatatgatcgtgggtatgacagatatgaagactatgattaccgatacagaagacgatcaccttctccttattatagtcgatatagatcacgatcaagatctcgttcctacagcccaagacgctattgataacggaatggttgcaattaaggacattttttttcctcttttttttttttttttttttaattctgagatttccccaagctgtggattcttcctactccttaagaaaaaaactttggtttatttagcatctacacttttgtcagttgtgttgctgttttccacccattttattatactcttaaaagatgtaattgttgtcattttgaacagttaaacatcttgagtataaaaagaaccccaatgttatgttatgctttgtaaatttttttttttgcttttacctagataaacttctagctaatcaaataaggaaagaaactgtctttttaaagcttcttttgtgttagatactgtattagagatctgcatttatcatgagttcctttttttttttaactttatttttgggaaagtaacacatgaagtagttcagtcatgtcaggtttgtctggggtggaatggaacagtcaggtagttgaaagtttttttttagagatgaaaagcttgtgaactcctgtaaaacatgctgtatttgaaatacatctgttaaaacttaaaaactaaagtgtgattttttttgttgttgttaagtttattgaagtttattcccttaatcagtgaaggacaacccttatttattacctagagcagttgtataattcgctgttagaaattttggtattgggacagtggataagcaggttatcacatagcatagaattcttaaaagatacatgtggggaaaagtagtctcaaataaaagctaatttctttg

SEQ ID NO: 192532 - DNA, 943 bp, Homo sapiens
  Payload ID: 18014
  Gene Name: transformer 2 beta homolog (Drosophila)
  ENST ID: ENST00000259043
  CDS Start-End: 1-383
gtcccattgccgatgtgtctattgtatatgaccagcagtctaggcgttcaagaggatttgcctttgtatattttgaaaatgtagatgatgccaaggaagctaaagaacgtgccaatggaatggagcttgatgggcgtaggatcagagttgatttctctataacaaaaagaccacatacgccaacaccaggaatttacatggggagacctacctatggcagctctcgccgtcgggattactatgacagaggatatgatcggggctatgatgatcgggactactatagcagatcatacagaaggcggtcaccttctccttactatagtcgtggaggatacagatcacgttccagatctcgatcatactcacctcgtcgctattaaagcatgaagactttctgaaacctgccctagagctgggatattgtttgtgggcaatattttttattgtctcttgtttaaaaagtgaacagtgcctagtgaagttaggtgacttttacaccttttacgatgactacttttggtggagttgaaatgctgttttcattctgcatttgtgtagtttggtgctttgttccaagttaagtgttttcagaaaagtatgttttgcatgtatttttttacagtctaaattttgactgctgagaagtttctattgtacaaaacttcatttaaaaggtttttctactgaatccagggtattctgaagatcgaagcctgtgtaaaatgctaccaaatggcaaaaagcaacaataaacagtttgatttttacttttctttctaacatatcaatgcttagcagaactattcagattgtcagtagtaaatttaaagacaaatgcccgttttcctccagtccatgaaacataccatacttatatacctgcaactaagtgtttaaaattatgctctgtaactctgtactgctagtattagaactaaaa

SEQ ID NO: 192533 - DNA, 288 bp, Homo sapiens
  Payload ID: 18014
  Gene Name: transformer 2 beta homolog (Drosophila)
  Uniprot ID: P62995
  ENST ID: ENST00000342294
  CDS Start-End: 154-270
gagcccgtgcggaggcggtgcggagcatttcggctctgagcggctgggcgaccggcgcgtcgtgcggggctgcggcggagcctccttaaggaaggtgcaagaggttggcagcttcgattgaagcacatcgaccggcgacagcagccaggagtcatgagcgacagcggcgagcagaactacggcgagcgggttaatgttgaagaaggaaaatgcggaagtcgtcatttgacaagttttataaatgagtatttgaagctcaggaataagtgaagctgaaatttgaaaaaa

SEQ ID NO: 192534 - DNA, 976 bp, Homo sapiens
  Payload ID: 18014
  Gene Name: transformer 2 beta homolog (Drosophila)
  Uniprot ID: P62995
  ENST ID: ENST00000382191
  CDS Start-End: 410-976
agagcgaggaggggcgaggccaagaaagcgcgcgtttctgggaggggaggagcctggctaaggagcgccgcgtcacatccggtagagttagagcccgtgcggaggcggtgcggagcatttcggctctgagcggctgggcgaccggcgcgtcgtgcggggctgcggcggagcctccttaaggaaggtgcaagaggttggcagcttcgattgaagcacatcgaccggcgacagcagccaggagtcatgagcgacagcggcgagcagaactacggcgagcgggtctagatccagaagaagctcccgaaggcattatacccggtcacggtctcgctcccgctcccatagacgatcacgtagcaggtcttacagtcgagattatcgtagacggcacagccacagccattctcccatgtctactcgcaggcgtcatgttgggaatcgggcaaatcctgatcctaactgttgtcttggagtatttgggctgagcttgtacaccacagaaagagatctaagagaagtgttctctaaatatggtcccattgccgatgtgtctattgtatatgaccagcagtctaggcgttcaagaggatttgcctttgtatattttgaaaatgtagatgatgccaaggaagctaaagaacgtgccaatggaatggagcttgatgggcgtaggatcagagttgatttctctataacaaaaagaccacatacgccaacaccaggaatttacatggggagacctacctatggcagctctcgccgtcgggattactatgacagaggatatgatcggggctatgatgatcgggactactatagcagatcatacagaggaggaggtggaggaggaggaggatggagagctgcccaagacagggatcagatttatagaaggcggtcaccttctccttactatagtcgtggaggatacagatcacgttccagatctcgatcatactcacctcgtcgctattaa

SEQ ID NO: 192535 - DNA, 710 bp, Homo sapiens
  Payload ID: 18014
  Gene Name: transformer 2 beta homolog (Drosophila)
  ENST ID: ENST00000414862
  CDS Start-End: 1-323
gaatggagcttgatgggcgtaggatcagagttgatttctctataacaaaaagaccacatacgccaacaccaggaatttacatggggagacctacctatggcagctctcgccgtcgggattactatgacagaggatatgatcggggctatgatgatcgggactactatagcagatcatacagaggaggaggtggaggaggaggaggatggagagctgcccaagacagggatcagatttataggcggtcaccttctccttactatagtcgtggaggatacagatcacgttccagatctcgatcatactcacctcgtcgctattaaagcatgaagactttctgaaacctgccctagagctgggatattgtttgtgggcaatattttttattgtctcttgtttaaaaagtgaacagtgcctagtgaagttaggtgacttttacaccttttacgatgactacttttggtggagttgaaatgctgttttcattctgcatttgtgtagtttggtgctttgttccaagttaagtgttttcagaaaagtatgttttgcatgtatttttttacagtctaaattttgactgctgagaagtttctattgtacaaaacttcatttaaaaggtttttctactgaatccagggtattctgaagatcgaagcctgtgtaaaatgctaccaaatggcaaaaagcaacaataaacagtttgattttta

SEQ ID NO: 192536 - DNA, 1697 bp, Homo sapiens
  Payload ID: 18014
  Gene Name: transformer 2 beta homolog (Drosophila)
  Uniprot ID: P62995
  ENST ID: ENST00000456380
  CDS Start-End: 170-286
acatccggtagagttagagcccgtgcggaggcggtgcggagcatttcggctctgagcggctgggcgaccggcgcgtcgtgcggggctgcggcggagcctccttaaggaaggtgcaagaggttggcagcttcgattgaagcacatcgaccggcgacagcagccaggagtcatgagcgacagcggcgagcagaactacggcgagcgggttaatgttgaagaaggaaaatgcggaagtcgtcatttgacaagttttataaatgagtatttgaagctcaggaataagtgaagctgaaatttgaaaaaataaaagaaagaatgcatgctaattatcagaccagaagtcccacttgtagaatattgagcaatttgtgtgaagtggggaagatgaaagaagtcagaatttgaaacggaagaatgaagaaaagaaataaaaatgaagttaagataagaagtaatctggaatcagaaagcactacgctaagaatcccgttctgcttccagaagtggaagtgctcacggatcggggaaatctgcaaggcatacccctgcaaggtctcgctccaaggaagattccaggcgttccagatcaaagtccaggtcccgatctgaatctaggtctagatccagaagaagctcccgaaggcattatacccggtcacggtctcgctcccgctcccatagacgatcacgtagcaggtcttacagtcgagattatcgtagacggcacagccacagccattctcccatgtctactcgcaggcgtcatgttgggaatcgggcaaatcctgatcctaactgttgtcttggagtatttgggctgagcttgtacaccacagaaagagatctaagagaagtgttctctaaatatggtcccattgccgatgtgtctattgtatatgaccagcagtctaggcgttcaagaggatttgcctttgtatattttgaaaatgtagatgatgccaaggaagctaaagaacgtgccaatggaatggagcttgatgggcgtaggatcagagttgatttctctataacaaaaagaccacatacgccaacaccaggaatttacatggggagacctacctatggcagctctcgccgtcgggattactatgacagaggatatgatcggggctatgatgatcgggactactatagcagatcatacagaggaggaggtggaggaggaggaggatggagagctgcccaagacagggatcagatttatagaaggcggtcaccttctccttactatagtcgtggaggatacagatcacgttccagatctcgatcatactcacctcgtcgctattaaagcatgaagactttctgaaacctgccctagagctgggatattgtttgtgggcaatattttttattgtctcttgtttaaaaagtgaacagtgcctagtgaagttaggtgacttttacaccttttacgatgactacttttggtggagttgaaatgctgttttcattctgcatttgtgtagtttggtgctttgttccaagttaagtgttttcagaaaagtatgttttgcatgtatttttttacagtctaaattttgactgctgagaagtttctattgtacaaaacttcatttaaaaggtttttctactgaatccagggtattctgaagatcgaagcctgtgtaaaatgctaccaaatggcaaaaagcaacaataaacagtttgatttt

SEQ ID NO: 192537 - DNA, 2952 bp, Homo sapiens
  Payload ID: 18014
  Gene Name: transformer 2 beta homolog (Drosophila)
  Uniprot ID: P62995
  ENST ID: ENST00000453386
  CDS Start-End: 277-1143
gtgcgggacgcgctgcagctggagaggaaaggcagagcgaggaggggcgaggccaagaaagcgcgcgtttctgggaggggaggagcctggctaaggagcgccgcgtcacatccggtagagttagagcccgtgcggaggcggtgcggagcatttcggctctgagcggctgggcgaccggcgcgtcgtgcggggctgcggcggagcctccttaaggaaggtgcaagaggttggcagcttcgattgaagcacatcgaccggcgacagcagccaggagtcatgagcgacagcggcgagcagaactacggcgagcgggaatcccgttctgcttccagaagtggaagtgctcacggatcggggaaatctgcaaggcatacccctgcaaggtctcgctccaaggaagattccaggcgttccagatcaaagtccaggtcccgatctgaatctaggtctagatccagaagaagctcccgaaggcattatacccggtcacggtctcgctcccgctcccatagacgatcacgtagcaggtcttacagtcgagattatcgtagacggcacagccacagccattctcccatgtctactcgcaggcgtcatgttgggaatcgggcaaatcctgatcctaactgttgtcttggagtatttgggctgagcttgtacaccacagaaagagatctaagagaagtgttctctaaatatggtcccattgccgatgtgtctattgtatatgaccagcagtctaggcgttcaagaggatttgcctttgtatattttgaaaatgtagatgatgccaaggaagctaaagaacgtgccaatggaatggagcttgatgggcgtaggatcagagttgatttctctataacaaaaagaccacatacgccaacaccaggaatttacatggggagacctacctatggcagctctcgccgtcgggattactatgacagaggatatgatcggggctatgatgatcgggactactatagcagatcatacagaggaggaggtggaggaggaggaggatggagagctgcccaagacagggatcagatttatagaaggcggtcaccttctccttactatagtcgtggaggatacagatcacgttccagatctcgatcatactcacctcgtcgctattaaagcatgaagactttctgaaacctgccctagagctgggatattgtttgtgggcaatattttttattgtctcttgtttaaaaagtgaacagtgcctagtgaagttaggtgacttttacaccttttacgatgactacttttggtggagttgaaatgctgttttcattctgcatttgtgtagtttggtgctttgttccaagttaagtgttttcagaaaagtatgttttgcatgtatttttttacagtctaaattttgactgctgagaagtttctattgtacaaaacttcatttaaaaggtttttctactgaatccagggtattctgaagatcgaagcctgtgtaaaatgctaccaaatggcaaaaagcaacaataaacagtttgatttttacttttctttctaacatatcaatgcttagcagaactattcagattgtcagtagtaaatttaaagacaaatgcccgttttcctccagtccatgaaacataccatacttatatacctgcaactaagtgtttaaaattatgctctgtaactctgtactgctagtattagaactaaaaatcttaaaatacagccagtgcttaatgcttatatcaatgtggatttgtcggcttttatgtaatctgtaatatgtatagcaggaaatacgaagagttacacagtgtatgccttaaaaggctgtttcttaaaggtgttacaaggggataatggtatttcaactagttatcagcaagtgacaatacattccaccacaaatacactcttgttcttctagcttttagactatatgaaaaaaccgggtgcttcaaagtacatgataagggaacactatacctgtcatggatgaactgaagactttgcctgttcattttttaaatattattttcaggtcctttgcttaccaaaggaggcccaatttcactcaaatgttttgagaactgtgtttaaataaacgcaaatgaaaagaaaaatgttggtgcagctgttcacaaagaagtgttcttgttctattataattagagttcttctgtagtttaatcgttagggcagtgtgttccttgggctgaggtgtatctttgctattttgggctgggttgagggggggatgaatttctgtattcctggaaaattcagagtgcataactaggtattagagtgatctccatttggggatggagttacagtaaataactagactgcgggtactttaatacatgttcttattattttgcatttaagtaattttcatgaccaattgtagggatgttgctacaggtgggttattttgttgccttgctaacctttatcgcatctaggtattagtatgtttcaggtactttgggaagaactttacatataatctttagcaatgaaatgatgtagagtaacttaccttagttcaaatagctgtttaagtggcaatgccacgatctgaattgaacctaggtgatcttagtccacagttctcttgatcatgatgtctcaaatctgggtacctgggtgatggaaaataccagtaatggagcataggcagtattggcaggtcttaatttgtaaaacttactgtccagggtgttttcagtgtttgccaacttgtggtaaattaatatgcttagagaactacccttaggtttgtttctgataagcatgtggaaacaacttagtatatgcctgatgggttatttcaaattgttctcaatgagttttgaaacaagaatttgtagtatttatatataaagttgagttttagggtgtggtcccagagggggttgtgttatggatggatacattaaaggctgagaaacctgg

SEQ ID NO: 192538 - DNA, 1773 bp, Homo sapiens
  Payload ID: 18015
  Gene Name: transforming growth factor beta 1 induced transcript 1
  Uniprot ID: O43294
  ENST ID: ENST00000361773
  CDS Start-End: 55-1389
ggggccggatccccggatgccctgctctctgacctggagactaccacctcgcacatgccaaggtcaggggctcccaaagagcgccctgcggagcctctcacccctcccccatcctatggccaccagccacagacagggtctggggagtcttcaggagcctcgggggacaaggaccacctgtacagcacggtatgcaagcctcggtccccaaagcctgcagccccggcggcccctccattctcctcttccagcggtgtcttgggtaccgggctctgtgagctagatcggttgcttcaggaacttaatgccactcagttcaacatcacagatgaaatcatgtctcagttcccatctagcaaggtggcttcaggagagcagaaggaggaccagtctgaagataagaaaagacccagcctcccttccagcccgtctcctggcctcccaaaggcttctgccacctcagccactctggagctggatagactgatggcctcactctctgacttccgcgttcaaaaccatcttccagcctctgggccaactcagccaccggtggtgagctccacaaatgagggctccccatccccaccagagccgactggcaagggcagcctagacaccatgctggggctgctgcagtccgacctcagccgccggggtgttcccacccaggccaaaggcctctgtggctcctgcaataaacctattgctgggcaagtggtgacggctctgggccgcgcctggcaccccgagcacttcgtttgcggaggctgttccaccgccctgggaggcagcagcttcttcgagaaggatggagcccccttctgccccgagtgctactttgagcgcttctcgccaagatgtggcttctgcaaccagcccatccgacacaagatggtgaccgccttgggcactcactggcacccagagcatttctgctgcgtcagttgcggggagcccttcggagatgagggtttccacgagcgcgagggccgcccctactgccgccgggacttcctgcagctgttcgccccgcgctgccagggctgccagggccccatcctggataactacatctcggcgctcagcgcgctctggcacccggactgtttcgtctgcagggaatgcttcgcgcccttctcgggaggcagctttttcgagcacgagggccgcccgttgtgcgagaaccacttccacgcacgacgcggctcgctgtgcgccacgtgtggcctccctgtgaccggccgctgcgtgtcggccctgggtcgccgcttccacccggaccacttcacatgcaccttctgcctgcgcccgctcaccaaggggtccttccaggagcgcgccggcaagccctactgccagccctgcttcctgaagctcttcggctgacagcccgctcggctcgccctctcccccggaggccgcgccctcccggaaaagccgggtcctccagaccccgaggccttgctctcagagcgggaggccccacccactggagagccccgcccctaaggtactatgagtcctcaggggtcaagttcagaaacggcccagccagacctaaacccacacgcccacaaagtggattgcacacagacaagaactcccgtgcgggcctccactctattcccacccttgagggagcccccttactgggggagggtccttgcaattccagcgaatcggaggccaggccaggacgtccttgctccctgcaccctcactgttctgtgcactttttctacctacataaacacacgcattccacctctc

SEQ ID NO: 192539 - DNA, 1803 bp, Homo sapiens
  Payload ID: 18015
  Gene Name: transforming growth factor beta 1 induced transcript 1
  Uniprot ID: O43294
  ENST ID: ENST00000394858
  CDS Start-End: 85-1419
ggagaataaaataatcaggaggctgggtttgtgcttggctccaagcatgccctgctctctgacctggagactaccacctcgcacatgccaaggtcaggggctcccaaagagcgccctgcggagcctctcacccctcccccatcctatggccaccagccacagacagggtctggggagtcttcaggagcctcgggggacaaggaccacctgtacagcacggtatgcaagcctcggtccccaaagcctgcagccccggcggcccctccattctcctcttccagcggtgtcttgggtaccgggctctgtgagctagatcggttgcttcaggaacttaatgccactcagttcaacatcacagatgaaatcatgtctcagttcccatctagcaaggtggcttcaggagagcagaaggaggaccagtctgaagataagaaaagacccagcctcccttccagcccgtctcctggcctcccaaaggcttctgccacctcagccactctggagctggatagactgatggcctcactctctgacttccgcgttcaaaaccatcttccagcctctgggccaactcagccaccggtggtgagctccacaaatgagggctccccatccccaccagagccgactggcaagggcagcctagacaccatgctggggctgctgcagtccgacctcagccgccggggtgttcccacccaggccaaaggcctctgtggctcctgcaataaacctattgctgggcaagtggtgacggctctgggccgcgcctggcaccccgagcacttcgtttgcggaggctgttccaccgccctgggaggcagcagcttcttcgagaaggatggagcccccttctgccccgagtgctactttgagcgcttctcgccaagatgtggcttctgcaaccagcccatccgacacaagatggtgaccgccttgggcactcactggcacccagagcatttctgctgcgtcagttgcggggagcccttcggagatgagggtttccacgagcgcgagggccgcccctactgccgccgggacttcctgcagctgttcgccccgcgctgccagggctgccagggccccatcctggataactacatctcggcgctcagcgcgctctggcacccggactgtttcgtctgcagggaatgcttcgcgcccttctcgggaggcagctttttcgagcacgagggccgcccgttgtgcgagaaccacttccacgcacgacgcggctcgctgtgcgccacgtgtggcctccctgtgaccggccgctgcgtgtcggccctgggtcgccgcttccacccggaccacttcacatgcaccttctgcctgcgcccgctcaccaaggggtccttccaggagcgcgccggcaagccctactgccagccctgcttcctgaagctcttcggctgacagcccgctcggctcgccctctcccccggaggccgcgccctcccggaaaagccgggtcctccagaccccgaggccttgctctcagagcgggaggccccacccactggagagccccgcccctaaggtactatgagtcctcaggggtcaagttcagaaacggcccagccagacctaaacccacacgcccacaaagtggattgcacacagacaagaactcccgtgcgggcctccactctattcccacccttgagggagcccccttactgggggagggtccttgcaattccagcgaatcggaggccaggccaggacgtccttgctccctgcaccctcactgttctgtgcactttttctacctacataaacacacgcattccacctctc

SEQ ID NO: 192540 - DNA, 1898 bp, Homo sapiens
  Payload ID: 18015
  Gene Name: transforming growth factor beta 1 induced transcript 1
  Uniprot ID: O43294
  ENST ID: ENST00000394863
  CDS Start-End: 131-1516
atctcagcgggtcccggcttccttacatggtcacggccgggcttccagctcccggacgtcccccgccccccgcccccaccggacacggcccccgccctgttcgccccgcgccaccggcccgcgccccgccatggaggacctggatgccctgctctctgacctggagactaccacctcgcacatgccaaggtcaggggctcccaaagagcgccctgcggagcctctcacccctcccccatcctatggccaccagccacagacagggtctggggagtcttcaggagcctcgggggacaaggaccacctgtacagcacggtatgcaagcctcggtccccaaagcctgcagccccggcggcccctccattctcctcttccagcggtgtcttgggtaccgggctctgtgagctagatcggttgcttcaggaacttaatgccactcagttcaacatcacagatgaaatcatgtctcagttcccatctagcaaggtggcttcaggagagcagaaggaggaccagtctgaagataagaaaagacccagcctcccttccagcccgtctcctggcctcccaaaggcttctgccacctcagccactctggagctggatagactgatggcctcactctctgacttccgcgttcaaaaccatcttccagcctctgggccaactcagccaccggtggtgagctccacaaatgagggctccccatccccaccagagccgactggcaagggcagcctagacaccatgctggggctgctgcagtccgacctcagccgccggggtgttcccacccaggccaaaggcctctgtggctcctgcaataaacctattgctgggcaagtggtgacggctctgggccgcgcctggcaccccgagcacttcgtttgcggaggctgttccaccgccctgggaggcagcagcttcttcgagaaggatggagcccccttctgccccgagtgctactttgagcgcttctcgccaagatgtggcttctgcaaccagcccatccgacacaagatggtgaccgccttgggcactcactggcacccagagcatttctgctgcgtcagttgcggggagcccttcggagatgagggtttccacgagcgcgagggccgcccctactgccgccgggacttcctgcagctgttcgccccgcgctgccagggctgccagggccccatcctggataactacatctcggcgctcagcgcgctctggcacccggactgtttcgtctgcagggaatgcttcgcgcccttctcgggaggcagctttttcgagcacgagggccgcccgttgtgcgagaaccacttccacgcacgacgcggctcgctgtgcgccacgtgtggcctccctgtgaccggccgctgcgtgtcggccctgggtcgccgcttccacccggaccacttcacatgcaccttctgcctgcgcccgctcaccaaggggtccttccaggagcgcgccggcaagccctactgccagccctgcttcctgaagctcttcggctgacagcccgctcggctcgccctctcccccggaggccgcgccctcccggaaaagccgggtcctccagaccccgaggccttgctctcagagcgggaggccccacccactggagagccccgcccctaaggtactatgagtcctcaggggtcaagttcagaaacggcccagccagacctaaacccacacgcccacaaagtggattgcacacagacaagaactcccgtgcgggcctccactctattcccacccttgagggagcccccttactgggggagggtccttgcaattccagcgaatcggaggccaggccaggacgtccttgctccctgcaccctcactgttctgtgcactttttctacctacataaacacacgcattccacctc

SEQ ID NO: 192541 - DNA, 1616 bp, Homo sapiens
  Payload ID: 18015
  Gene Name: transforming growth factor beta 1 induced transcript 1
  ENST ID: ENST00000564804
  CDS Start-End: 40-384
gatgccctgctctctgacctggagactaccacctcgcacatgccaaggtcaggggctcccaaagagcgccctgcggagcctctcacccctcccccatcctatggccaccagccacagacagggtctggggagtcttcaggagcctcgggggacaaggaccacctgtacagcacggtatgcaagcctcggtccccaaagcctgcagccccggcggcccctccattctcctcttccagcggtgtcttgggtaccgggctctgtgagctagatcggttgcttcaggaacttaatgccactcagttcaacatcacagcccttccagcccgtctcctggcctcccaaaggcttctgccacctcagccactctggagctggatagactgatggcctcactctctgacttccgcgttcaaaaccatcttccagcctctgggccaactcagccaccggtggtgagctccacaaatgagggctccccatccccaccagagccgactggcaagggcagcctagacaccatgctggggctgctgcagtccgacctcagccgccggggtgttcccacccaggccaaaggcctctgtggctcctgcaataaacctattgctgggcaagtggtgacggctctgggccgcgcctggcaccccgagcacttcgtttgcggaggctgttccaccgccctgggaggcagcagcttcttcgagaaggatggagcccccttctgccccgagtgctactttgagcgcttctcgccaagatgtggcttctgcaaccagcccatccgacacaagatggtgaccgccttgggcactcactggcacccagagcatttctgctgcgtcagttgcggggagcccttcggagatgagggtttccacgagcgcgagggccgcccctactgccgccgggacttcctgcagctgttcgccccgcgctgccagggctgccagggccccatcctggataactacatctcggcgctcagcgcgctctggcacccggactgtttcgtctgcagggaatgcttcgcgcccttctcgggaggcagctttttcgagcacgagggccgcccgttgtgcgagaaccacttccacgcacgacgcggctcgctgtgcgccacgtgtggcctccctgtgaccggccgctgcgtgtcggccctgggtcgccgcttccacccggaccacttcacatgcaccttctgcctgcgcccgctcaccaaggggtccttccaggagcgcgccggcaagccctactgccagccctgcttcctgaagctcttcggctgacagcccgctcggctcgccctctcccccggaggccgcgccctcccggaaaagccgggtcctccagaccccgaggccttgctctcagagcgggaggccccacccactggagagccccgcccctaaggtactatgagtcctcaggggtcaagttcagaaacggcccagccagacctaaacccacacgcccacaaagtggattgcacacagacaagaactcccgtgcgggcctccactctattcccacccttgagggagcccccttactgggggagggtccttgcaattccagcgaatcggaggccaggccaggacgtccttgctccctgcacc

SEQ ID NO: 192542 - DNA, 684 bp, Homo sapiens
  Payload ID: 18015
  Gene Name: transforming growth factor beta 1 induced transcript 1
  ENST ID: ENST00000565360
  CDS Start-End: 35-684
gccaccggcccgcgccccgccatggaggacctggatgccctgctctctgacctggagactaccacctcgcacatgccaaggtcaggggctcccaaagagcgccctgcggagcctctcacccctcccccatcctatggccaccagccacagcacggtatgcaagcctcggtccccaaagcctgcagccccggcggcccctccattctcctcttccagcggtgtcttgggtaccgggctctgtgagctagatcggttgcttcaggaacttaatgccactcagttcaacatcacagatgaaatcatgtctcagttcccatctagcaaggtggcttcaggagagcagaaggaggaccagtctgaagataagaaaagacccagcctcccttccagcccgtctcctggcctcccaaaggcttctgccacctcagccactctggagctggatagactgatggcctcactctctgacttccgcgttcaaaaccatcttccagcctctgggccaactcagccaccggtggtgagctccacaaatgagggctccccatccccaccagagccgactggcaagggcagcctagacaccatgctggggctgctgcagtccgacctcagccgccggggtgttcccacccaggccaaaggcctctgtggctcctgcaataaacctattgctgggcaagt

SEQ ID NO: 192543 - DNA, 1453 bp, Homo sapiens
  Payload ID: 18015
  Gene Name: transforming growth factor beta 1 induced transcript 1
  ENST ID: ENST00000567066
  CDS Start-End: 160-318
gttcccccgttcatcgcccccccatccccatctcagcgggtcccggcttccttacatggtcacggccgggcttccagctcccggacgtcccccgccccccgcccccaccggacacggcccccgccctgttcgccccgcgccaccggcccgcgccccgccatggaggacctggacagggtctggggagtcttcaggagcctcgggggacaaggaccacctgtacagcacggtatgcaagcctcggtccccaaagcctgcagccccggcggcccctccattctcctcttccagcggtgtcttgggtaccgggctctgtgagctagatcggttgcttcaggaacttaatgccactcagttcaacatcacagatgaaatcatgtctcagttcccatctagcaaggtggcttcaggagagcagaaggaggaccagtctgaagataagaaaagacccagcctcccttccagcccgtctcctggcctcccaaaggcttctgccacctcagccactctggagctggatagactgatggcctcactctctgacttccgcgttcaaaaccatcttccagcctctgggccaactcagccaccggtggtgagctccacaaatgagggctccccatccccaccagagccgactggcaagggcagcctagacaccatgctggggctgctgcagtccgacctcagccgccggggtgttcccacccaggccaaaggcctctgtggctcctgcaataaacctattgctgggcaagtggtgacggctctgggccgcgcctggcaccccgagcacttcgtttgcggaggctgttccaccgccctgggaggcagcagcttcttcgagaaggatggagcccccttctgccccgagtgctactttgagcgcttctcgccaagatgtggcttctgcaaccagcccatccgacacaagatggtgaccgccttgggcactcactggcacccagagcatttctgctgcgtcagttgcggggagcccttcggagatgagggtttccacgagcgcgagggccgcccctactgccgccgggacttcctgcagctgttcgccccgcgctgccagggctgccagggccccatcctggataactacatctcggcgctcagcgcgctctggcacccggactgtttcgtctgcagggaatgcttcgcgcccttctcgggaggcagctttttcgagcacgagggccgcccgttgtgcgagaaccacttccacgcacgacgcggctcgctgtgcgccacgtgtggcctccctgtgaccggccgctgcgtgtcggccctgggtcgccgcttccacccggaccacttcacatgcaccttctgcctgcgcccgctcaccaaggggtccttccaggagcgcgccggcaagccctactgccagccctgcttcctgaagctcttcggctgacagcccgctcggctcgccctctcc

SEQ ID NO: 192544 - DNA, 668 bp, Homo sapiens
  Payload ID: 18015
  Gene Name: transforming growth factor beta 1 induced transcript 1
  ENST ID: ENST00000562566
  CDS Start-End: 400-668
agcatggaagagagagcgtccaatcagaaagctgagggccaggcactgggccaatggagcaatttggaggggagccaaatttggcttgggtgaagagcccattttgactgcatcagagaagatggggagaataaaataatcaggaggctgggtttgtgcttggctccaagcgtgagcaactgggatattctggtcataaatattccttgctacccttcgagcagtgctctgcctggctctggccctgtgacctcttctcttaatactggcttctgtccttctccagtactgcccactgggaaccttatcttctgatctaaccgtgacccttgtctctctccctgatggcctcttcctgcagatgccctgctctctgacctggagactaccacctcgcacatgccaaggtcaggggctcccaaagagcgccctgcggagcctctcacccctcccccatcctatggccaccagccacagacagggtctggggagtcttcaggagcctcgggggacaaggaccacctgtacagcacggtatgcaagcctcggtccccaaagcctgcagccccggcggcccctccattctcctcttccagcggtgtcttgggtaccgggctctgtgagctagatcggttgcttcaggaacttaatgccactcagttcaacat

SEQ ID NO: 192545 - DNA, 573 bp, Homo sapiens
  Payload ID: 18015
  Gene Name: transforming growth factor beta 1 induced transcript 1
  ENST ID: ENST00000565454
  CDS Start-End: 78-573
actgtgtctgtccccgtccctcagatttctttgtgtctgatgccctgctctctgacctggagactaccacctcgcacatgccaaggtcaggggctcccaaagagcgccctgcggagcctctcacccctcccccatcctatggccaccagccacagacagggtctggggagtcttcaggagcctcgggggacaaggaccacctgtacagcacggtatgcaagcctcggtccccaaagcctgcagccccggcggcccctccattctcctcttccagcggtgtcttgggtaccgggctctgtgagctagatcggttgcttcaggaacttaatgccactcagttcaacatcacagatgaaatcatgtctcagttcccatctagcaaggtggcttcaggagagcagaaggaggaccagtctgaagataagaaaagacccagcctcccttccagcccgtctcctggcctcccaaaggcttctgccacctcagccactctggagctggatagactgatggcctcactctctgacttccgcgttcaaaaccatcttccagcctctgggccaactcagccac

SEQ ID NO: 192546 - DNA, 1770 bp, Homo sapiens
  Payload ID: 18015
  Gene Name: transforming growth factor beta 1 induced transcript 1
  Uniprot ID: O43294
  ENST ID: ENST00000567607
  CDS Start-End: 54-1388
ggcctcttcctgcagatgccctgctctctgacctggagactaccacctcgcacatgccaaggtcaggggctcccaaagagcgccctgcggagcctctcacccctcccccatcctatggccaccagccacagacagggtctggggagtcttcaggagcctcgggggacaaggaccacctgtacagcacggtatgcaagcctcggtccccaaagcctgcagccccggcggcccctccattctcctcttccagcggtgtcttgggtaccgggctctgtgagctagatcggttgcttcaggaacttaatgccactcagttcaacatcacagatgaaatcatgtctcagttcccatctagcaaggtggcttcaggagagcagaaggaggaccagtctgaagataagaaaagacccagcctcccttccagcccgtctcctggcctcccaaaggcttctgccacctcagccactctggagctggatagactgatggcctcactctctgacttccgcgttcaaaaccatcttccagcctctgggccaactcagccaccggtggtgagctccacaaatgagggctccccatccccaccagagccgactggcaagggcagcctagacaccatgctggggctgctgcagtccgacctcagccgccggggtgttcccacccaggccaaaggcctctgtggctcctgcaataaacctattgctgggcaagtggtgacggctctgggccgcgcctggcaccccgagcacttcgtttgcggaggctgttccaccgccctgggaggcagcagcttcttcgagaaggatggagcccccttctgccccgagtgctactttgagcgcttctcgccaagatgtggcttctgcaaccagcccatccgacacaagatggtgaccgccttgggcactcactggcacccagagcatttctgctgcgtcagttgcggggagcccttcggagatgagggtttccacgagcgcgagggccgcccctactgccgccgggacttcctgcagctgttcgccccgcgctgccagggctgccagggccccatcctggataactacatctcggcgctcagcgcgctctggcacccggactgtttcgtctgcagggaatgcttcgcgcccttctcgggaggcagctttttcgagcacgagggccgcccgttgtgcgagaaccacttccacgcacgacgcggctcgctgtgcgccacgtgtggcctccctgtgaccggccgctgcgtgtcggccctgggtcgccgcttccacccggaccacttcacatgcaccttctgcctgcgcccgctcaccaaggggtccttccaggagcgcgccggcaagccctactgccagccctgcttcctgaagctcttcggctgacagcccgctcggctcgccctctcccccggaggccgcgccctcccggaaaagccgggtcctccagaccccgaggccttgctctcagagcgggaggccccacccactggagagccccgcccctaaggtactatgagtcctcaggggtcaagttcagaaacggcccagccagacctaaacccacacgcccacaaagtggattgcacacagacaagaactcccgtgcgggcctccactctattcccacccttgagggagcccccttactgggggagggtccttgcaattccagcgaatcggaggccaggccaggacgtccttgctccctgcaccctcactgttctgtgcactttttctacctacataaacacacgcattccacctc

SEQ ID NO: 192547 - DNA, 1302 bp, Homo sapiens
  Payload ID: 18015
  Gene Name: transforming growth factor beta 1 induced transcript 1
  ENST ID: ENST00000563712
  CDS Start-End: 36-221
cctgttcgccccgcgccaccggcccgcgccccgccatggaggacctggatgccctgctctctgacctggagactaccacctcgcacatgccaaggtcaggggctcccaaagagcgccctgcggagcctctcacccctcccccatcctatggccaccagccacagacagggtctggggagtcttcaggagcctcgggggacaaggaccacctgtacagatgaaatcatgtctcagttcccatctagcaaggtggcttcaggagagcagaaggaggaccagtctgaagataagaaaagacccagcctcccttccagcccgtctcctggcctcccaaaggcttctgccacctcagccactctggagctggatagactgatggcctcactctctgacttccgcgttcaaaaccatcttccagcctctgggccaactcagccaccggtggtgagctccacaaatgagggctccccatccccaccagagccgactggcaagggcagcctagacaccatgctggggctgctgcagtccgacctcagccgccggggtgttcccacccaggccaaaggcctctgtggctcctgcaataaacctattgctgggcaagtggtgacggctctgggccgcgcctggcaccccgagcacttcgtttgcggaggctgttccaccgccctgggaggcagcagcttcttcgagaaggatggagcccccttctgccccgagtgctactttgagcgcttctcgccaagatgtggcttctgcaaccagcccatccgacacaagatggtgaccgccttgggcactcactggcacccagagcatttctgctgcgtcagttgcggggagcccttcggagatgagggtttccacgagcgcgagggccgcccctactgccgccgggacttcctgcagctgttcgccccgcgctgccagggctgccagggccccatcctggataactacatctcggcgctcagcgcgctctggcacccggactgtttcgtctgcagggaatgcttcgcgcccttctcgggaggcagctttttcgagcacgagggccgcccgttgtgcgagaaccacttccacgcacgacgcggctcgctgtgcgccacgtgtggcctccctgtgaccggccgctgcgtgtcggccctgggtcgccgcttccacccggaccacttcacatgcaccttctgcctgcgcccgctcaccaaggggtccttccaggagcgcgccggcaagccctactgccagccctgcttcctgaagctcttcggctgacagcccgctcggctcgccctctcc

SEQ ID NO: 192548 - DNA, 4468 bp, Homo sapiens
  Payload ID: 18016
  Gene Name: transforming growth factor beta regulator 1
  ENST ID: ENST00000284290
  CDS Start-End: 210-692
agacacggaagtgctgggaggcgccgggagcccgttcggttgcgggtgtctctggccctgcggtcagccctgggaacgtcccggagagctagattcctagaggcccgattccgctagcccggaacagacaaagccagcgctcccgcccgctccccgacttaggatccgatgccggcagcgtcctggggcccccgtagcggggctggaccatgagcctgctggacggcctcgcttcctcgccgcgggctccgctgcagtccagcaaggccaggatgaaaaagctcccgaagaagagccagaatgagaagtaccggctgaagtacctgcggctgcgcaaagcggccaaggccacggtgtttgaaaatgctgctatttgtgatgaaattgctcgtcttgaggaaaaatttcttaaagcaaaagaagaaagaaggtacttgctaaagaagctcctccagcttcaggctctaactgaaggggaagtacaggctgcagctccttcccacagttccagtttgcccctgacttatggtgtggccagctctgtgggaactatacagggagctgggcctatttcagggcccagcactggggctgaggaaccatttgggaagaaaactaagaaggagaaaaaagaaaaaggcaaagagaacaacaaactggaagatcatcaccgaccgacctggctttcatgatgagagtgccatctaccccgtgggctattgcagtactcgaatatatgccagcatgaagtgcccagaccagaagtgtctatatacctgtcagatcaaggatggtggtgtgcagcctcagtttgaaattgttcctgaagatgacccccagaatgccattgtcagctcttctgcagatgcttgtcatgcagaactgctcaggactataagcactactatggggaaactaatgcctaacctgcttccagctggagctgacttttttggattttctcatccagccatccacaacctgatccagagctgtccaggagctcgaaaatgcatcaattaccagtgggtgaaatttgatgtgtgcaaacctggagatgggcagctacctgaggggctgccggagaatgatgcagctatgagctttgaagcctttcagagacagatctttgatgaagatcagaatgatccccttctgccaggatccttggacctcccagagcttcagcctgcagcctttgtgtcttcttaccagcccatgtacctgacacatgaacccttggtagatactcacctgcagcacttgaagtctccatcacagggtagcccaattcagtcttcagattgaacaagaagggatcagatgccacatcgtttttgtcgtgattaatttaacttaaactaaaattttgggtatatgaaagaaggcagcaattcagaagtaaagaagatactaacgtatttcatcatggaaggtcctgtggtgatggttttccctgggaaaaccttcagctgctttatttttagtaataaatttctcttgtcaattctgtttactttcatcttgtaatcgggatgtaatcttttttgcttagctctgcctgaggtaaagtaaacttcagcctcttataaacaagagtgatagagagctgcaggctgctacaacaaataccatagacaggttggtttataaataacatgaatttatttctcacagttctggatgctgggaagtccaagttcaaggagcgcagattcaatgtctggtgagggcccacttcctagttcttagacagctgtcttcctgcagtgtcctcacgtggtagaagaggaaggcagctctccggggtcccttttataagatcactaagccggttcatgagaggtctgctctcatgacctaatcacctcccaaaggccccacctcccaataccatcacattaggggttaggatttaacatgaattttggggacatataaacattaagtctgtagtagcagcagctgactaacgagggagatagggagattctgacaaacttctactcttgattgtgatcctaattcaaggaatatcaagtcccagcccctgcaacccaggctgctgcttaattttcatgtcagtatcatcaaaatccaatgttctgcttaaactcaagatggaaagtccagtccaaggtacactgttcatctttttcttcacattttgcacatccttcaaggggatctttaacctctttaacctttgtattgcacctcagataatgtgctttttagctcagtacactgaaaccatatgataacacaaattcacatataattgggggttagtcccatactctataacagacttagtcctgtcttttcattagccatgtaataatataactccatgttccatgcaactggatttttggaccctgttaatagcattaaggtagaggtttactctatcacctaacacctcaacactacctgtgggatgccttagttacccagcagcaggttaccaagggctgtctggaaagggagggacaaaaggacccagaagtagaagaatggggatggagtggtgagaattgaatggttaatgcactgccattcataattgccaattgaggacaacacaaatgggattggtactttatagtaataaatctgaccagcagagggagggatcaggcagcagtgtttagagcacaccacactggccactgtaaactgagaagctaagttaactggtattttatgattttgagtatagtctttttataagttgtatacactttacaatgtaaaagaaacaaactttgtataatagcaaatcgggaaggggactgcttaaaatgttaatgcagtgtttttctttttttctctgcataaatggcttgagcatactggcatttacacagaaatgatatatgctgcttttatcatataacaaatattttcccactattacagcctgagtaatacccgtattaaaagagcctcattttagaaagacatttaaaatttttggaacataccacatgtagaaaggttgaactggtttttcagctataatgcatatacaactatagtgtgtacgtataccacatatacatatacttgtatgaagatatgtgtaaaatgtttttactatggatcatggatttaagaaacttgaaaagctgggcacggtggctcacgcctgtaatcccagcactttgggaggctgaggcgggtggatcaagaggtcaggagatcgagaccatcctggctaagtcggtctctaataaaaatacaaaaaattagccaggcgtggtggcacgcgcctgtagtcccagctactcgggaggctgaggcaggaagaatcgcttgaacccgggaggcagaggttgcagtgagccgagaccgcgccactgcactccagcctgggcaacagagcaaaactccaactcaaaaacaaaaacaaaaacaccttgaaaaacactgccttagtatacttaaactatcttttcatctatcagattgttaaggattttttttaaatttgacaacatccagtgtcaatgagggtgagggcaaaaaaaggactaccttggtgagaatgtaagttgtttaatcctttgggagggttaagctgtagatatctaaattttaaatatatatttatcctcttccatgttaagaaccctaagaaataactggacgagtgtggtatgatgtttgcatgtgatattcattacagtattattttaatagtagaaaattgttaaaaatctatatgtccattaataggaaattggttaaataaaatgaggcttccacaaactgaaacactctaaatctatattctattatttacataagaaaattattttggtaaagtaagtaagtcaaaaacacagattacaaaataatatgtactgtataaaattatataactcaagtcaagtgaatggttcagcaaaatagtgtttctctgaatgatgaatttgggggtgatttttacttgcttatactttagtgtccaaattttctacagtgactataaatttcattttaaaactaaaaagttcttacatttggggaaatgcagtgaattcccacatcatgttttaaattactcagccactaaaaatgaatgtgcatggcgtcattaacataatcattgcctgaaccgtatttttcacactatgtactctaggttcctggaggtgaaaggaatctggacttagagttcttggctacctctggctgcccccgaattagaacagcccatgggggtatgtgtattgggagtggaggagtggacgggtagattgactttttctcaggcatcaatctgttacaaggttcatggtttctatggggccagatgcatgagaggtcaaagcatgggcaataggggttaactgaacgagttgaatgctaggaagtcctcaggggagccaacgttccttgtaaagtgtgtagattttttgttttttaactaaataaaatcttggcactgacaaagtta

SEQ ID NO: 192549 - DNA, 4004 bp, Homo sapiens
  Payload ID: 18016
  Gene Name: transforming growth factor beta regulator 1
  Uniprot ID: Q3YBR2
  ENST ID: ENST00000441174
  CDS Start-End: 205-1440
cggaagtgctgggaggcgccgggagcccgttcggttgcgggtgtctctggccctgcggtcagccctgggaacgtcccggagagctagattcctagaggcccgattccgctagcccggaacagacaaagccagcgctcccgcccgctccccgacttaggatccgatgccggcagcgtcctggggcccccgtagcggggctggaccatgagcctgctggacggcctcgcttcctcgccgcgggctccgctgcagtccagcaaggccaggatgaaaaagctcccgaagaagagccagaatgagaagtaccggctgaagtacctgcggctgcgcaaagcggccaaggccacggtgtttgaaaatgctgctatttgtgatgaaattgctcgtcttgaggaaaaatttcttaaagcaaaagaagaaagaaggtacttgctaaagaagctcctccagcttcaggctctaactgaaggggaagtacaggctgcagctccttcccacagttccagtttgcccctgacttatggtgtggccagctctgtgggaactatacagggagctgggcctatttcagggcccagcactggggctgaggaaccatttgggaagaaaactaagaaggagaaaaaagaaaaaggcaaagagaacaacaaactggaagttctgaagaaaacatgcaagaaaaagaaaatggcgggaggtgctcgcaagctggttcagcccattgccctggatccctcaggacggcctgtgttccccatcggactagggggtctaacagtatatagcctgggggagatcatcaccgaccgacctggctttcatgatgagagtgccatctaccccgtgggctattgcagtactcgaatatatgccagcatgaagtgcccagaccagaagtgtctatatacctgtcagatcaaggatggtggtgtgcagcctcagtttgaaattgttcctgaagatgacccccagaatgccattgtcagctcttctgcagatgcttgtcatgcagaactgctcaggactataagcactactatggggaaactaatgcctaacctgcttccagctggagctgacttttttggattttctcatccagccatccacaacctgatccagagctgtccaggagctcgaaaatgcatcaattaccagtgggtgaaatttgatgtgtgcaaacctggagatgggcagctacctgaggggctgccggagaatgatgcagctatgagctttgaagcctttcagagacagatctttgatgaagatcagaatgatccccttctgccaggatccttggacctcccagagcttcagcctgcagcctttgtgtcttcttaccagcccatgtacctgacacatgaacccttggtagatactcacctgcagcacttgaagtctccatcacagggtagcccaattcagtcttcagattgaacaagaagggatcagatgccacatcgtttttgtcgtgattaatttaacttaaactaaaattttgggtatatgaaagaaggcagcaattcagaagtaaagaagatactaacgtatttcatcatggaaggtcctgtggtgatggttttccctgggaaaaccttcagctgctttatttttagtaataaatttctcttgtcaattctgtttactttcatcttgtaatcgggatgtaatcttttttgcttagctctgcctgaggtaaagtaaacttcagcctcttataaacaagagtgatagagagctgcaggctgctacaacaaataccatagacaggttggtttataaataacatgaatttatttctcacagttctggatgctgggaagtccaagttcaaggagcgcagattcaatgtctggtgagggcccacttcctagttcttagacagctgtcttcctgcagtgtcctcacgtggtagaagaggaaggcagctctccggggtcccttttataagatcactaagccggttcatgagaggtctgctctcatgacctaatcacctcccaaaggccccacctcccaataccatcacattaggggttaggatttaacatgaattttggggacatataaacattaagtctgtagtagcagcagctgactaacgagggagatagggagattctgacaaacttctactcttgattgtgatcctaattcaaggaatatcaagtcccagcccctgcaacccaggctgctgcttaattttcatgtcagtatcatcaaaatccaatgttctgcttaaactcaagatggaaagtccagtccaaggtacactgttcatctttttcttcacattttgcacatccttcaaggggatctttaacctctttaacctttgtattgcacctcagataatgtgctttttagctcagtacactgaaaccatatgataacacaaattcacatataattgggggttagtcccatactctataacagacttagtcctgtcttttcattagccatgtaataatataactccatgttccatgcaactggatttttggaccctgttaatagcattaaggtagaggtttactctatcacctaacacctcaacactacctgtgggatgccttagttacccagcagcaggttaccaagggctgtctggaaagggagggacaaaaggacccagaagtagaagaatggggatggagtggtgagaattgaatggttaatgcactgccattcataattgccaattgaggacaacacaaatgggattggtactttatagtaataaatctgaccagcagagggagggatcaggcagcagtgtttagagcacaccacactggccactgtaaactgagaagctaagttaactggtattttatgattttgagtatagtctttttataagttgtatacactttacaatgtaaaagaaacaaactttgtataatagcaaatcgggaaggggactgcttaaaatgttaatgcagtgtttttctttttttctctgcataaatggcttgagcatactggcatttacacagaaatgatatatgctgcttttatcatataacaaatattttcccactattacagcctgagtaatacccgtattaaaagagcctcattttagaaagacatttaaaatttttggaacataccacatgtagaaaggttgaactggtttttcagctataatgcatatacaactatagtgtgtacgtataccacatatacatatacttgtatgaagatatgtgtaaaatgtttttactatggatcatggatttaagaaacttgaaaagctgggcacggtggctcacgcctgtaatcccagcactttgggaggctgaggcgggtggatcaagaggtcaggagatcgagaccatcctggctaagtcggtctctaataaaaatacaaaaaattagccaggcgtggtggcacgcgcctgtagtcccagctactcgggaggctgaggcaggaagaatcgcttgaacccgggaggcagaggttgcagtgagccgagaccgcgccactgcactccagcctgggcaacagagcaaaactccaactcaaaaacaaaaacaaaaacaccttgaaaaacactgccttagtatacttaaactatcttttcatctatcagattgttaaggattttttttaaatttgacaacatccagtgtcaatgagggtgagggcaaaaaaaggactaccttggtgagaatgtaagttgtttaatcctttgggagggttaagctgtagatatctaaattttaaatatatatttatcctcttccatgttaagaaccctaagaaataactggacgagtgtggtatgatgtttgcatgtgatattcattacagtattattttaatagtagaaaattgttaaaaatctatatgtccattaataggaaattggttaaataaaatgaggcttccacaaactgaaacactctaaatctatattctattatttacataagaaaattattttggtaaagtaagtaagtcaaaaacacagattacaaaataatatgta

SEQ ID NO: 192550 - DNA, 552 bp, Homo sapiens
  Payload ID: 18016
  Gene Name: transforming growth factor beta regulator 1
  ENST ID: ENST00000531667
  CDS Start-End: 215-552
aagacagacacggaagtgctgggaggcgccgggagcccgttcggttgcgggtgtctctggccctgcggtcagccctgggaacgtcccggagagctagattcctagaggcccgattccgctagcccggaacagacaaagccagcgctcccgcccgctccccgacttaggatccgatgccggcagcgtcctggggcccccgtagcggggctggaccatgagcctgctggacggcctcgcttcctcgccgcgggctccgctgcagtccagcaaggccaggatgaaaaagctcccgaagaagagccagaatgagaagtaccggctgaagtacctgcggctgcgcaaagcggccaaggccacggtgtttatcatcaccgaccgacctggctttcatgatgagagtgccatctaccccgtgggctattgcagtactcgaatatatgccagcatgaagtgcccagaccagaagtgtctatatacctgtcagatcaaggatggtggtgtgcagcctcagtttgaaattgttcctgaagatgacccccagaatgccattgt

SEQ ID NO: 192551 - DNA, 1571 bp, Homo sapiens
  Payload ID: 18016
  Gene Name: transforming growth factor beta regulator 1
  ENST ID: ENST00000530731
  CDS Start-End: 224-706
cttacttccaagacagacacggaagtgctgggaggcgccgggagcccgttcggttgcgggtgtctctggccctgcggtcagccctgggaacgtcccggagagctagattcctagaggcccgattccgctagcccggaacagacaaagccagcgctcccgcccgctccccgacttaggatccgatgccggcagcgtcctggggcccccgtagcggggctggaccatgagcctgctggacggcctcgcttcctcgccgcgggctccgctgcagtccagcaaggccaggatgaaaaagctcccgaagaagagccagaatgagaagtaccggctgaagtacctgcggctgcgcaaagcggccaaggccacggtgtttgaaaatgctgctatttgtgatgaaattgctcgtcttgaggaaaaatttcttaaagcaaaagaagaaagaaggtacttgctaaagaagctcctccagcttcaggctctaactgaaggggaagtacaggctgcagctccttcccacagttccagtttgcccctgacttatggtgtggccagctctgtgggaactatacagggagctgggcctatttcagggcccagcactggggctgaggaaccatttgggaagaaaactaagaaggagaaaaaagaaaaaggcaaagagaacaacaaactggaagatcatcaccgaccgacctggctttcatgatgagagtgccatctaccccgtgggctattgcagtactcgaatatatgccagcatgaagtgcccagaccagaagtgtctatatacctgtcagatcaaggatggtggtgtgcagcctcagtttgaaattgttcctgaagatgacccccagaatgccattgtcagctcttctgcagatgcttgtcatgcagaactgctcaggactataagcactactatggggaaactaatgcctaacctgcttccagctggagctgacttttttggattttctcatccagccatccacaacctgatccagagctgtccaggagctcgaaaatgcatcaaataactctcaagggtgatttcccttgattctgcagttaccagtgggtgaaatttgatgtgtgcaaacctggagatgggcagctacctgaggggctgccggagaatgatgcagctatgagctttgaagcctttcagagacagatctttgatgaagatcagaatgatccccttctgccaggatccttggacctcccagagcttcagcctgcagcctttgtgtcttcttaccagcccatgtacctgacacatgaacccttggtagatactcacctgcagcacttgaagtctccatcacagggtagcccaattcagtcttcagattgaacaagaagggatcagatgccacatcgtttttgtcgtgattaatttaacttaaactaaaattttgggtatatgaaagaaggcagcaattcagaagtaaagaagatactaacgtatttcatcatggaaggtcctgtggtgatggttttccctgggaaaaccttcagctgctttatttttagtaataaatttctcttgtcaattctgtttactttca

SEQ ID NO: 192552 - DNA, 2142 bp, Homo sapiens
  Payload ID: 18016
  Gene Name: transforming growth factor beta regulator 1
  ENST ID: ENST00000529543
  CDS Start-End: 91-396
cggaacagacaaagccagcgctcccgcccgctccccgacttaggatccgatgccggcagcgtcctggggcccccgtagcggggctggaccatgagcctgctggacggcctcgcttcctcgccgcgggctccgctgcagtccagcaaggccaggatgaaaaagctcccgaagaagagccagaatgagaagtaccggctgaagtacctgcggctgcgcaaagcggccaaggccacggtgtttgaaaatgctgctatttgtgatgaaattgctcgtcttgaggaaaaatttcttaaagcaaaagaagaaagaagatcatcaccgaccgacctggctttcatgatgagagtgccatctaccccgtgggctattgcagtactcgaatatatgccagcatgaagtgcccagaccagaagtgtctatatacctgtcagatcaaggatggtggtgtgcagcctcagtttgaaattgttcctgaagatgacccccagaatgccattgtcagctcttctgcagatgcttgtcatgcagaactgctcaggactataagcactactatggggaaactaatgcctaacctgcttccagctggagctgacttttttggattttctcatccagccatccacaacctgatccagagctgtccaggagctcgaaaatgcatcaattaccagtgggtgaaatttgatgtgtgcaaacctggagatgggcagctacctgaggggctgccggagaatgatgcagctatgagctttgaagcctttcagagacagatctttgatgaagatcagaatgatccccttctgccaggatccttggacctcccagagcttcagcctgcagcctttgtgtcttcttaccagcccatgtacctgacacatgaacccttggtagatactcacctgcagcacttgaagtctccatcacagggtagcccaattcagtcttcagattgaacaagaagggatcagatgccacatcgtttttgtcgtgattaatttaacttaaactaaaattttgggtatatgaaagaaggcagcaattcagaagtaaagaagatactaacgtatttcatcatggaaggtcctgtggtgatggttttccctgggaaaaccttcagctgctttatttttagtaataaatttctcttgtcaattctgtttactttcatcttgtaatcgggatgtaatcttttttgcttagctctgcctgaggtaaagtaaacttcagcctcttataaacaagagtgatagagagctgcaggctgctacaacaaataccatagacaggttggtttataaataacatgaatttatttctcacagttctggatgctgggaagtccaagttcaaggagcgcagattcaatgtctggtgagggcccacttcctagttcttagacagctgtcttcctgcagtgtcctcacgtggtagaagaggaaggcagctctccggggtcccttttataagatcactaagccggttcatgagaggtctgctctcatgacctaatcacctcccaaaggccccacctcccaataccatcacattaggggttaggatttaacatgaattttggggacatataaacattaagtctgtagtagcagcagctgactaacgagggagatagggagattctgacaaacttctactcttgattgtgatcctaattcaaggaatatcaagtcccagcccctgcaacccaggctgctgcttaattttcatgtcagtatcatcaaaatccaatgttctgcttaaactcaagatggaaagtccagtccaaggtacactgttcatctttttcttcacattttgcacatccttcaaggggatctttaacctctttaacctttgtattgcacctcagataatgtgctttttagctcagtacactgaaaccatatgataacacaaattcacatataattgggggttagtcccatactctataacagacttagtcctgtcttttcattagccatgtaataatataactccatgttccatgcaactggatttttggaccctgttaatagcattaaggtagaggtttactctatcacctaacacctcaacactacctgtgggatgccttagttacccagcagcaggttaccaagggctgtctggaaagggagg

SEQ ID NO: 192553 - DNA, 2243 bp, Homo sapiens
  Payload ID: 18017
  Gene Name: transforming growth factor beta regulator 4
  Uniprot ID: Q969Z0
  ENST ID: ENST00000258770
  CDS Start-End: 123-2018
agcgcgccgcgcacctcatggttccggggacagttagggcggcggatggaggtcagcggtggtgctcgctgcggtttggaatcacttgctaggagtcttgtctctctgccacccaggacatcatggcagctcacctggtaaagcgatgcacgtgcctcctgagagaagctgctcgtcaggcccctgccatggctccagttggccgactgagacttgcctgggtagcccataagactctgacttcctcagccacctcacccatttcccacctcccaggttccttgatggagccggtggagaaggaacgagcatctactccctacatagagaagcaggtggaccacctcatcaagaaggccacaaggccagaggagctcctggagctacttggtggcagtcacgacttggacagcaatcaagcagcaatggtacttatccggctctctcacttgctgtctgagaagccagaagataaaggcttgctcatacaggatgcccactttcatcaacttctctgtctgctcaacagtcagattgcctcggtctggcatggtaccctctcgaagctgctgggaagcctgtatgctctgggcatccccaaggcctccaaggagctgcagtcggtggagcaggaggtccgctggcgcatgcggaagctcaagtacaagcacctggccttcctggcagagtcctgtgccaccctctcacaggagcagcactcgcaggagctgctggctgagctgctcacacacctggaaaggcgttggacagaaattgaagattcccacacattagtgaccgtcatgatgaaggtgggacacctctcggagccactaatgaaccgcctggaagacaagtgcctggagttggtggagcactttggccccaatgagctgcggaaggtgctggtgatgctggcagctcagagccggcggtccgtgcccttgctgcgggccatctcctaccacctggtgcagaagcccttctctctgacgaaagatgtgctcttggacgtggcctatgcctatggcaaactcagctttcaccagacccaggtgtcccagcgcctggccaccgacctgctatccctcatgcccagcctgacttctggtgaggtggcccactgtgccaagtccttcgccttactcaagtggctcagcctgcccctgtttgaggcctttgcccagcacgtcctgaacagagcgcaggacatcaccctgccccacctgtgcagcgtacttctggcttttgcgcgtctgaacttccatccagaccaagaggatcagttcttcagcctggtacatgagaagctggggtcagagctgccaggcctggagccagccctgcaggtggacctggtgtgggccctgtgtgtgctgcagcaggcacgggaagcagagctgcaagccgtcctccaccctgaatttcacatccaatttctagggggcaagtctcagaaggatcagaacaccttccagaagctgctccacatcaacgccactgccctgctggagtaccccgagtactcgggtccccttctgcctgcctcggctgtggcccctgggccctcagcccttgacaggaaggtgacccccctgcaaaaggagctgcaggagacgctgaaggggctgctggggagcgccgacaagggcagcctcgaggtggccacgcagtatggctgggtgctggatgctgaggtgctgctggacagtgacggcgagtttctgcccgtaagggactttgtggcacctcaccttgcccagccaactgggagccagtcaccacctccagggtctaagaggctagcgttcttgcggtgggagttccccaacttcaacagccgaagcaaggacttgctgggtcgctttgttctggcccggcgacacatagtggctgcaggcttcctgatagtggacgtcccattctatgagtggctggaactcaagtctgaatggcagaaaggcgcctacctcaaggacaagatgcgcaaagcggtggctgaggagctggccaagtgacttgtgccagcagcatggactgcgtgcctctccgccggaggtctagctgtgggcggccaagaagggtcacccttgaggacaaacctctgtgcaggaccttggccagagtggggagggtggccagccactctgagggacagaacgtcctcttgtgtataataaacctttaattttggtgttggacccctggggccttcccaggcttggtcaccctctgcactgtca

SEQ ID NO: 192554 - DNA, 1917 bp, Homo sapiens
  Payload ID: 18017
  Gene Name: transforming growth factor beta regulator 4
  Uniprot ID: Q969Z0
  ENST ID: ENST00000361278
  CDS Start-End: 127-1692
gggaagcgcgccgcgcacctcatggttccggggacagttagggcggcggatggaggtcagcggtggtgctcgctgcggtttggaatcacttgctaggagtcttgtctctctgccacccaggacatcatggcagctcacctggtaaagcgatgcacgtgcctcctgagagaagctgctcgtcaggcccctgccatggctccagttggccgactgagacttgcctgggtagcccataagactctgacttcctcagccacctcacccatttcccacctcccaggttccttgatggagccggtggagaaggaacgagcatctactccctacatagagaagcaggtggaccacctcatcaagaaggccacaaggccagaggagctcctggagctacttggtggcagtcacgacttggacagcaatcaagcagcaatggtacttatccggctctctcacttgctgtctgagaagccagaagataaaggcttgctcatacaggatgcccactttcatcaacttctctgtctgctcaacagtcagattgcctcggtctggcatggtaccctctcgaagctgctgggaagcctgtatgctctgggcatccccaaggcctccaaggagctgcagtcggtggagcaggaggtccgctggcgcatgcggaagctcaagtacaagcacctggccttcctggcagagtcctgtgccaccctctcacaggagcagcactcgcaggagctgctggctgagctgctcacacacctggaaaggcgttggacagaaattgaagattcccacacattagtgaccgtcatgatgaaggtgggacacctctcggagccactaatgaaccgcctggaagacaagcacgtcctgaacagagcgcaggacatcaccctgccccacctgtgcagcgtacttctggcttttgcgcgtctgaacttccatccagaccaagaggatcagttcttcagcctggtacatgagaagctggggtcagagctgccaggcctggagccagccctgcaggtggacctggtgtgggccctgtgtgtgctgcagcaggcacgggaagcagagctgcaagccgtcctccaccctgaatttcacatccaatttctagggggcaagtctcagaaggatcagaacaccttccagaagctgctccacatcaacgccactgccctgctggagtaccccgagtactcgggtccccttctgcctgcctcggctgtggcccctgggccctcagcccttgacaggaaggtgacccccctgcaaaaggagctgcaggagacgctgaaggggctgctggggagcgccgacaagggcagcctcgaggtggccacgcagtatggctgggtgctggatgctgaggtgctgctggacagtgacggcgagtttctgcccgtaagggactttgtggcacctcaccttgcccagccaactgggagccagtcaccacctccagggtctaagaggctagcgttcttgcggtgggagttccccaacttcaacagccgaagcaaggacttgctgggtcgctttgttctggcccggcgacacatagtggctgcaggcttcctgatagtggacgtcccattctatgagtggctggaactcaagtctgaatggcagaaaggcgcctacctcaaggacaagatgcgcaaagcggtggctgaggagctggccaagtgacttgtgccagcagcatggactgcgtgcctctccgccggaggtctagctgtgggcggccaagaagggtcacccttgaggacaaacctctgtgcaggaccttggccagagtggggagggtggccagccactctgagggacagaacgtcctcttgtgtataataaacctttaattttggtgttggacccctggggccttcccaggcttggtcaccctctgcactgtca

SEQ ID NO: 192555 - DNA, 2225 bp, Homo sapiens
  Payload ID: 18017
  Gene Name: transforming growth factor beta regulator 4
  Uniprot ID: Q969Z0
  ENST ID: ENST00000395655
  CDS Start-End: 435-2000
acgtcgcctatcccactccaccagcccagtcttccaccgccctaggaactctcctacgcctacgcaagcagggagggatagggtgacagcaccgacaacaaagggtcgtctcccgcactccgtatgaggatggcgtactggtcggggggcaaccgaagcctttcttcctaggttctttatcttttctaagtttcccatgacctatcgctccgcttgagccctcagcaaagatgtcacccgccgaaaggtgtggccggaagctggaggcgtggcttccggacgtgcggggcgaggctcgtctcgtttccgccggcgctccgagtgacgtagggaagcgcgccgcgcacctcatggttccggggacagttagggcggcggatggagggtttggaatcacttgctaggagtcttgtctctctgccacccaggacatcatggcagctcacctggtaaagcgatgcacgtgcctcctgagagaagctgctcgtcaggcccctgccatggctccagttggccgactgagacttgcctgggtagcccataagactctgacttcctcagccacctcacccatttcccacctcccaggttccttgatggagccggtggagaaggaacgagcatctactccctacatagagaagcaggtggaccacctcatcaagaaggccacaaggccagaggagctcctggagctacttggtggcagtcacgacttggacagcaatcaagcagcaatggtacttatccggctctctcacttgctgtctgagaagccagaagataaaggcttgctcatacaggatgcccactttcatcaacttctctgtctgctcaacagtcagattgcctcggtctggcatggtaccctctcgaagctgctgggaagcctgtatgctctgggcatccccaaggcctccaaggagctgcagtcggtggagcaggaggtccgctggcgcatgcggaagctcaagtacaagcacctggccttcctggcagagtcctgtgccaccctctcacaggagcagcactcgcaggagctgctggctgagctgctcacacacctggaaaggcgttggacagaaattgaagattcccacacattagtgaccgtcatgatgaaggtgggacacctctcggagccactaatgaaccgcctggaagacaagcacgtcctgaacagagcgcaggacatcaccctgccccacctgtgcagcgtacttctggcttttgcgcgtctgaacttccatccagaccaagaggatcagttcttcagcctggtacatgagaagctggggtcagagctgccaggcctggagccagccctgcaggtggacctggtgtgggccctgtgtgtgctgcagcaggcacgggaagcagagctgcaagccgtcctccaccctgaatttcacatccaatttctagggggcaagtctcagaaggatcagaacaccttccagaagctgctccacatcaacgccactgccctgctggagtaccccgagtactcgggtccccttctgcctgcctcggctgtggcccctgggccctcagcccttgacaggaaggtgacccccctgcaaaaggagctgcaggagacgctgaaggggctgctggggagcgccgacaagggcagcctcgaggtggccacgcagtatggctgggtgctggatgctgaggtgctgctggacagtgacggcgagtttctgcccgtaagggactttgtggcacctcaccttgcccagccaactgggagccagtcaccacctccagggtctaagaggctagcgttcttgcggtgggagttccccaacttcaacagccgaagcaaggacttgctgggtcgctttgttctggcccggcgacacatagtggctgcaggcttcctgatagtggacgtcccattctatgagtggctggaactcaagtctgaatggcagaaaggcgcctacctcaaggacaagatgcgcaaagcggtggctgaggagctggccaagtgacttgtgccagcagcatggactgcgtgcctctccgccggaggtctagctgtgggcggccaagaagggtcacccttgaggacaaacctctgtgcaggaccttggccagagtggggagggtggccagccactctgagggacagaacgtcctcttgtgtataataaacctttaattttggtgttggacccctggggccttcccaggcttggtcaccctctgcactgtca

SEQ ID NO: 192556 - DNA, 548 bp, Homo sapiens
  Payload ID: 18017
  Gene Name: transforming growth factor beta regulator 4
  ENST ID: ENST00000495078
  CDS Start-End: 239-548
atggttccggggacagttagggcggcggatggaggtcagcggtggtgctcgctgctggagttagactaagctttttacagctgctttaatcccctcatataaaaagaaaatgtgctggccatataccaagttccaggaagtggagaaagatcaaacgtacattctgctttggcagaaatgaggcctagggtttggaatcacttgctaggagtcttgtctctctgccacccaggacatcatggcagctcacctggtaaagcgatgcacgtgcctcctgagagaagctgctcgtcaggcccctgccatggctccagttggccgactgagacttgcctgggtagcccataagactctgacttcctcagccacctcacccatttcccacctcccaggttccttgatggagccggtggagaaggaacgagcatctactccctacatagagaagcaggtggaccacctcatcaagaaggccacaaggccagaggagctcctggagctacttggtggcagtcacgacttggacagcaatcaagcagcaatggtac

SEQ ID NO: 192557 - DNA, 579 bp, Homo sapiens
  Payload ID: 18017
  Gene Name: transforming growth factor beta regulator 4
  ENST ID: ENST00000475893
  CDS Start-End: 196-579
cagtcttccaccgccctaggaactctcctacgcctacgcaagcagggagggatagggtgacagcaccgacaacaaagggtcgtctcccgcactccgtatgaggatggcgtactggtcggggggcaaccgaagcctttcttcctagggtttggaatcacttgctaggagtcttgtctctctgccacccaggacatcatggcagctcacctggtaaagcgatgcacgtgcctcctgagagaagctgctcgtcaggcccctgccatggctccagttggccgactgagacttgcctgggtagcccataagactctgacttcctcagccacctcacccatttcccacctcccaggttccttgatggagccggtggagaaggaacgagcatctactccctacatagagaagcaggtggaccacctcatcaagaaggccacaaggccagaggagctcctggagctacttggtggcagtcacgacttggacagcaatcaagcagcaatggtacttatccggctctctcacttgctgtctgagaagccagaagataaaggcttgctcatacaggatgcccactttcat

SEQ ID NO: 192558 - DNA, 856 bp, Homo sapiens
  Payload ID: 18017
  Gene Name: transforming growth factor beta regulator 4
  ENST ID: ENST00000461363
  CDS Start-End: 112-856
tagggcggcggatggaggtcagcggtggtgctcgctgcggtttggaatcacttgctaggagtcttgtctctctgccacccaggacatcatggcagctcacctggttccttgatggagccggtggagaaggaacgagcatctactccctacatagagaagcaggtggaccacctcatcaagaaggccacaaggccagaggagctcctggagctacttggtggcagtcacgacttggacagcaatcaagcagcaatggtacttatccggctctctcacttgctgtctgagaagccagaagataaaggcttgctcatacaggatgcccactttcatcaacttctctgtctgctcaacagtcagattgcctcggtctggcatggtaccctctcgaagctgctgggaagcctgtatgctctgggcatccccaaggcctccaaggagctgcagtcggtggagcaggaggtccgctggcgcatgcggaagctcaagtacaagcacctggccttcctggcagagtcctgtgccaccctctcacaggagcagcactcgcaggagctgctggctgagctgctcacacacctggaaaggcgttggacagaaattgaagattcccacacattagtgaccgtcatgatgaaggtgggacacctctcggagccactaatgaaccgcctggaagacaagtgcctggagttggtggagcactttggccccaatgagctgcggaaggtgctggtgatgctggcagctcagagccggcggtccgtgcccttgctgcgggccatctcctaccacctggtgcagaagcccttctctctgacgaaagatgtgctcttggacgtggcctatgcctatg

SEQ ID NO: 192559 - DNA, 530 bp, Homo sapiens
  Payload ID: 18017
  Gene Name: transforming growth factor beta regulator 4
  ENST ID: ENST00000482285
  CDS Start-End: 177-530
tgctcgttccgtgctggcttgccagtgcgcacgcttcctctctagcccgcgcggccaggcctggaagacgccgcccctgttgaccgtccatgaccccagcgagccagttttcgtgacttagtgcaaggtttggaatcacttgctaggagtcttgtctctctgccacccaggacatcatggcagctcacctggtaaagcgatgcacgtgcctcctgagagaagctgctcgtcaggcccctgccatggctccagttggccgactgagacttgcctgggtagcccataagactctgacttcctcagccacctcacccatttcccacctcccaggttccttgatggagccggtggagaaggaacgagcatctactccctacatagagaagcaggtggaccacctcatcaagaaggccacaaggccagaggagctcctggagctacttggtggcagtcacgacttggacagcaatcaagcagcaatggtacttatccggctctctcacttgctgtctgagaagccagaagataaa

SEQ ID NO: 192560 - DNA, 822 bp, Homo sapiens
  Payload ID: 18017
  Gene Name: transforming growth factor beta regulator 4
  ENST ID: ENST00000483615
  CDS Start-End: 1-822
ccagacccaggtgtcccagcgcctggccaccgacctgctatccctcatgcccagcctgacttctggtgaggtggcccactgtgccaagtccttcgccttactcaagtggctcagcctgcccctgtttgaggcctttgcccagcacgtcctgaacagagcgcaggacatcaccctgccccacctgtgcagcgtacttctggcttttgcgcgtctgaacttccatccagaccaagaggatcagttcttcagcctggtacatgagaagctggggtcagagctgccaggcctggagccagccctgcaggtggacctggtgtgggccctgtgtgtgctgcagcaggcacgggaagcagagctgcaagccgtcctccaccctgaatttcacatccaatttctaggtgagccccctgcccctagtactactggaactgggaaactgcctggtcttgtctgcctagtgccagggggcaagtctcagaaggatcagaacaccttccagaagctgctccacatcaacgccactgccctgctggagtaccccgagtactcgggtccccttctgcctgcctcggctgtggcccctgggccctcagcccttgacaggaaggtgacccccctgcaaaaggagctgcaggagacgctgaaggggctgctggggagcgccgacaagggcagcctcgaggtggccacgcagtatggctgggtgctggatgctgaggtgctgctggacagtgacggcgagtttctgcccgtaagggactttgtggcacctcaccttgcccagccaactgggagccagtcaccacctccagggtctaagag

SEQ ID NO: 192561 - DNA, 945 bp, Homo sapiens
  Payload ID: 18017
  Gene Name: transforming growth factor beta regulator 4
  ENST ID: ENST00000478532
  CDS Start-End: 96-945
ccgcgcacctcatggttccggggacagttagggcggcggatggagggtttggaatcacttgctaggagtcttgtctctctgccacccaggacatcatggcagctcacctggtaaagcgatgcacgtgcctcctgagagaagctgctcgtcaggcccctgccatggctccagttggccgactgagacttgcctgggtagcccataagactctgacttcctcagccacctcacccatttcccacctcccaggttccttgatggagccggtggagaaggaacgagcatctactccctacatagagaagcaggtggaccacctcatcaagaaggccacaaggccagaggagctcctggagctacttggtggcagtcacgacttggacagcaatcaagcagcaatgattgcctcggtctggcatggtaccctctcgaagctgctgggaagcctgtatgctctgggcatccccaaggcctccaaggagctgcagtcggtggagcaggaggtccgctggcgcatgcggaagctcaagtacaagcacctggccttcctggcagagtcctgtgccaccctctcacaggagcagcactcgcaggagctgctggctgagctgctcacacacctggaaaggcgttggacagaaattgaagattcccacacattagtgaccgtcatgatgaaggtgggacacctctcggagccactaatgaaccgcctggaagacaagtgcctggagttggtggagcactttggccccaatgagctgcggaaggtgctggtgatgctggcagctcagagccggcggtccgtgcccttgctgcgggccatctcctaccacctggtgcagaagcccttctctctgacgaaagatgtgctcttggacgtggcctatgcctatggcaaactcagctttcaccagacccaggtgtcccagcgcctggccaccg

SEQ ID NO: 192562 - DNA, 2190 bp, Homo sapiens
  Payload ID: 18017
  Gene Name: transforming growth factor beta regulator 4
  Uniprot ID: Q969Z0
  ENST ID: ENST00000494076
  CDS Start-End: 71-1966
gcgcacctcatggttccggggacagttagggcggcggatggaggtcagcggtggtgctcgctgcgacatcatggcagctcacctggtaaagcgatgcacgtgcctcctgagagaagctgctcgtcaggcccctgccatggctccagttggccgactgagacttgcctgggtagcccataagactctgacttcctcagccacctcacccatttcccacctcccaggttccttgatggagccggtggagaaggaacgagcatctactccctacatagagaagcaggtggaccacctcatcaagaaggccacaaggccagaggagctcctggagctacttggtggcagtcacgacttggacagcaatcaagcagcaatggtacttatccggctctctcacttgctgtctgagaagccagaagataaaggcttgctcatacaggatgcccactttcatcaacttctctgtctgctcaacagtcagattgcctcggtctggcatggtaccctctcgaagctgctgggaagcctgtatgctctgggcatccccaaggcctccaaggagctgcagtcggtggagcaggaggtccgctggcgcatgcggaagctcaagtacaagcacctggccttcctggcagagtcctgtgccaccctctcacaggagcagcactcgcaggagctgctggctgagctgctcacacacctggaaaggcgttggacagaaattgaagattcccacacattagtgaccgtcatgatgaaggtgggacacctctcggagccactaatgaaccgcctggaagacaagtgcctggagttggtggagcactttggccccaatgagctgcggaaggtgctggtgatgctggcagctcagagccggcggtccgtgcccttgctgcgggccatctcctaccacctggtgcagaagcccttctctctgacgaaagatgtgctcttggacgtggcctatgcctatggcaaactcagctttcaccagacccaggtgtcccagcgcctggccaccgacctgctatccctcatgcccagcctgacttctggtgaggtggcccactgtgccaagtccttcgccttactcaagtggctcagcctgcccctgtttgaggcctttgcccagcacgtcctgaacagagcgcaggacatcaccctgccccacctgtgcagcgtacttctggcttttgcgcgtctgaacttccatccagaccaagaggatcagttcttcagcctggtacatgagaagctggggtcagagctgccaggcctggagccagccctgcaggtggacctggtgtgggccctgtgtgtgctgcagcaggcacgggaagcagagctgcaagccgtcctccaccctgaatttcacatccaatttctagggggcaagtctcagaaggatcagaacaccttccagaagctgctccacatcaacgccactgccctgctggagtaccccgagtactcgggtccccttctgcctgcctcggctgtggcccctgggccctcagcccttgacaggaaggtgacccccctgcaaaaggagctgcaggagacgctgaaggggctgctggggagcgccgacaagggcagcctcgaggtggccacgcagtatggctgggtgctggatgctgaggtgctgctggacagtgacggcgagtttctgcccgtaagggactttgtggcacctcaccttgcccagccaactgggagccagtcaccacctccagggtctaagaggctagcgttcttgcggtgggagttccccaacttcaacagccgaagcaaggacttgctgggtcgctttgttctggcccggcgacacatagtggctgcaggcttcctgatagtggacgtcccattctatgagtggctggaactcaagtctgaatggcagaaaggcgcctacctcaaggacaagatgcgcaaagcggtggctgaggagctggccaagtgacttgtgccagcagcatggactgcgtgcctctccgccggaggtctagctgtgggcggccaagaagggtcacccttgaggacaaacctctgtgcaggaccttggccagagtggggagggtggccagccactctgagggacagaacgtcctcttgtgtataataaacctttaattttggtgttggacccctggggccttcccaggcttggtcaccctctgcactgtc

SEQ ID NO: 192563 - DNA, 4310 bp, Homo sapiens
  Payload ID: 18018
  Gene Name: transforming growth factor, alpha
  Uniprot ID: P01135
  ENST ID: ENST00000295400
  CDS Start-End: 249-731
gtcagctgtgccccggtcgccgagtggcgaggaggtgacggtagccgccttcctatttccgcccggcgggcagcgctgcggggcgagtgccagcagagaggcgctcggtcctccctccgccctcccgcgccgggggcaggccctgcctagtctgcgtctttttcccccgcaccgcggcgccgctccgccactcgggcaccgcaggtagggcaggaggctggagagcctgctgcccgcccgcccgtaaaatggtcccctcggctggacagctcgccctgttcgctctgggtattgtgttggctgcgtgccaggccttggagaacagcacgtccccgctgagtgcagacccgcccgtggctgcagcagtggtgtcccattttaatgactgcccagattcccacactcagttctgcttccatggaacctgcaggtttttggtgcaggaggacaagccagcatgtgtctgccattctgggtacgttggtgcacgctgtgagcatgcggacctcctggccgtggtggctgccagccagaagaagcaggccatcaccgccttggtggtggtctccatcgtggccctggctgtccttatcatcacatgtgtgctgatacactgctgccaggtccgaaaacactgtgagtggtgccgggccctcatctgccggcacgagaagcccagcgccctcctgaagggaagaaccgcttgctgccactcagaaacagtggtctgaagagcccagaggaggagtttggccaggtggactgtggcagatcaataaagaaaggcttcttcaggacagcactgccagagatgcctgggtgtgccacagaccttcctacttggcctgtaatcacctgtgcagccttttgtgggccttcaaaactctgtcaagaactccgtctgcttggggttattcagtgtgacctagagaagaaatcagcggaccacgatttcaagacttgttaaaaaagaactgcaaagagacggactcctgttcacctaggtgaggtgtgtgcagcagttggtgtctgagtccacatgtgtgcagttgtcttctgccagccatggattccaggctatatatttctttttaatgggccacctccccacaacagaattctgcccaacacaggagatttctatagttattgttttctgtcatttgcctactggggaagaaagtgaaggaggggaaactgtttaatatcacatgaagaccctagctttaagagaagctgtatcctctaaccacgagaccctcaaccagcccaacatcttccatggacacatgacattgaagaccatcccaagctatcgccacccttggagatgatgtcttatttattagatggataatggttttatttttaatctcttaagtcaatgtaaaaagtataaaaccccttcagacttctacattaatgatgtatgtgttgctgactgaaaagctatactgattagaaatgtctggcctcttcaagacagctaaggcttgggaaaagtcttccagggtgcggagatggaaccagaggctgggttactggtaggaataaaggtaggggttcagaaatggtgccattgaagccacaaagccggtaaatgcctcaatacgttctgggagaaaacttagcaaatccatcagcagggatctgtcccctctgttggggagagaggaagagtgtgtgtgtctacacaggataaacccaatacatattgtactgctcagtgattaaatgggttcacttcctcgtgagccctcggtaagtatgtttagaaatagaacattagccacgagccataggcatttcaggccaaatccatgaaagggggaccagtcatttattttccattttgttgcttggttggtttgttgctttatttttaaaaggagaagtttaactttgctatttattttcgagcactaggaaaactattccagtaatttttttttcctcatttccattcaggatgccggctttattaacaaaaactctaacaagtcacctccactatgtgggtcttcctttcccctcaagagaaggagcaattgttcccctgagcatctgggtccatctgacccatggggcctgcctgtgagaaacagtgggtcccttcaaatacatagtggatagctcatccctaggaattttcattaaaatttggaaacagagtaatgaagaaataatatataaactccttatgtgaggaaatgctactaatatctgaaaagtgaaagatttctatgtattaactcttaagtgcacctagcttattacatcgtgaaaggtacatttaaaatatgttaaattggcttgaaattttcagagaattttgtcttcccctaattcttcttccttggtctggaagaacaatttctatgaattttctctttatttttttttataattcagacaattctatgacccgtgtcttcatttttggcactcttatttaacaatgccacacctgaagcacttggatctgttcagagctgaccccctagcaacgtagttgacacagctccaggtttttaaattactaaaataagttcaagtttacatcccttgggccagatatgtgggttgaggcttgactgtagcatcctgcttagagaccaatcaacggacactggtttttagacctctatcaatcagtagttagcatccaagagactttgcagaggcgtaggaatgaggctggacagatggcggaagcagaggttccctgcgaagacttgagatttagtgtctgtgaatgttctagttcctaggtccagcaagtcacacctgccagtgccctcatccttatgcctgtaacacacatgcagtgagaggcctcacatatacgcctccctagaagtgccttccaagtcagtcctttggaaaccagcaggtctgaaaaagaggctgcatcaatgcaagcctggttggaccattgtccatgcctcaggatagaacagcctggcttatttggggatttttcttctagaaatcaaatgactgataagcattggatccctctgccatttaatggcaatggtagtctttggttagctgcaaaaatactccatttcaagttaaaaatgcatcttctaatccatctctgcaagctccctgtgtttccttgccctttagaaaatgaattgttcactacaattagagaatcatttaacatcctgacctggtaagctgccacacacctggcagtggggagcatcgctgtttccaatggctcaggagacaatgaaaagcccccatttaaaaaaataacaaacattttttaaaaggcctccaatactcttatggagcctggatttttcccactgctctacaggctgtgactttttttaagcatcctgacaggaaatgttttcttctacatggaaagatagacagcagccaaccctgatctggaagacagggccccggctggacacacgtggaaccaagccagggatgggctggccattgtgtccccgcaggagagatgggcagaatggccctagagttcttttccctgagaaaggagaaaaagatgggattgccactcacccacccacactggtaagggaggagaatttgtgcttctggagcttctcaagggattgtgttttgcaggtacagaaaactgcctgttatcttcaagccaggttttcgagggcacatgggtcaccagttgctttttcagtcaatttggccgggatggactaatgaggctctaacactgctcaggagacccctgccctctagttggttctgggctttgatctcttccaacctgcccagtcacagaaggaggaatgactcaaatgcccaaaaccaagaacacattgcagaagtaagacaaacatgtatatttttaaatgttctaacataagacctgttctctctagccattgatttaccaggctttctgaaagatctagtggttcacacagagagagagagagtactgaaaaagcaactcctcttcttagtcttaataatttactaaaatggtcaacttttcattatctttattataataaacctgatgcttttttttagaactccttactctgatgtctgtatatgttgcactgaaaaggttaatatttaatgttttaatttattttgtgtggtaagttaattttgatttctgtaatgtgttaatgtgattagcagttattttccttaatatctgaattatacttaaagagtagtgagcaatataagacgcaattgtgtttttcagtaatgtgcattgttattgagttgtactgtaccttatttggaaggatgaaggaatgaatctttttttcctaaatcaa

SEQ ID NO: 192564 - DNA, 568 bp, Homo sapiens
  Payload ID: 18018
  Gene Name: transforming growth factor, alpha
  ENST ID: ENST00000394241
  CDS Start-End: 207-568
agccgccttcctatttccgcccggcgggcagcgctgcggggcgagtgccagcagagaggcgctcggtcctccctccgccctcccgcgccgggggcaggccctgcctagtctgcgtctttttcccccgcaccgcggcgccgctccgccactcgggcaccgcaggtagggcaggaggctggagagcctgctgcccgcccgcccgtaaaatggtcccctcggctggacagctcgccctgttcgctctgggtattgtgttggctgcgtgccaggccttggagaacagcacgtccccgctgagtgacccgcccgtggctgcagcagtggtgtcccattttaatgactgcccagattcccacactcagttctgcttccatggaacctgcaggtttttggtgcaggaggacaagccagcatgtgtctgccattctgggtacgttggtgcacgctgtgagcatgcggacctcctggccgtggtggctgccagccagaagaagcaggccatcaccgccttggtggtggtctccatcgtggccctggctgtccttatcatcacatgtgtgctgataca

SEQ ID NO: 192565 - DNA, 812 bp, Homo sapiens
  Payload ID: 18018
  Gene Name: transforming growth factor, alpha
  Uniprot ID: P01135
  ENST ID: ENST00000445399
  CDS Start-End: 6-491
gtaaaatggtcccctcggctggacagctcgccctgttcgctctgggtattgtgttggctgcgtgccaggccttggagaacagcacgtccccgctgagtgacccgcccgtggctgcagcagtggtgtcccattttaatgactgcccagattcccacactcagttctgcttccatggaacctgcaggtttttggtgcaggaggacaagccagcatgtgtctgccattctgggtacgttggtgcacgctgtgagcatgcggacctcctggccgtggtggctgccagccagaagaagcaggccatcaccgccttggtggtggtctccatcgtggccctggctgtccttatcatcacatgtgtgctgatacactgctgccaggtccgaaaacactgtgagtggtgccgggccctcatctgccggcacgagaagcccagcgccctcctgaagggaagaaccgcttgctgccactcagaaacagctaccttgggctaatctattgagctaatgaaggatgccggctttattaacaaaaactctaacaagtcacctccactatgtgggtcttcctttcccctcaagagaaggagcaattgttcccctgagcatctgggtccatctgacccatggggcctgcctgtgagaaacagtgggtcccttcaaatacatagtggatagctcatccctaggaattttcattaaaatttggaaacagagtaatgaagaaataatatataaactccttatgtgaggaaatgctactaatatctgaaaagtgaaagatttctatgtattaactcttaagtgcacctagct

SEQ ID NO: 192566 - DNA, 1225 bp, Homo sapiens
  Payload ID: 18018
  Gene Name: transforming growth factor, alpha
  Uniprot ID: P01135
  ENST ID: ENST00000418333
  CDS Start-End: 60-539
actcgggcaccgcaggtagggcaggaggctggagagcctgctgcccgcccgcccgtaaaatggtcccctcggctggacagctcgccctgttcgctctgggtattgtgttggctgcgtgccaggccttggagaacagcacgtccccgctgagtgacccgcccgtggctgcagcagtggtgtcccattttaatgactgcccagattcccacactcagttctgcttccatggaacctgcaggtttttggtgcaggaggacaagccagcatgtgtctgccattctgggtacgttggtgcacgctgtgagcatgcggacctcctggccgtggtggctgccagccagaagaagcaggccatcaccgccttggtggtggtctccatcgtggccctggctgtccttatcatcacatgtgtgctgatacactgctgccaggtccgaaaacactgtgagtggtgccgggccctcatctgccggcacgagaagcccagcgccctcctgaagggaagaaccgcttgctgccactcagaaacagtggtctgaagagcccagaggaggagtttggccaggtggactgtggcagatcaataaagaaaggcttcttcaggacagcactgccagagatgcctgggtgtgccacagaccttcctacttggcctgtaatcacctgtgcagccttttgtgggccttcaaaactctgtcaagaactccgtctgcttggggttattcagtgtgacctagagaagaaatcagcggaccacgatttcaagacttgttaaaaaagaactgcaaagagacggactcctgttcacctaggtgaggtgtgtgcagcagttggtgtctgagtccacatgtgtgcagttgtcttctgccagccatggattccaggctatatatttctttttaatgggccacctccccacaacagaattctgcccaacacaggagatttctatagttattgttttctgtcatttgcctactggggaagaaagtgaaggaggggaaactgtttaatatcacatgaagaccctagctttaagagaagctgtatcctctaaccacgagaccctcaaccagcccaacatcttccatggacacatgacattgaagaccatcccaagctatcgccacccttggagatgatgtcttatttattagatggataatggttttatttttaatctcttaagtcaatgtaaaaagtataaaaccccttcagacttcta

SEQ ID NO: 192567 - DNA, 985 bp, Homo sapiens
  Payload ID: 18018
  Gene Name: transforming growth factor, alpha
  ENST ID: ENST00000444975
  CDS Start-End: 398-898
gcccgcctgggagagtggagagaagcgagtagtctcaatgggttggcgcctgggaggcaaggggagtcattaagaatgacaaagaggggactgtccggtcgagcgccgaggcttccccgggaaagtggctgcctgggccgtgcgtgagaacacctgggaaggggaagcggagtgtgaacgggcttgaactttaatccgccgcagctgtgtgtctgctcagacacatgcctacacctacctgcttacctggctgcctccaagcccggctcagccggcgtcgctggcgtgtagactgggccgcctcggaacgggggccggcgtctaaccctctggccgggtcttgcctgcgcccctttggcaccccctgcccacctctaagccccagcgacgagcagagatgttcaagatcggcagaggcgccctcgatctcttttcagagctcttgagctttgggggtattgtgttggctgcgtgccaggccttggagaacagcacgtccccgctgagtgcagacccgcccgtggctgcagcagtggtgtcccattttaatgactgcccagattcccacactcagttctgcttccatggaacctgcaggtttttggtgcaggaggacaagccagcatgtgtctgccattctgggtacgttggtgcacgctgtgagcatgcggacctcctggccgtggtggctgccagccagaagaagcaggccatcaccgccttggtggtggtctccatcgtggccctggctgtccttatcatcacatgtgtgctgatacactgctgccaggtccgaaaacactgtgagtggtgccgggccctcatctgccggcacgagaagcccagcgccctcctgaagggaagaaccgcttgctgccactcagaaacagtggtctgaagagcccagaggaggagtttggccaggtggactgtggcagatcaataaagaaaggcttcttcaggacagcactgccagagatgcctg

SEQ ID NO: 192568 - DNA, 681 bp, Homo sapiens
  Payload ID: 18018
  Gene Name: transforming growth factor, alpha
  ENST ID: ENST00000419940
  CDS Start-End: 1-395
acccgcccgtggctgcagcagtggtgtcccattttaatgactgcccagattcccacactcagttctgcttccatggaacctgcaggtttttggtgcaggaggacaagccagcatgtgtctgccattctgggtacgttggtgcacgctgtgagcatgcggacctcctggccgtggtggctgccagccagaagaagcaggccatcaccgccttggtggtggtctccatcgtggccctggctgtccttatcatcacatgtgtgctgatacactgctgccaggtccgaaaacactgtgagtggtgccgggccctcatctgccggcacgagaagcccagcgccctcctgaagggaagaaccgcttgctgccactcagaaacaggatgccggctttattaacaaaaactctaacaagtcacctccactatgtgggtcttcctttcccctcaagagaaggagcaattgttcccctgagcatctgggtccatctgacccatggggcctgcctgtgagaaacagtgggtcccttcaaatacatagtggatagctcatccctaggaattttcattaaaatttggaaacagagtaatgaagaaataatatataaactccttatgtgaggaaatgctactaatatctgaaaagtgaaagatttctatgtattaactcttaagtgcacctagct

SEQ ID NO: 192569 - DNA, 950 bp, Homo sapiens
  Payload ID: 18018
  Gene Name: transforming growth factor, alpha
  ENST ID: ENST00000450929
  CDS Start-End: 250-747
aacacctgggaaggggaagcggagtgtgaacgggcttgaactttaatccgccgcagctgtgtgtctgctcagacacatgcctacacctacctgcttacctggctgcctccaagcccggctcagccggcgtcgctggcgtgtagactgggccgcctcggaacgggggccggcgtctaaccctctggccgggtcttgcctgcgcccctttggcaccccctgcccacctctaagccccagcgacgagcagagatgttcaagatcggcagaggcgccctcgatctcttttcagagctcttgagctttgggggtattgtgttggctgcgtgccaggccttggagaacagcacgtccccgctgagtgacccgcccgtggctgcagcagtggtgtcccattttaatgactgcccagattcccacactcagttctgcttccatggaacctgcaggtttttggtgcaggaggacaagccagcatgtgtctgccattctgggtacgttggtgcacgctgtgagcatgcggacctcctggccgtggtggctgccagccagaagaagcaggccatcaccgccttggtggtggtctccatcgtggccctggctgtccttatcatcacatgtgtgctgatacactgctgccaggtccgaaaacactgtgagtggtgccgggccctcatctgccggcacgagaagcccagcgccctcctgaagggaagaaccgcttgctgccactcagaaacagtggtctgaagagcccagaggaggagtttggccaggtggactgtggcagatcaataaagaaaggcttcttcaggacagcactgccagagatgcctgggtgtgccacagaccttcctacttggcctgtaatcacctgtgcagccttttgtgggccttcaaaactctgtcaagaactccgtctgcttggggttattcagtgtgacctagagaag

SEQ ID NO: 192570 - DNA, 2769 bp, Homo sapiens
  Payload ID: 18019
  Gene Name: transforming growth factor, beta 1
  Uniprot ID: P01137
  ENST ID: ENST00000221930
  CDS Start-End: 868-2040
ccttcgcgccctgggccatctccctcccacctccctccgcggagcagccagacagcgagggccccggccgggggcaggggggacgccccgtccggggcacccccccggctctgagccgcccgcggggccggcctcggcccggagcggaggaaggagtcgccgaggagcagcctgaggccccagagtctgagacgagccgccgccgcccccgccactgcggggaggagggggaggaggagcgggaggagggacgagctggtcgggagaagaggaaaaaaacttttgagacttttccgttgccgctgggagccggaggcgcggggacctcttggcgcgacgctgccccgcgaggaggcaggacttggggaccccagaccgcctccctttgccgccggggacgcttgctccctccctgccccctacacggcgtccctcaggcgcccccattccggaccagccctcgggagtcgccgacccggcctcccgcaaagacttttccccagacctcgggcgcaccccctgcacgccgccttcatccccggcctgtctcctgagcccccgcgcatcctagaccctttctcctccaggagacggatctctctccgacctgccacagatcccctattcaagaccacccaccttctggtaccagatcgcgcccatctaggttatttccgtgggatactgagacacccccggtccaagcctcccctccaccactgcgcccttctccctgaggacctcagctttccctcgaggccctcctaccttttgccgggagacccccagcccctgcaggggcggggcctccccaccacaccagccctgttcgcgctctcggcagtgccggggggcgccgcctcccccatgccgccctccgggctgcggctgctgccgctgctgctaccgctgctgtggctactggtgctgacgcctggccggccggccgcgggactatccacctgcaagactatcgacatggagctggtgaagcggaagcgcatcgaggccatccgcggccagatcctgtccaagctgcggctcgccagccccccgagccagggggaggtgccgcccggcccgctgcccgaggccgtgctcgccctgtacaacagcacccgcgaccgggtggccggggagagtgcagaaccggagcccgagcctgaggccgactactacgccaaggaggtcacccgcgtgctaatggtggaaacccacaacgaaatctatgacaagttcaagcagagtacacacagcatatatatgttcttcaacacatcagagctccgagaagcggtacctgaacccgtgttgctctcccgggcagagctgcgtctgctgaggctcaagttaaaagtggagcagcacgtggagctgtaccagaaatacagcaacaattcctggcgatacctcagcaaccggctgctggcacccagcgactcgccagagtggttatcttttgatgtcaccggagttgtgcggcagtggttgagccgtggaggggaaattgagggctttcgccttagcgcccactgctcctgtgacagcagggataacacactgcaagtggacatcaacgggttcactaccggccgccgaggtgacctggccaccattcatggcatgaaccggcctttcctgcttctcatggccaccccgctggagagggcccagcatctgcaaagctcccggcaccgccgagccctggacaccaactattgcttcagctccacggagaagaactgctgcgtgcggcagctgtacattgacttccgcaaggacctcggctggaagtggatccacgagcccaagggctaccatgccaacttctgcctcgggccctgcccctacatttggagcctggacacgcagtacagcaaggtcctggccctgtacaaccagcataacccgggcgcctcggcggcgccgtgctgcgtgccgcaggcgctggagccgctgcccatcgtgtactacgtgggccgcaagcccaaggtggagcagctgtccaacatgatcgtgcgctcctgcaagtgcagctgaggtcccgccccgccccgccccgccccggcaggcccggccccaccccgccccgcccccgctgccttgcccatgggggctgtatttaaggacacccgtgccccaagcccacctggggccccattaaagatggagagaggactgcggatctctgtgtcattgggcgcctgcctggggtctccatccctgacgttcccccactcccactccctctctctccctctctgcctcctcctgcctgtctgcactattcctttgcccggcatcaaggcacaggggaccagtggggaacactactgtagttagatctatttattgagcaccttgggcactgttgaagtgccttacattaatgaactcattcagtcaccatagcaacactctgagatgcagggactctgataacacccattttaaaggtgaggaaacaagcccagagaggttaagggaggagttcctgcccaccaggaacctgctttagtgggggatagtgaagaagacaataaaagatagtagttcaggccaggcggggtggctcacgcctgtaatcctagcacttttgggaggcagagatgggaggattacttgaatccaggcatttgagaccagcctgggtaacatagtgagaccctatctctacaaaacacttttaaaaaatgtacacctgtggtcccagctactctggaggctaaggtgggaggatcacttgatcctgggaggtcaaggctgcag

SEQ ID NO: 192571 - DNA, 559 bp, Homo sapiens
  Payload ID: 18019
  Gene Name: transforming growth factor, beta 1
  ENST ID: ENST00000598758
  CDS Start-End: 1-362
ggttcactaccggccgccgaggtgacctggccaccattcatggcatgaaccggcctttcctgcttctcatggccaccccgctggagagggcccagcatctgcaaagctcccggcaccgccgagccctggacaccaactattgcttcagctccacggagaagaactgctgcgtgcggcagctgtacattgacttccgcaaggacctcggctggaagtggatccacgagcccaagggctaccatgccaacttctgcctcgggccctgcccctacatttggagcctggacacgcagtacagcaagctcaatgaacagaacctcatccaggaagtccccaacatctggcaacgtgaagttggctaggaggaaggaagtgccccaaagagaacaagaagaagaggaccctgcattgacgttcctctgggaagcactcatttcctacctttcatttctaagaccgcatgatctgggacatccttcccttcctcgtcggttcgctttattgttcggtcttttaggtcctcgtcagtgggacaaattacaatagctttgcgctggaa

SEQ ID NO: 192572 - DNA, 5053 bp, Homo sapiens
  Payload ID: 18020
  Gene Name: transforming growth factor, beta 2
  Uniprot ID: P61812
  ENST ID: ENST00000366929
  CDS Start-End: 468-1796
gcccctcccgtcagttcgccagctgccagccccgggaccttttcatctcttcccttttggccggaggagccgagttcagatccgccactccgcacccgagactgacacactgaactccacttcctcctcttaaatttatttctacttaatagccactcgtctctttttttccccatctcattgctccaagaatttttttcttcttactcgccaaagtcagggttccctctgcccgtcccgtattaatatttccacttttggaactactggccttttctttttaaaggaattcaagcaggatacgtttttctgttgggcattgactagattgtttgcaaaagtttcgcatcaaaaacaacaacaacaaaaaaccaaacaactctccttgatctatactttgagaattgttgatttcttttttttattctgacttttaaaaacaacttttttttccacttttttaaaaaatgcactactgtgtgctgagcgcttttctgatcctgcatctggtcacggtcgcgctcagcctgtctacctgcagcacactcgatatggaccagttcatgcgcaagaggatcgaggcgatccgcgggcagatcctgagcaagctgaagctcaccagtcccccagaagactatcctgagcccgaggaagtccccccggaggtgatttccatctacaacagcaccagggacttgctccaggagaaggcgagccggagggcggccgcctgcgagcgcgagaggagcgacgaagagtactacgccaaggaggtttacaaaatagacatgccgcccttcttcccctccgaaactgtctgcccagttgttacaacaccctctggctcagtgggcagcttgtgctccagacagtcccaggtgctctgtgggtaccttgatgccatcccgcccactttctacagaccctacttcagaattgttcgatttgacgtctcagcaatggagaagaatgcttccaatttggtgaaagcagagttcagagtctttcgtttgcagaacccaaaagccagagtgcctgaacaacggattgagctatatcagattctcaagtccaaagatttaacatctccaacccagcgctacatcgacagcaaagttgtgaaaacaagagcagaaggcgaatggctctccttcgatgtaactgatgctgttcatgaatggcttcaccataaagacaggaacctgggatttaaaataagcttacactgtccctgctgcacttttgtaccatctaataattacatcatcccaaataaaagtgaagaactagaagcaagatttgcaggtattgatggcacctccacatataccagtggtgatcagaaaactataaagtccactaggaaaaaaaacagtgggaagaccccacatctcctgctaatgttattgccctcctacagacttgagtcacaacagaccaaccggcggaagaagcgtgctttggatgcggcctattgctttagaaatgtgcaggataattgctgcctacgtccactttacattgatttcaagagggatctagggtggaaatggatacacgaacccaaagggtacaatgccaacttctgtgctggagcatgcccgtatttatggagttcagacactcagcacagcagggtcctgagcttatataataccataaatccagaagcatctgcttctccttgctgcgtgtcccaagatttagaacctctaaccattctctactacattggcaaaacacccaagattgaacagctttctaatatgattgtaaagtcttgcaaatgcagctaaaattcttggaaaagtggcaagaccaaaatgacaatgatgatgataatgatgatgacgacgacaacgatgatgcttgtaacaagaaaacataagagagccttggttcatcagtgttaaaaaatttttgaaaaggcggtactagttcagacactttggaagtttgtgttctgtttgttaaaactggcatctgacacaaaaaaagttgaaggccttattctacatttcacctactttgtaagtgagagagacaagaagcaaattttttttaaagaaaaaaataaacactggaagaatttattagtgttaattatgtgaacaacgacaacaacaacaacaacaacaaacaggaaaatcccattaagtggagttgctgtacgtaccgttcctatcccgcgcctcacttgatttttctgtattgctatgcaataggcacccttcccattcttactcttagagttaacagtgagttatttattgtgtgttactatataatgaacgtttcattgcccttggaaaataaaacaggtgtataaagtggagaccaaatactttgccagaaactcatggatggcttaaggaacttgaactcaaacgagccagaaaaaaagaggtcatattaatgggatgaaaacccaagtgagttattatatgaccgagaaagtctgcattaagataaagaccctgaaaacacatgttatgtatcagctgcctaaggaagcttcttgtaaggtccaaaaactaaaaagactgttaataaaagaaactttcagtcagaataagtctgtaagtttttttttttctttttaattgtaaatggttctttgtcagtttagtaaaccagtgaaatgttgaaatgttttgacatgtactggtcaaacttcagaccttaaaatattgctgtatagctatgctataggttttttcctttgttttggtatatgtaaccatacctatattattaaaatagatggatatagaagccagcataattgaaaacacatctgcagatctcttttgcaaactattaaatcaaaacattaactactttatgtgtaatgtgtaaatttttaccatattttttatattctgtaataatgtcaactatgatttagattgacttaaatttgggctctttttaatgatcactcacaaatgtatgtttcttttagctggccagtacttttgagtaaagcccctatagtttgacttgcactacaaatgcattttttttttaataacatttgccctacttgtgctttgtgtttctttcattattatgacataagctacctgggtccacttgtcttttcttttttttgtttcacagaaaagatgggttcgagttcagtggtcttcatcttccaagcatcattactaaccaagtcagacgttaacaaatttttatgttaggaaaaggaggaatgttatagatacatagaaaattgaagtaaaatgttttcattttagcaaggatttagggttctaactaaaactcagaatctttattgagttaagaaaagtttctctaccttggtttaatcaatatttttgtaaaatcctattgttattacaaagaggacacttcataggaaacatctttttctttagtcaggtttttaatattcagggggaaattgaaagatatatattttagtcgatttttcaaaaggggaaaaaagtccaggtcagcataagtcattttgtgtatttcactgaagttataaggtttttataaatgttctttgaaggggaaaaggcacaagccaatttttcctatgatcaaaaaattctttctttcctctgagtgagagttatctatatctgaggctaaagtttaccttgctttaataaataatttgccacatcattgcagaagaggtatcctcatgctggggttaatagaatatgtcagtttatcacttgtcgcttatttagctttaaaataaaaattaataggcaaagcaatggaatatttgcagtttcacctaaagagcagcataaggaggcgggaatccaaagtgaagttgtttgatatggtctacttcttttttggaatttcctgaccattaattaaagaattggatttgcaagtttgaaaactggaaaagcaagagatgggatgccataatagtaaacagcccttgtgttggatgtaacccaatcccagatttgagtgtgtgttgattatttttttgtcttccacttttctattatgtgtaaatcacttttatttctgcagacattttcctctcagataggatgacattttgttttgtattattttgtctttcctcatgaatgcactgataatattttaaatgctctattttaagatctcttgaatctgttttttttttttttaatttgggggttctgtaaggtctttatttcccataagtaaatattgccatgggaggggggtggaggtggcaaggaaggggtgaagtgctagtatgcaagtgggcagcaattatttttgtgttaatcagcagtacaatttgatcgttggcatggttaaaaaatggaatataagattagctgttttgtattttgatgaccaattacgctgtattttaacacgatgtatgtctgtttttgtggtgctctagtggtaaataaattatttcgatgatatgtggatgtctttttcctatcagtaccatcatcgagtctagaaaacacctgtgatgcaataagactatctcaagctggaaaagtcataccacctttccgattgccctctgtgctttctcccttaaggacagtcacttcagaagtcatgctttaaagcacaagagtcaggccatatccatcaaggatagaagaaatccctgtgccgtctttttattcccttatttattgctatttggtaattgtttgagatttagtttccatccagcttgactgccgaccagaaaaaatgcagagagatgtttgcaccatgctttggctttctggttctatgttctgccaacgccagggccaaaagaactggtctagacagtatcccctgtagccccataacttggatagttgctgagccagccagatataacaagagccacgtgctttctggggttggttgtttgggatcagctacttgcctgtcagtttcactggtaccactgcaccacaaacaaaaaaacccaccctatttcctccaatttttttggctgctacctacaagaccagactcctcaaacgagttgccaatctcttaataaataggattaataaaaaaagtaattgtgactcaa

SEQ ID NO: 192573 - DNA, 4969 bp, Homo sapiens
  Payload ID: 18020
  Gene Name: transforming growth factor, beta 2
  Uniprot ID: P61812
  ENST ID: ENST00000366930
  CDS Start-End: 468-1712
gcccctcccgtcagttcgccagctgccagccccgggaccttttcatctcttcccttttggccggaggagccgagttcagatccgccactccgcacccgagactgacacactgaactccacttcctcctcttaaatttatttctacttaatagccactcgtctctttttttccccatctcattgctccaagaatttttttcttcttactcgccaaagtcagggttccctctgcccgtcccgtattaatatttccacttttggaactactggccttttctttttaaaggaattcaagcaggatacgtttttctgttgggcattgactagattgtttgcaaaagtttcgcatcaaaaacaacaacaacaaaaaaccaaacaactctccttgatctatactttgagaattgttgatttcttttttttattctgacttttaaaaacaacttttttttccacttttttaaaaaatgcactactgtgtgctgagcgcttttctgatcctgcatctggtcacggtcgcgctcagcctgtctacctgcagcacactcgatatggaccagttcatgcgcaagaggatcgaggcgatccgcgggcagatcctgagcaagctgaagctcaccagtcccccagaagactatcctgagcccgaggaagtccccccggaggtgatttccatctacaacagcaccagggacttgctccaggagaaggcgagccggagggcggccgcctgcgagcgcgagaggagcgacgaagagtactacgccaaggaggtttacaaaatagacatgccgcccttcttcccctccgaaaatgccatcccgcccactttctacagaccctacttcagaattgttcgatttgacgtctcagcaatggagaagaatgcttccaatttggtgaaagcagagttcagagtctttcgtttgcagaacccaaaagccagagtgcctgaacaacggattgagctatatcagattctcaagtccaaagatttaacatctccaacccagcgctacatcgacagcaaagttgtgaaaacaagagcagaaggcgaatggctctccttcgatgtaactgatgctgttcatgaatggcttcaccataaagacaggaacctgggatttaaaataagcttacactgtccctgctgcacttttgtaccatctaataattacatcatcccaaataaaagtgaagaactagaagcaagatttgcaggtattgatggcacctccacatataccagtggtgatcagaaaactataaagtccactaggaaaaaaaacagtgggaagaccccacatctcctgctaatgttattgccctcctacagacttgagtcacaacagaccaaccggcggaagaagcgtgctttggatgcggcctattgctttagaaatgtgcaggataattgctgcctacgtccactttacattgatttcaagagggatctagggtggaaatggatacacgaacccaaagggtacaatgccaacttctgtgctggagcatgcccgtatttatggagttcagacactcagcacagcagggtcctgagcttatataataccataaatccagaagcatctgcttctccttgctgcgtgtcccaagatttagaacctctaaccattctctactacattggcaaaacacccaagattgaacagctttctaatatgattgtaaagtcttgcaaatgcagctaaaattcttggaaaagtggcaagaccaaaatgacaatgatgatgataatgatgatgacgacgacaacgatgatgcttgtaacaagaaaacataagagagccttggttcatcagtgttaaaaaatttttgaaaaggcggtactagttcagacactttggaagtttgtgttctgtttgttaaaactggcatctgacacaaaaaaagttgaaggccttattctacatttcacctactttgtaagtgagagagacaagaagcaaattttttttaaagaaaaaaataaacactggaagaatttattagtgttaattatgtgaacaacgacaacaacaacaacaacaacaaacaggaaaatcccattaagtggagttgctgtacgtaccgttcctatcccgcgcctcacttgatttttctgtattgctatgcaataggcacccttcccattcttactcttagagttaacagtgagttatttattgtgtgttactatataatgaacgtttcattgcccttggaaaataaaacaggtgtataaagtggagaccaaatactttgccagaaactcatggatggcttaaggaacttgaactcaaacgagccagaaaaaaagaggtcatattaatgggatgaaaacccaagtgagttattatatgaccgagaaagtctgcattaagataaagaccctgaaaacacatgttatgtatcagctgcctaaggaagcttcttgtaaggtccaaaaactaaaaagactgttaataaaagaaactttcagtcagaataagtctgtaagtttttttttttctttttaattgtaaatggttctttgtcagtttagtaaaccagtgaaatgttgaaatgttttgacatgtactggtcaaacttcagaccttaaaatattgctgtatagctatgctataggttttttcctttgttttggtatatgtaaccatacctatattattaaaatagatggatatagaagccagcataattgaaaacacatctgcagatctcttttgcaaactattaaatcaaaacattaactactttatgtgtaatgtgtaaatttttaccatattttttatattctgtaataatgtcaactatgatttagattgacttaaatttgggctctttttaatgatcactcacaaatgtatgtttcttttagctggccagtacttttgagtaaagcccctatagtttgacttgcactacaaatgcattttttttttaataacatttgccctacttgtgctttgtgtttctttcattattatgacataagctacctgggtccacttgtcttttcttttttttgtttcacagaaaagatgggttcgagttcagtggtcttcatcttccaagcatcattactaaccaagtcagacgttaacaaatttttatgttaggaaaaggaggaatgttatagatacatagaaaattgaagtaaaatgttttcattttagcaaggatttagggttctaactaaaactcagaatctttattgagttaagaaaagtttctctaccttggtttaatcaatatttttgtaaaatcctattgttattacaaagaggacacttcataggaaacatctttttctttagtcaggtttttaatattcagggggaaattgaaagatatatattttagtcgatttttcaaaaggggaaaaaagtccaggtcagcataagtcattttgtgtatttcactgaagttataaggtttttataaatgttctttgaaggggaaaaggcacaagccaatttttcctatgatcaaaaaattctttctttcctctgagtgagagttatctatatctgaggctaaagtttaccttgctttaataaataatttgccacatcattgcagaagaggtatcctcatgctggggttaatagaatatgtcagtttatcacttgtcgcttatttagctttaaaataaaaattaataggcaaagcaatggaatatttgcagtttcacctaaagagcagcataaggaggcgggaatccaaagtgaagttgtttgatatggtctacttcttttttggaatttcctgaccattaattaaagaattggatttgcaagtttgaaaactggaaaagcaagagatgggatgccataatagtaaacagcccttgtgttggatgtaacccaatcccagatttgagtgtgtgttgattatttttttgtcttccacttttctattatgtgtaaatcacttttatttctgcagacattttcctctcagataggatgacattttgttttgtattattttgtctttcctcatgaatgcactgataatattttaaatgctctattttaagatctcttgaatctgttttttttttttttaatttgggggttctgtaaggtctttatttcccataagtaaatattgccatgggaggggggtggaggtggcaaggaaggggtgaagtgctagtatgcaagtgggcagcaattatttttgtgttaatcagcagtacaatttgatcgttggcatggttaaaaaatggaatataagattagctgttttgtattttgatgaccaattacgctgtattttaacacgatgtatgtctgtttttgtggtgctctagtggtaaataaattatttcgatgatatgtggatgtctttttcctatcagtaccatcatcgagtctagaaaacacctgtgatgcaataagactatctcaagctggaaaagtcataccacctttccgattgccctctgtgctttctcccttaaggacagtcacttcagaagtcatgctttaaagcacaagagtcaggccatatccatcaaggatagaagaaatccctgtgccgtctttttattcccttatttattgctatttggtaattgtttgagatttagtttccatccagcttgactgccgaccagaaaaaatgcagagagatgtttgcaccatgctttggctttctggttctatgttctgccaacgccagggccaaaagaactggtctagacagtatcccctgtagccccataacttggatagttgctgagccagccagatataacaagagccacgtgctttctggggttggttgtttgggatcagctacttgcctgtcagtttcactggtaccactgcaccacaaacaaaaaaacccaccctatttcctccaatttttttggctgctacctacaagaccagactcctcaaacgagttgccaatctcttaataaataggattaataaaaaaagtaattgtgactcaa

SEQ ID NO: 192574 - DNA, 2522 bp, Homo sapiens
  Payload ID: 18021
  Gene Name: transforming growth factor, beta 3
  Uniprot ID: P10600
  ENST ID: ENST00000238682
  CDS Start-End: 299-1537
tgcttgccctccacctggcctgctgggagtcagagcccagcaaaacctgtttagacacatggacaagaatcccagcgctacaaggcacacagtccgcttcttcgtcctcagggttgccagcgcttcctggaagtcctgaagctctcgcagtgcagtgagttcatgcaccttcttgccaagcctcagtctttgggatctggggaggccgcctggttttcctccctccttctgcacgtctgctggggtctcttcctctccaggccttgccgtccccctggcctctcttcccagctcacacatgaagatgcacttgcaaagggctctggtggtcctggccctgctgaactttgccacggtcagcctctctctgtccacttgcaccaccttggacttcggccacatcaagaagaagagggtggaagccattaggggacagatcttgagcaagctcaggctcaccagcccccctgagccaacggtgatgacccacgtcccctatcaggtcctggccctttacaacagcacccgggagctgctggaggagatgcatggggagagggaggaaggctgcacccaggaaaacaccgagtcggaatactatgccaaagaaatccataaattcgacatgatccaggggctggcggagcacaacgaactggctgtctgccctaaaggaattacctccaaggttttccgcttcaatgtgtcctcagtggagaaaaatagaaccaacctattccgagcagaattccgggtcttgcgggtgcccaaccccagctctaagcggaatgagcagaggatcgagctcttccagatccttcggccagatgagcacattgccaaacagcgctatatcggtggcaagaatctgcccacacggggcactgccgagtggctgtcctttgatgtcactgacactgtgcgtgagtggctgttgagaagagagtccaacttaggtctagaaatcagcattcactgtccatgtcacacctttcagcccaatggagatatcctggaaaacattcacgaggtgatggaaatcaaattcaaaggcgtggacaatgaggatgaccatggccgtggagatctggggcgcctcaagaagcagaaggatcaccacaaccctcatctaatcctcatgatgattcccccacaccggctcgacaacccgggccaggggggtcagaggaagaagcgggctttggacaccaattactgcttccgcaacttggaggagaactgctgtgtgcgccccctctacattgacttccgacaggatctgggctggaagtgggtccatgaacctaagggctactatgccaacttctgctcaggcccttgcccatacctccgcagtgcagacacaacccacagcacggtgctgggactgtacaacactctgaaccctgaagcatctgcctcgccttgctgcgtgccccaggacctggagcccctgaccatcctgtactatgttgggaggacccccaaagtggagcagctctccaacatggtggtgaagtcttgtaaatgtagctgagaccccacgtgcgacagagagaggggagagagaaccaccactgcctgactgcccgctcctcgggaaacacacaagcaacaaacctcactgagaggcctggagcccacaaccttcggctccgggcaaatggctgagatggaggtttccttttggaacatttctttcttgctggctctgagaatcacggtggtaaagaaagtgtgggtttggttagaggaaggctgaactcttcagaacacacagactttctgtgacgcagacagaggggatggggatagaggaaagggatggtaagttgagatgttgtgtggcaatgggatttgggctaccctaaagggagaaggaagggcagagaatggctgggtcagggccagactggaagacacttcagatctgaggttggatttgctcattgctgtaccacatctgctctagggaatctggattatgttatacaaggcaagcattttttttttttttttaaagacaggttacgaagacaaagtcccagaattgtatctcatactgtctgggattaagggcaaatctattacttttgcaaactgtcctctacatcaattaacatcgtgggtcactacagggagaaaatccaggtcatgcagttcctggcccatcaactgtattgggccttttggatatgctgaacgcagaagaaagggtggaaatcaaccctctcctgtctgccctctgggtccctcctctcacctctccctcgatcatatttccccttggacacttggttagacgccttccaggtcaggatgcacatttctggattgtggttccatgcagccttggggcattatgggttcttcccccacttcccctccaagaccctgtgttcatttggtgttcctggaagcaggtgctacaacatgtgaggcattcggggaagctgcacatgtgccacacagtgacttggccccagacgcatagactgaggtataaagacaagtatgaatat

SEQ ID NO: 192575 - DNA, 1280 bp, Homo sapiens
  Payload ID: 18021
  Gene Name: transforming growth factor, beta 3
  Uniprot ID: P10600
  ENST ID: ENST00000556285
  CDS Start-End: 101-1030
ggggaggccgcctggttttcctccctccttctgcacgtctgctggggtctcttcctctccaggccttgccgtccccctggcctctcttcccagctcacacatgaagatgcacttgcaaagggctctggtggtcctggccctgctgaactttgccacggtcagcctctctctgtccacttgcaccaccttggacttcggccacatcaagaagaagagggtggaagccattaggggacagatcttgagcaagctcaggctcaccagcccccctgagccaacggtgatgacccacgtcccctatcaggtcctggccctttacaacagcacccgggagctgctggaggagatgcatggggagagggaggaaggctgcacccaggaaaacaccgagtcggaatactatgccaaagaaatccataaattcgacatgatccaggggctggcggagcacaacgaactggctgtctgccctaaaggaattacctccaaggttttccgcttcaatgtgtcctcagtggagaaaaatagaaccaacctattccgagcagaattccgggtcttgcgggtgcccaaccccagctctaagcggaatgagcagaggatcgagctcttccagatccttcggccagatgagcacattgccaaacagcgctatatcggtggcaagaatctgcccacacggggcactgccgagtggctgtcctttgatgtcactgacactgtgcgtgagtggctgttgagaagagagtccaacttaggtctagaaatcagcattcactgtccatgtcacacctttcagcccaatggagatatcctggaaaacattcacgaggtgatggaaatcaaattcaaaggcgtggacaatgaggatgaccatggccgtggagatctggggcgcctcaagaagcagaaggatcaccacaaccctcatctaatcctcatgatgattcccccacaccggctcgacaacccgggccaggggggtcagaggaagaagcgggctttggacaccaattactgcttccggtgagactgggcccacatgggaaccaacatctactgcctgcctactgcccaatggctaggtcaggccccagagccaagccacactcaacagagggtccctgatgctattcacaaacatctccaggaagaagactgaaaatctctcacagagattttctctgtgaaatctctttctgttttcctgggagtcccactgtttttccataggctaactctggaaggagctggctgaagtaaatgaggaaaactctgtg

SEQ ID NO: 192576 - DNA, 5720 bp, Homo sapiens
  Payload ID: 18022
  Gene Name: transforming growth factor, beta receptor 1
  Uniprot ID: P36897
  ENST ID: ENST00000374990
  CDS Start-End: 96-1376
gcggcggctagggaggtggggcgaggcgaggtttgctggggtgaggcagcggcgcggccgggccgggccgggccacaggcggtggcggcgggaccatggaggcggcggtcgctgctccgcgtccccggctgctcctcctcgtgctggcggcggcggcggcggcggcggcggcgctgctcccgggggcgacggcgttacagtgtttctgccacctctgtacaaaagacaattttacttgtgtgacagatgggctctgctttgtctctgtcacagagaccacagacaaagttatacacaacagcatgtgtatagctgaaattgacttaattcctcgagataggccgtttgtatgtgcaccctcttcaaaaactgggtctgtgactacaacatattgctgcaatcaggaccattgcaataaaatagaacttccaactactggtttaccattgcttgttcagagaacaattgcgagaactattgtgttacaagaaagcattggcaaaggtcgatttggagaagtttggagaggaaagtggcggggagaagaagttgctgttaagatattctcctctagagaagaacgttcgtggttccgtgaggcagagatttatcaaactgtaatgttacgtcatgaaaacatcctgggatttatagcagcagacaataaagacaatggtacttggactcagctctggttggtgtcagattatcatgagcatggatccctttttgattacttaaacagatacacagttactgtggaaggaatgataaaacttgctctgtccacggcgagcggtcttgcccatcttcacatggagattgttggtacccaaggaaagccagccattgctcatagagatttgaaatcaaagaatatcttggtaaagaagaatggaacttgctgtattgcagacttaggactggcagtaagacatgattcagccacagataccattgatattgctccaaaccacagagtgggaacaaaaaggtacatggcccctgaagttctcgatgattccataaatatgaaacattttgaatccttcaaacgtgctgacatctatgcaatgggcttagtattctgggaaattgctcgacgatgttccattggtggaattcatgaagattaccaactgccttattatgatcttgtaccttctgacccatcagttgaagaaatgagaaaagttgtttgtgaacagaagttaaggccaaatatcccaaacagatggcagagctgtgaagccttgagagtaatggctaaaattatgagagaatgttggtatgccaatggagcagctaggcttacagcattgcggattaagaaaacattatcgcaactcagtcaacaggaaggcatcaaaatgtaattctacagctttgcctgaactctccttttttcttcagatctgctcctgggttttaatttgggaggtcaattgttctacctcactgagagggaacagaaggatattgcttccttttgcagcagtgtaataaagtcaattaaaaacttcccaggatttctttggacccaggaaacagccatgtgggtcctttctgtgcactatgaacgcttctttcccaggacagaaaatgtgtagtctacctttattttttattaacaaaacttgttttttaaaaagatgattgctggtcttaactttaggtaactctgctgtgctggagatcatctttaagggcaaaggagttggattgctgaattacaatgaaacatgtcttattactaaagaaagtgatttactcctggttagtacattctcagaggattctgaaccactagagtttccttgattcagactttgaatgtactgttctatagtttttcaggatcttaaaactaacacttataaaactcttatcttgagtctaaaaatgacctcatatagtagtgaggaacataattcatgcaattgtattttgtatactattattgttctttcacttattcagaacattacatgccttcaaaatgggattgtactataccagtaagtgccacttctgtgtctttctaatggaaatgagtagaattgctgaaagtctctatgttaaaacctatagtgtttgaattcaaaaagcttatttatctgggtaacccaaactttttctgttttgtttttggaagggtttttgtggtatgtcatttggtattctattctgaaaatgcctttctcctaccaaaatgtgcttaagccactaaagaaatgaagtggcattaattagtaaattattagcatggtcatgtttgaatattctcacatcaagcttttgcattttaattgtgttgtctaagtatacttttaaaaaatcaagtggcactctagatgcttatagtactttaatatttgtagcatacagactaatttttctaaaagggaaagtctgtctagctgcttgtgaaaagttatgtggtattctgtaagccatttttttctttatctgttcaaagacttattttttaagacatgaattacatttaaaattagaatatggttaatattaaataataggcctttttctaggaaggcgaaggtagttaataatttgaatagataacagatgtgcaagaaagtcacatttgttatgtatgtaggagtaaacgttcggtggatcctctgtctttgtaactgaggttagagctagtgtggttttgaggtctcactacactttgaggaaggcagcttttaattcagtgtttccttatgtgtgcgtacattgcaactgcttacatgtaatttatgtaatgcattcagtgcacccttgttacttgggagaggtggtagctaaagaacattctgagtataggtttttctccatttacagatgtctttggtcaaatattgaaagcaaacttgtcatggtcttcttacattaagttgaaactagcttataataactggtttttacttccaatgctatgaagtctctgcagggcttttacagttttcgaagtccttttatcactgtgatcttattctgaggggagaaaaaactatcatagctctgaggcaagacttcgactttatagtgctatcagttccccgatacagggtcagagtaacccatacagtattttggtcaggaagagaaagtggccatttacactgaatgagttgcattctgataatgtcttatctcttatacgtagaataaatttgaaagactatttgatcttaaaaccaaagtaattttagaatgagtgacatattacataggaatttagtgtcaatttcatgtgtttaaaaacatcatgggaaaaatgcttagaggttactattttgactacaaagttgagtttttttctgtagttaccataatttcattgaagcaaatgaatgagtttgagaggtttgtttttatagttgtgttgtattacttgtttaataataatctctaattctgtgatcaggtactttttttgtgggggttttttttttgtttttttttttttgttgttgtttttgggccatttctaagcctaccagatctgctttatgaaatccaggggaccaatgcattttatcactaaaactatttttatataattttaagaatataccaaaagttgtctgatttaaagttgtaatacatgatttctcactttcatgtaaggttatccacttttgctgaagatattttttattgaatcaaagattgagttacaattatacttttcttacctaagtggataaaatgtacttttgatgaatcagggaatttttttaaagttggagtttagttctaaattgactttacgtattactgcagttaattccttttttggctagggatggtttgataaaccacaattggctgatattgaaaatgaaagaaacttaaaaggtgggatggatcatgattactgtcgataactgcagataaatttgattagagtaataattttgtcatttaaaaacacagttgtttatactgcccatcctaggatgctcaccttccaagattcaacgtggctaaaacatcttctggtaaattgtgcgtccatattcattttgtcagtagccaggagaaatggggatgggggaaatacgacttagtgaggcatagacatccctggtccatcctttctgtctccagctgtttcttggaacctgctctcctgcttgctggtccctgacgcagagaccgttgcctcccccacagccgtttgactgaaggctgctctggagacctagagtaaaacggctgatggaagttgtgggacccacttccatttccttcagtcattagaggtggaagggaggggtctccaagtttggagattgagcagatgaggcttgggatgcccctgctttgacttcagccatggatgaggagtgggatggcagcaaggtggctcctgtggcagtggagttgtgccagaaacagtggccagttgtatcgcctataagacagggtaaggtctgaagagctgagcctgtaattctgctgtaataatgatagtgctcaagaagtgccttgagttggtgtacagtgccatggccatcaagaatcccagatttcaggttttattacaaaatgtaagtggtcacttggcgattttgtagtacatgcatgagttaccttttttctctatgtctgagaactgtcagattaaaacaagatggcaaagagatcgttagagtgcacaacaaaatcactatcccattagacacatcatcaaaagcttatttttattcttgcactggaagaatcgtaagtcaactgtttcttgaccatggcagtgttctggctccaaatggtagtgattccaaataatggttctgttaacactttggcagaaaatgccagctcagatattttgagatactaaggattatctttggacatgtactgcagcttcttgtctctgttttggattactggaatacccatgggccctctcaagagtgctggacttctaggacattaagatgattgtcagtacattaaacttttcaatcccattatgcaatcttgtttgtaaatgtaaacttctaaaaatatggttaataacattcaacctgtttattacaacttaaaaggaacttcagtgaatttgtttttattttttaacaagatttgtgaactgaatatcatgaaccatgttttgatacccctttttcacgttgtgccaacggaatagggtgtttgatatttcttcatatgttaaggagatgcttcaaaatgtcaattgctttaaacttaaattacctctcaagagaccaaggtacatttacctcattgtgtatataatgtttaatatttgtcagagcattctccaggtttgcagttttatttctataaagtatgggtattatgttgctcagttactcaaatggtactgtattgtttatatttgtaccccaaataacatcgtctgtactttctgttttctgtattgtatttgtgcaggattctttaggctttatcagtgtaatctctgccttttaagatatgtacagaaaatgtccatataaatttccattgaagtcgaatgatactgagaagcctgtaaagaggagaaaaaaacataagctgtgtttccccataagtttttttaaattgtatattgtatttgtagtaatattccaaaagaatgtaaataggaaatagaagagtgatgcttatgttaagtcctaacactacagtagaagaatggaagcagtgcaaataaattacatttttcccaa

SEQ ID NO: 192577 - DNA, 6516 bp, Homo sapiens
  Payload ID: 18022
  Gene Name: transforming growth factor, beta receptor 1
  Uniprot ID: P36897
  ENST ID: ENST00000374994
  CDS Start-End: 118-1629
aaagggccggagcgaggccgccgcggcggctagggaggtggggcgaggcgaggtttgctggggtgaggcagcggcgcggccgggccgggccgggccacaggcggtggcggcgggaccatggaggcggcggtcgctgctccgcgtccccggctgctcctcctcgtgctggcggcggcggcggcggcggcggcggcgctgctcccgggggcgacggcgttacagtgtttctgccacctctgtacaaaagacaattttacttgtgtgacagatgggctctgctttgtctctgtcacagagaccacagacaaagttatacacaacagcatgtgtatagctgaaattgacttaattcctcgagataggccgtttgtatgtgcaccctcttcaaaaactgggtctgtgactacaacatattgctgcaatcaggaccattgcaataaaatagaacttccaactactgtaaagtcatcacctggccttggtcctgtggaactggcagctgtcattgctggaccagtgtgcttcgtctgcatctcactcatgttgatggtctatatctgccacaaccgcactgtcattcaccatcgagtgccaaatgaagaggacccttcattagatcgcccttttatttcagagggtactacgttgaaagacttaatttatgatatgacaacgtcaggttctggctcaggtttaccattgcttgttcagagaacaattgcgagaactattgtgttacaagaaagcattggcaaaggtcgatttggagaagtttggagaggaaagtggcggggagaagaagttgctgttaagatattctcctctagagaagaacgttcgtggttccgtgaggcagagatttatcaaactgtaatgttacgtcatgaaaacatcctgggatttatagcagcagacaataaagacaatggtacttggactcagctctggttggtgtcagattatcatgagcatggatccctttttgattacttaaacagatacacagttactgtggaaggaatgataaaacttgctctgtccacggcgagcggtcttgcccatcttcacatggagattgttggtacccaaggaaagccagccattgctcatagagatttgaaatcaaagaatatcttggtaaagaagaatggaacttgctgtattgcagacttaggactggcagtaagacatgattcagccacagataccattgatattgctccaaaccacagagtgggaacaaaaaggtacatggcccctgaagttctcgatgattccataaatatgaaacattttgaatccttcaaacgtgctgacatctatgcaatgggcttagtattctgggaaattgctcgacgatgttccattggtggaattcatgaagattaccaactgccttattatgatcttgtaccttctgacccatcagttgaagaaatgagaaaagttgtttgtgaacagaagttaaggccaaatatcccaaacagatggcagagctgtgaagccttgagagtaatggctaaaattatgagagaatgttggtatgccaatggagcagctaggcttacagcattgcggattaagaaaacattatcgcaactcagtcaacaggaaggcatcaaaatgtaattctacagctttgcctgaactctccttttttcttcagatctgctcctgggttttaatttgggaggtcaattgttctacctcactgagagggaacagaaggatattgcttccttttgcagcagtgtaataaagtcaattaaaaacttcccaggatttctttggacccaggaaacagccatgtgggtcctttctgtgcactatgaacgcttctttcccaggacagaaaatgtgtagtctacctttattttttattaacaaaacttgttttttaaaaagatgattgctggtcttaactttaggtaactctgctgtgctggagatcatctttaagggcaaaggagttggattgctgaattacaatgaaacatgtcttattactaaagaaagtgatttactcctggttagtacattctcagaggattctgaaccactagagtttccttgattcagactttgaatgtactgttctatagtttttcaggatcttaaaactaacacttataaaactcttatcttgagtctaaaaatgacctcatatagtagtgaggaacataattcatgcaattgtattttgtatactattattgttctttcacttattcagaacattacatgccttcaaaatgggattgtactataccagtaagtgccacttctgtgtctttctaatggaaatgagtagaattgctgaaagtctctatgttaaaacctatagtgtttgaattcaaaaagcttatttatctgggtaacccaaactttttctgttttgtttttggaagggtttttgtggtatgtcatttggtattctattctgaaaatgcctttctcctaccaaaatgtgcttaagccactaaagaaatgaagtggcattaattagtaaattattagcatggtcatgtttgaatattctcacatcaagcttttgcattttaattgtgttgtctaagtatacttttaaaaaatcaagtggcactctagatgcttatagtactttaatatttgtagcatacagactaatttttctaaaagggaaagtctgtctagctgcttgtgaaaagttatgtggtattctgtaagccatttttttctttatctgttcaaagacttattttttaagacatgaattacatttaaaattagaatatggttaatattaaataataggcctttttctaggaaggcgaaggtagttaataatttgaatagataacagatgtgcaagaaagtcacatttgttatgtatgtaggagtaaacgttcggtggatcctctgtctttgtaactgaggttagagctagtgtggttttgaggtctcactacactttgaggaaggcagcttttaattcagtgtttccttatgtgtgcgtacattgcaactgcttacatgtaatttatgtaatgcattcagtgcacccttgttacttgggagaggtggtagctaaagaacattctgagtataggtttttctccatttacagatgtctttggtcaaatattgaaagcaaacttgtcatggtcttcttacattaagttgaaactagcttataataactggtttttacttccaatgctatgaagtctctgcagggcttttacagttttcgaagtccttttatcactgtgatcttattctgaggggagaaaaaactatcatagctctgaggcaagacttcgactttatagtgctatcagttccccgatacagggtcagagtaacccatacagtattttggtcaggaagagaaagtggccatttacactgaatgagttgcattctgataatgtcttatctcttatacgtagaataaatttgaaagactatttgatcttaaaaccaaagtaattttagaatgagtgacatattacataggaatttagtgtcaatttcatgtgtttaaaaacatcatgggaaaaatgcttagaggttactattttgactacaaagttgagtttttttctgtagttaccataatttcattgaagcaaatgaatgagtttgagaggtttgtttttatagttgtgttgtattacttgtttaataataatctctaattctgtgatcaggtactttttttgtgggggttttttttttgtttttttttttttgttgttgtttttgggccatttctaagcctaccagatctgctttatgaaatccaggggaccaatgcattttatcactaaaactatttttatataattttaagaatataccaaaagttgtctgatttaaagttgtaatacatgatttctcactttcatgtaaggttatccacttttgctgaagatattttttattgaatcaaagattgagttacaattatacttttcttacctaagtggataaaatgtacttttgatgaatcagggaatttttttaaagttggagtttagttctaaattgactttacgtattactgcagttaattccttttttggctagggatggtttgataaaccacaattggctgatattgaaaatgaaagaaacttaaaaggtgggatggatcatgattactgtcgataactgcagataaatttgattagagtaataattttgtcatttaaaaacacagttgtttatactgcccatcctaggatgctcaccttccaagattcaacgtggctaaaacatcttctggtaaattgtgcgtccatattcattttgtcagtagccaggagaaatggggatgggggaaatacgacttagtgaggcatagacatccctggtccatcctttctgtctccagctgtttcttggaacctgctctcctgcttgctggtccctgacgcagagaccgttgcctcccccacagccgtttgactgaaggctgctctggagacctagagtaaaacggctgatggaagttgtgggacccacttccatttccttcagtcattagaggtggaagggaggggtctccaagtttggagattgagcagatgaggcttgggatgcccctgctttgacttcagccatggatgaggagtgggatggcagcaaggtggctcctgtggcagtggagttgtgccagaaacagtggccagttgtatcgcctataagacagggtaaggtctgaagagctgagcctgtaattctgctgtaataatgatagtgctcaagaagtgccttgagttggtgtacagtgccatggccatcaagaatcccagatttcaggttttattacaaaatgtaagtggtcacttggcgattttgtagtacatgcatgagttaccttttttctctatgtctgagaactgtcagattaaaacaagatggcaaagagatcgttagagtgcacaacaaaatcactatcccattagacacatcatcaaaagcttatttttattcttgcactggaagaatcgtaagtcaactgtttcttgaccatggcagtgttctggctccaaatggtagtgattccaaataatggttctgttaacactttggcagaaaatgccagctcagatattttgagatactaaggattatctttggacatgtactgcagcttcttgtctctgttttggattactggaatacccatgggccctctcaagagtgctggacttctaggacattaagatgattgtcagtacattaaacttttcaatcccattatgcaatcttgtttgtaaatgtaaacttctaaaaatatggttaataacattcaacctgtttattacaacttaaaaggaacttcagtgaatttgtttttattttttaacaagatttgtgaactgaatatcatgaaccatgttttgatacccctttttcacgttgtgccaacggaatagggtgtttgatatttcttcatatgttaaggagatgcttcaaaatgtcaattgctttaaacttaaattacctctcaagagaccaaggtacatttacctcattgtgtatataatgtttaatatttgtcagagcattctccaggtttgcagttttatttctataaagtatgggtattatgttgctcagttactcaaatggtactgtattgtttatatttgtaccccaaataacatcgtctgtactttctgttttctgtattgtatttgtgcaggattctttaggctttatcagtgtaatctctgccttttaagatatgtacagaaaatgtccatataaatttccattgaagtcgaatgatactgagaagcctgtaaagaggagaaaaaaacataagctgtgtttccccataagtttttttaaattgtatattgtatttgtagtaatattccaaaagaatgtaaataggaaatagaagagtgatgcttatgttaagtcctaacactacagtagaagaatggaagcagtgcaaataaattacatttttcccaagtgccagtggcatattttaaaataaagtgtatacgttggaatgagtcatgccatatgtagttgctgtagatggcaactagaacctttgagttacaagagtctttagaagttttctaaccctgcctagtgcaagttacaatattatagcgtgttcggggagtgccctcctgtctgcaggtgtgtctctgtgcctgggggcttttctccacatgcttaggggtgtgggtcttccattggggcatgatggacctgtctacaggtgatctctgttgcctttgggtcagcacatttgttagtctcctgggggtgaaaacttggcttacaagagaactggaaaaatgatgagatgtggtccccaaacccttgattgactctggggaggggctttgtgaataggattgctctcacattaaagatagttacttcaatttgaaggctggatttagggatttttttttttccttataacaaagacatcaccaggatatgaagcttttgttgaaagttggaaaaaaagtgaaattaaagacattcccagacaaa

SEQ ID NO: 192578 - DNA, 1678 bp, Homo sapiens
  Payload ID: 18022
  Gene Name: transforming growth factor, beta receptor 1
  ENST ID: ENST00000549766
  CDS Start-End: 57-1208
ggtgaggcagcggcgcggccgggccgggccgggccacaggcggtggcggcgggaccatggaggcggcggtcgctgctccgcgtccccggctgctcctcctcgtgctggcggcggcggcggcggcggcggcggcgctgctcccgggggcgacggcgttacagtgtttctgccacctctgtacaaaagacaattttacttgtgtgacagatgggctctgctttgtctctgtcacagagaccacagacaaagttatacacaacagcatgtgtatagctgaaattgacttaattcctcgagataggccgtttgtatgtgcaccctcttcaaaaactgggtctgtgactacaacatattgctgcaatcaggaccattgcaataaaatagaacttccaactactggccctttttcagtaaagtcatcacctggccttggtcctgtggaactggcagctgtcattgctggaccagtgtgcttcgtctgcatctcactcatgttgatggtctatatctgccacaaccgcactgtcattcaccatcgagtgccaaatgaagaggacccttcattagatcgcccttttatttcagagggtactacgttgaaagacttaatttatgatatgacaacgtcaggttctggctcaggtttaccattgcttgttcagagaacaattgcgagaactattgtgttacaagaaagcattggcaaaggtcgatttggagaagtttggagaggaaagtggcggggagaagaagttgctgttaagatattctcctctagagaagaacgttcgtggttccgtgaggcagagatttatcaaactgtaatgttacgtcatgaaaacatcctgggatttatagcagcagacaataaagacaatggtacttggactcagctctggttggtgtcagattatcatgagcatggatccctttttgattacttaaacagatacacagttactgtggaaggaatgataaaacttgctctgtccacggcgagcggtcttgcccatcttcacatggagattgttggtacccaaggaaagccagccattgctcatagagatttgaaatcaaagaatatcttggtaaagaagaatggaacttgctgtattgcagacttaggactggcagtaagacatgattcagccacagataccattgatattgctccaaaccacagagtgggaacaaaaaggaattcatgaagattaccaactgccttattatgatcttgtaccttctgacccatcagttgaagaaatgagaaaagttgtttgtgaacagaagttaaggccaaatatcccaaacagatggcagagctgtgaagccttgagagtaatggctaaaattatgagagaatgttggtatgccaatggagcagctaggcttacagcattgcggattaagaaaacattatcgcaactcagtcaacaggaaggcatcaaaatgtaattctacagctttgcctgaactctccttttttcttcagatctgctcctgggttttaatttgggaggtcaattgttctacctcactgagagggaacagaaggatattgcttccttttgcagcagtgtaataaagtcaattaaaaacttcccaggatttctttggacccaggaaacagccatgtgggtcctttctgtgcactatgaacgcttctttcccaggacag

SEQ ID NO: 192579 - DNA, 526 bp, Homo sapiens
  Payload ID: 18022
  Gene Name: transforming growth factor, beta receptor 1
  ENST ID: ENST00000552573
  CDS Start-End: 148-526
acaaatctggagctcattttggcgtcgcagagggaagcgttacagtgtttctgccacctctgtacaaaagacaattttacttgtgtgacagatgggctctgctttgtctctgtcacagagaccacagacaaagttatacacaacagcatgtgtatagctgaaattgacttaattcctcgagataggccgtttgtatgtgcaccctcttcaaaaactgggtctgtgactacaacatattgctgcaatcaggaccattgcaataaaatagaacttccaactactggccctttttcagtaaagtcatcacctggccttggtcctgtggaactggcagctgtcattgctggaccagtgtgcttcgtctgcatctcactcatgttgatggtctatatctgccacaaccgcactgtcattcaccatcgagtgccaaatgaagaggacccttcattagatcgcccttttatttcagagggtactacgttgaaagacttaatttatgatatgacaacgtcaggttctggctcag

SEQ ID NO: 192580 - DNA, 5933 bp, Homo sapiens
  Payload ID: 18022
  Gene Name: transforming growth factor, beta receptor 1
  Uniprot ID: P36897
  ENST ID: ENST00000552516
  CDS Start-End: 57-1580
ggtgaggcagcggcgcggccgggccgggccgggccacaggcggtggcggcgggaccatggaggcggcggtcgctgctccgcgtccccggctgctcctcctcgtgctggcggcggcggcggcggcggcggcggcgctgctcccgggggcgacggcgttacagtgtttctgccacctctgtacaaaagacaattttacttgtgtgacagatgggctctgctttgtctctgtcacagagaccacagacaaagttatacacaacagcatgtgtatagctgaaattgacttaattcctcgagataggccgtttgtatgtgcaccctcttcaaaaactgggtctgtgactacaacatattgctgcaatcaggaccattgcaataaaatagaacttccaactactggccctttttcagtaaagtcatcacctggccttggtcctgtggaactggcagctgtcattgctggaccagtgtgcttcgtctgcatctcactcatgttgatggtctatatctgccacaaccgcactgtcattcaccatcgagtgccaaatgaagaggacccttcattagatcgcccttttatttcagagggtactacgttgaaagacttaatttatgatatgacaacgtcaggttctggctcaggtttaccattgcttgttcagagaacaattgcgagaactattgtgttacaagaaagcattggcaaaggtcgatttggagaagtttggagaggaaagtggcggggagaagaagttgctgttaagatattctcctctagagaagaacgttcgtggttccgtgaggcagagatttatcaaactgtaatgttacgtcatgaaaacatcctgggatttatagcagcagacaataaagacaatggtacttggactcagctctggttggtgtcagattatcatgagcatggatccctttttgattacttaaacagatacacagttactgtggaaggaatgataaaacttgctctgtccacggcgagcggtcttgcccatcttcacatggagattgttggtacccaaggaaagccagccattgctcatagagatttgaaatcaaagaatatcttggtaaagaagaatggaacttgctgtattgcagacttaggactggcagtaagacatgattcagccacagataccattgatattgctccaaaccacagagtgggaacaaaaaggtacatggcccctgaagttctcgatgattccataaatatgaaacattttgaatccttcaaacgtgctgacatctatgcaatgggcttagtattctgggaaattgctcgacgatgttccattggtggaattcatgaagattaccaactgccttattatgatcttgtaccttctgacccatcagttgaagaaatgagaaaagttgtttgtgaacagaagttaaggccaaatatcccaaacagatggcagagctgtgaagccttgagagtaatggctaaaattatgagagaatgttggtatgccaatggagcagctaggcttacagcattgcggattaagaaaacattatcgcaactcagtcaacaggaaggcatcaaaatgtaattctacagctttgcctgaactctccttttttcttcagatctgctcctgggttttaatttgggaggtcaattgttctacctcactgagagggaacagaaggatattgcttccttttgcagcagtgtaataaagtcaattaaaaacttcccaggatttctttggacccaggaaacagccatgtgggtcctttctgtgcactatgaacgcttctttcccaggacagaaaatgtgtagtctacctttattttttattaacaaaacttgttttttaaaaagatgattgctggtcttaactttaggtaactctgctgtgctggagatcatctttaagggcaaaggagttggattgctgaattacaatgaaacatgtcttattactaaagaaagtgatttactcctggttagtacattctcagaggattctgaaccactagagtttccttgattcagactttgaatgtactgttctatagtttttcaggatcttaaaactaacacttataaaactcttatcttgagtctaaaaatgacctcatatagtagtgaggaacataattcatgcaattgtattttgtatactattattgttctttcacttattcagaacattacatgccttcaaaatgggattgtactataccagtaagtgccacttctgtgtctttctaatggaaatgagtagaattgctgaaagtctctatgttaaaacctatagtgtttgaattcaaaaagcttatttatctgggtaacccaaactttttctgttttgtttttggaagggtttttgtggtatgtcatttggtattctattctgaaaatgcctttctcctaccaaaatgtgcttaagccactaaagaaatgaagtggcattaattagtaaattattagcatggtcatgtttgaatattctcacatcaagcttttgcattttaattgtgttgtctaagtatacttttaaaaaatcaagtggcactctagatgcttatagtactttaatatttgtagcatacagactaatttttctaaaagggaaagtctgtctagctgcttgtgaaaagttatgtggtattctgtaagccatttttttctttatctgttcaaagacttattttttaagacatgaattacatttaaaattagaatatggttaatattaaataataggcctttttctaggaaggcgaaggtagttaataatttgaatagataacagatgtgcaagaaagtcacatttgttatgtatgtaggagtaaacgttcggtggatcctctgtctttgtaactgaggttagagctagtgtggttttgaggtctcactacactttgaggaaggcagcttttaattcagtgtttccttatgtgtgcgtacattgcaactgcttacatgtaatttatgtaatgcattcagtgcacccttgttacttgggagaggtggtagctaaagaacattctgagtataggtttttctccatttacagatgtctttggtcaaatattgaaagcaaacttgtcatggtcttcttacattaagttgaaactagcttataataactggtttttacttccaatgctatgaagtctctgcagggcttttacagttttcgaagtccttttatcactgtgatcttattctgaggggagaaaaaactatcatagctctgaggcaagacttcgactttatagtgctatcagttccccgatacagggtcagagtaacccatacagtattttggtcaggaagagaaagtggccatttacactgaatgagttgcattctgataatgtcttatctcttatacgtagaataaatttgaaagactatttgatcttaaaaccaaagtaattttagaatgagtgacatattacataggaatttagtgtcaatttcatgtgtttaaaaacatcatgggaaaaatgcttagaggttactattttgactacaaagttgagtttttttctgtagttaccataatttcattgaagcaaatgaatgagtttgagaggtttgtttttatagttgtgttgtattacttgtttaataataatctctaattctgtgatcaggtactttttttgtgggggttttttttttgtttttttttttttgttgttgtttttgggccatttctaagcctaccagatctgctttatgaaatccaggggaccaatgcattttatcactaaaactatttttatataattttaagaatataccaaaagttgtctgatttaaagttgtaatacatgatttctcactttcatgtaaggttatccacttttgctgaagatattttttattgaatcaaagattgagttacaattatacttttcttacctaagtggataaaatgtacttttgatgaatcagggaatttttttaaagttggagtttagttctaaattgactttacgtattactgcagttaattccttttttggctagggatggtttgataaaccacaattggctgatattgaaaatgaaagaaacttaaaaggtgggatggatcatgattactgtcgataactgcagataaatttgattagagtaataattttgtcatttaaaaacacagttgtttatactgcccatcctaggatgctcaccttccaagattcaacgtggctaaaacatcttctggtaaattgtgcgtccatattcattttgtcagtagccaggagaaatggggatgggggaaatacgacttagtgaggcatagacatccctggtccatcctttctgtctccagctgtttcttggaacctgctctcctgcttgctggtccctgacgcagagaccgttgcctcccccacagccgtttgactgaaggctgctctggagacctagagtaaaacggctgatggaagttgtgggacccacttccatttccttcagtcattagaggtggaagggaggggtctccaagtttggagattgagcagatgaggcttgggatgcccctgctttgacttcagccatggatgaggagtgggatggcagcaaggtggctcctgtggcagtggagttgtgccagaaacagtggccagttgtatcgcctataagacagggtaaggtctgaagagctgagcctgtaattctgctgtaataatgatagtgctcaagaagtgccttgagttggtgtacagtgccatggccatcaagaatcccagatttcaggttttattacaaaatgtaagtggtcacttggcgattttgtagtacatgcatgagttaccttttttctctatgtctgagaactgtcagattaaaacaagatggcaaagagatcgttagagtgcacaacaaaatcactatcccattagacacatcatcaaaagcttatttttattcttgcactggaagaatcgtaagtcaactgtttcttgaccatggcagtgttctggctccaaatggtagtgattccaaataatggttctgttaacactttggcagaaaatgccagctcagatattttgagatactaaggattatctttggacatgtactgcagcttcttgtctctgttttggattactggaatacccatgggccctctcaagagtgctggacttctaggacattaagatgattgtcagtacattaaacttttcaatcccattatgcaatcttgtttgtaaatgtaaacttctaaaaatatggttaataacattcaacctgtttattacaacttaaaaggaacttcagtgaatttgtttttattttttaacaagatttgtgaactgaatatcatgaaccatgttttgatacccctttttcacgttgtgccaacggaatagggtgtttgatatttcttcatatgttaaggagatgcttcaaaatgtcaattgctttaaacttaaattacctctcaagagaccaaggtacatttacctcattgtgtatataatgtttaatatttgtcagagcattctccaggtttgcagttttatttctataaagtatgggtattatgttgctcagttactcaaatggtactgtattgtttatatttgtaccccaaataacatcgtctgtactttctgttttctgtattgtatttgtgcaggattctttaggctttatcagtgtaatctctgccttttaagatatgtacagaaaatgtccatataaatttccattgaagtcgaatgatactgagaagcctgtaaagaggagaaaaaaacataagctgtgtttccccataagtttttttaaattgtatattgtatttgtagtaatattccaaaagaatgtaaataggaaatagaagagtgatgcttatgttaagtcctaacactacagtagaagaatggaagcagtgcaaataaattacatttttcccaagtgccagtg

SEQ ID NO: 192581 - DNA, 565 bp, Homo sapiens
  Payload ID: 18022
  Gene Name: transforming growth factor, beta receptor 1
  ENST ID: ENST00000546584
  CDS Start-End: 199-565
aatacaggtatctggcctcaaggagtttacagtttcataggagaaagaaaaacaaaactagcaattctgaatctttctctttttccagcgttacagtgtttctgccacctctgtacaaaagacaattttacttgtgtgacagatgggctctgctttgtctctgtcacagagaccacagacaaagttatacacaacagcatgtgtatagctgaaattgacttaattcctcgagataggccgtttgtatgtgcaccctcttcaaaaactgggtctgtgactacaacatattgctgcaatcaggaccattgcaataaaatagaacttccaactactgtaaagtcatcacctggccttggtcctgtggaactggcagctgtcattgctggaccagtgtgcttcgtctgcatctcactcatgttgatggtctatatctgccacaaccgcactgtcattcaccatcgagtgccaaatgaagaggacccttcattagatcgcccttttatttcagagggtactacgttgaaagacttaatttatgatatgacaacgtcaggttctggctcag

SEQ ID NO: 192582 - DNA, 582 bp, Homo sapiens
  Payload ID: 18022
  Gene Name: transforming growth factor, beta receptor 1
  ENST ID: ENST00000548365
  CDS Start-End: 240-582
ttttttgaatgctgctgtgcatgaggcatggtgttagatggcagattgacagaaatgactaatacaggtatctggcctcaaggagtttacagtttcataggagaaagaaaaacaaaactagcaattctgcgttacagtgtttctgccacctctgtacaaaagacaattttacttgtgtgacagatgggctctgctttgtctctgtcacagagaccacagacaaagttatacacaacagcatgtgtatagctgaaattgacttaattcctcgagataggccgtttgtatgtgcaccctcttcaaaaactgggtctgtgactacaacatattgctgcaatcaggaccattgcaataaaatagaacttccaactactggccctttttcagtaaagtcatcacctggccttggtcctgtggaactggcagctgtcattgctggaccagtgtgcttcgtctgcatctcactcatgttgatggtctatatctgccacaaccgcactgtcattcaccatcgagtgccaaatgaagaggacccttcattagatcgcccttttatttcagagggtactacgttgaaagact

SEQ ID NO: 192583 - DNA, 680 bp, Homo sapiens
  Payload ID: 18022
  Gene Name: transforming growth factor, beta receptor 1
  ENST ID: ENST00000549021
  CDS Start-End: 339-680
aattggaatgtttggatttaagaacatgtctgtgctttgcaatttcatgtgaccatggtgaaattatgcacacattctatcattgtgattcaacaagtattttttgaatgctgctgtgcatgaggcatggtgttagatggcagattgacagaaatgactaatacaggtatctggcctcaaggagtttacagtttcataggagaaagaaaaacaaaactagcaattctgcgttacagtgtttctgccacctctgtacaaaagacaattttacttgtgtgacagatgggctctgctttgtctctgtcacagagaccacagacaaagttatacacaacagcatgtgtatagctgaaattgacttaattcctcgagataggccgtttgtatgtgcaccctcttcaaaaactgggtctgtgactacaacatattgctgcaatcaggaccattgcaataaaatagaacttccaactactggtttaccattgcttgttcagagaacaattgcgagaactattgtgttacaagaaagcattggcaaaggtcgatttggagaagtttggagaggaaagtggcggggagaagaagttgctgttaagatattctcctctagagaagaacgttcgtggttccgtgaggcagagatttatcaaactgtaatgttacgtcatgaaaacatcctg

SEQ ID NO: 192584 - DNA, 533 bp, Homo sapiens
  Payload ID: 18022
  Gene Name: transforming growth factor, beta receptor 1
  ENST ID: ENST00000547314
  CDS Start-End: 180-533
ctgaagaaaggactagtctgacaggaagaattacaaatctggagctcattttggcgtcgcagagggaagcgttacagtgtttctgccacctctgtacaaaagacaattttacttgtgtgacagatgggctctgctttgtctctgtcacagagaccacagacaaagttatacacaacagcatgtgtatagctgaaattgacttaattcctcgagataggccgtttgtatgtgcaccctcttcaaaaactgggtctgtgactacaacatattgctgcaatcaggaccattgcaataaaatagaacttccaactactgtaaagtcatcacctggccttggtcctgtggaactggcagctgtcattgctggaccagtgtgcttcgtctgcatctcactcatgttgatggtctatatctgccacaaccgcactgtcattcaccatcgagtgccaaatgaagaggacccttcattagatcgcccttttatttcagagggtactacgttgaaagacttaatttatgatatgacaacgtca

SEQ ID NO: 192585 - DNA, 1538 bp, Homo sapiens
  Payload ID: 18022
  Gene Name: transforming growth factor, beta receptor 1
  ENST ID: ENST00000550253
  CDS Start-End: 198-1502
agattgacagaaatgactaatacaggtatctggcctcaaggagtttacagtttcataggagaaagaaaaacaaaactagcaattctgcgttacagtgtttctgccacctctgtacaaaagacaattttacttgtgtgacagatgggctctgctttgtctctgtcacagagaccacagacaaagttatacacaacagcatgtgtatagctgaaattgacttaattcctcgagataggccgtttgtatgtgcaccctcttcaaaaactgggtctgtgactacaacatattgctgcaatcaggaccattgcaataaaatagaacttccaactactgtaaagtcatcacctggccttggtcctgtggaactggcagctgtcattgctggaccagtgtgcttcgtctgcatctcactcatgttgatggtctatatctgccacaaccgcactgtcattcaccatcgagtgccaaatgaagaggacccttcattagatcgcccttttatttcagagggtactacgttgaaagacttaatttatgatatgacaacgtcaggttctggctcaggtttaccattgcttgttcagagaacaattgcgagaactattgtgttacaagaaagcattggcaaaggtcgatttggagaagtttggagaggaaagtggcggggagaagaagttgctgttaagatattctcctctagagaagaacgttcgtggttccgtgaggcagagatttatcaaactgtaatgttacgtcatgaaaacatcctgggatttatagcagcagacaataaagacaatggtacttggactcagctctggttggtgtcagattatcatgagcatggatccctttttgattacttaaacagatacacagttactgtggaaggaatgataaaacttgctctgtccacggcgagcggtcttgcccatcttcacatggagattgttggtacccaaggaaagccagccattgctcatagagatttgaaatcaaagaatatcttggtaaagaagaatggaacttgctgtattgcagacttaggactggcagtaagacatgattcagccacagataccattgatattgctccaaaccacagagtgggaacaaaaaggtacatggcccctgaagttctcgatgattccataaatatgaaacattttgaatccttcaaacgtgctgacatctatgcaatgggcttagtattctgggaaattgctcgacgatgttccattggtggaattcatgaagattaccaactgccttattatgatcttgtaccttctgacccatcagttgaagaaatgagaaaagttgtttgtgaacagaagttaaggccaaatatcccaaacagatggcagagctgtgaagccttgagagtaatggctaaaattatgagagaatgttggtatgccaatggagcagctaggcttacagcattgcggattaagaaaacattatcgcaactcagtcaacaggaaggcatcaaaatgtaattctacagctttgcctgaactctccttttttcttca

SEQ ID NO: 192586 - DNA, 2827 bp, Homo sapiens
  Payload ID: 18023
  Gene Name: transforming growth factor, beta receptor associated protein 1
  Uniprot ID: Q8WUH2
  ENST ID: ENST00000258449
  CDS Start-End: 21-2603
cagcagatcagccagtagacatgatgagcatcaaagcctttacgcttgtctctgctgtggagcgggagctgctgatgggcgacaaggagcgcgtcaacatagagtgcgtggagtgctgcggcagggacctctacgtgggcaccaacgactgcttcgtctaccacttcctgttggaggagaggccagtgcctgctgggccagccacgttcactgccaccaaacagctgcagagacacttgggcttcaagaagcccgtgaacgagctgcgtgcggcctcagcactcaacaggctgctggtgctgtgtgacaactccatcagcctggtcaacatgctgaacctcgagccagtgccttcgggggcccgcatcaagggggcagccacgtttgcactgaacgagaaccctgtgagtggggaccccttctgtgtagaagtttgcatcatctctgtcaaacgcagaaccatccagatgtttctggtgtacgaggaccgggtgcagatcgtcaaggaggtgtcgactgccgagcagcccctcgctgtggctgtggacggccacttcctgtgtctggctctgaccactcagtacatcatccacaattacagcacaggcgtctcccaggacctgtttccctactgcagtgaggagaggccgccgatcgtcaagaggatagggagacaggagttcctgctggcgggccccggagggctgggcatgtttgccacagtcgcagggatatcccagcgcgcccccgtgcactggtcggagaatgtgattggggcggctgtgtcctttccatacgtcatagcgctcgatgacgaattcatcacagtccacagcatgttggatcagcaacagaagcagacgctgccctttaaggagggccatatcctacaggactttgaaggaagagtgatcgttgccacaagtaaaggagtttacatcttggttccattacctttggaaaaacaaatacaggatcttctagcaagccgcagagtagaagaggctttggttttagcaaaaggagcccggaggaacattccaaaggaaaaatttcaggtaatgtacagaaggattctgcagcaggcgggatttatacagtttgcacaacttcagttcctggaagctaaagagctcttcagaagcggccagcttgatgtccgggagctgatctctctctaccccttcctgttgcccacctcctcctccttcacccggtcccaccctcctcttcatgagtacgcagacctgaaccagctgacccagggggaccaggagaagatggccaagtgcaaacgcttcctcatgagctacctgaacgaggtccgcagcacagaggtagcaaatggctacaaggaggacatcgacacagccttgctcaaactgtatgcagaggctgaccacgacagcctgctggacctcctggtcactgagaacttctgtcttctgacggacagtgctgcctggctagagaagcacaaaaagtattttgcacttggactgctctatcattataataaccaagatgctgctgcagttcagttgtgggtgaacattgtgaatggcgatgtccaggactccacacgctcagacctgtatgaatacatcgtggattttcttacctactgcttagacgaggaactagtgtgggcctatgctgattgggtcctgcagaaaagtgaagaggtcggagttcaggttttcaccaagagacctttggatgaacagcagaagaacagttttaatccagacgacattatcaattgccttaaaaaataccctaaagcccttgtgaagtatctggaacatcttgtgatagacaagagactgcagaaagaagagtatcacacccacttagctgtgctgtacctggaagaggtgctgctgcagagggcctccgccagtggcaagggtgcagaggccaccgagacgcaggccaagctgcggcggctgctccagaaatctgatttataccgagtccactttcttctcgagaggctgcagggagctggcctgcccatggagagcgccatcctgcacgggaagctgggcgagcatgagaaggcgctgcatatcctggtgcacgagctgcaggactttgcagcggccgaggactactgcctgtggtgctccgagggccgagacccaccccaccgccagcaactctttcacacgctgctggccatctacctgcatgctggccccactgcccacgagctggccgtggctgccgtggacctgctgaaccgccacgccaccgaatttgatgcagcccaggtgctgcagatgctgcctgacacctggtcagtgcagctcctctgcccattcctgatgggggccatgagggacagcatccatgccaggaggaccatgcaggtggctctcggcctggccaggtccgaaaacttaatctacacctacgataagatgaagttgaaaggaagctcaatccaactctcagacaaaaagctttgtcagatatgccaaaatcccttttgtgagcctgtgtttgttagatacccaaatggtggtcttgtgcacacccactgtgccgccagcagacacacaaaccccagctcatccagtcctggcactcggacttgaaaagcttggcccaagggtgcgaggggaactccgagttctttctgagcctgctggacatgaagagcagatgaccaccatgctctgtgtcagccaggacgaagggagacatctgggtgccagggagccttccgtccatacgcaacaaggactcctcgctgctgaccaggctctatgaatgtacatggaaaatccccaaaacagaaacatacaagagttcacctgtc

SEQ ID NO: 192587 - DNA, 5979 bp, Homo sapiens
  Payload ID: 18023
  Gene Name: transforming growth factor, beta receptor associated protein 1
  Uniprot ID: Q8WUH2
  ENST ID: ENST00000393359
  CDS Start-End: 428-3010
cccgcagcggcgggggcggagaagagacctcagccccgcgggctcgcacagctggcgcggaccacgctctcgcccggggccggcggcctcagcgccccccgaatgaacaccttccgcccgctggccgccccgcgaggcgggccgtgtcgtggccccggtgcacggagggggacgccgaggcccggagcagggcccgtctcggcctgtgctcggagccaggcggcagggcccgcgggccggcgggcggcgcggagacggctgcgctcccgccctccgccagcgcctggcggccgccccacgtgacgggaagcggcggctgcggggtcgggccagcccaggagccgcgggccggagcggggcggcggggccccaggccgcggggcggcgcgggacggcgggcgccggcgccgcagatcagccagtagacatgatgagcatcaaagcctttacgcttgtctctgctgtggagcgggagctgctgatgggcgacaaggagcgcgtcaacatagagtgcgtggagtgctgcggcagggacctctacgtgggcaccaacgactgcttcgtctaccacttcctgttggaggagaggccagtgcctgctgggccagccacgttcactgccaccaaacagctgcagagacacttgggcttcaagaagcccgtgaacgagctgcgtgcggcctcagcactcaacaggctgctggtgctgtgtgacaactccatcagcctggtcaacatgctgaacctcgagccagtgccttcgggggcccgcatcaagggggcagccacgtttgcactgaacgagaaccctgtgagtggggaccccttctgtgtagaagtttgcatcatctctgtcaaacgcagaaccatccagatgtttctggtgtacgaggaccgggtgcagatcgtcaaggaggtgtcgactgccgagcagcccctcgctgtggctgtggacggccacttcctgtgtctggctctgaccactcagtacatcatccacaattacagcacaggcgtctcccaggacctgtttccctactgcagtgaggagaggccgccgatcgtcaagaggatagggagacaggagttcctgctggcgggccccggagggctgggcatgtttgccacagtcgcagggatatcccagcgcgcccccgtgcactggtcggagaatgtgattggggcggctgtgtcctttccatacgtcatagcgctcgatgacgaattcatcacagtccacagcatgttggatcagcaacagaagcagacgctgccctttaaggagggccatatcctacaggactttgaaggaagagtgatcgttgccacaagtaaaggagtttacatcttggttccattacctttggaaaaacaaatacaggatcttctagcaagccgcagagtagaagaggctttggttttagcaaaaggagcccggaggaacattccaaaggaaaaatttcaggtaatgtacagaaggattctgcagcaggcgggatttatacagtttgcacaacttcagttcctggaagctaaagagctcttcagaagcggccagcttgatgtccgggagctgatctctctctaccccttcctgttgcccacctcctcctccttcacccggtcccaccctcctcttcatgagtacgcagacctgaaccagctgacccagggggaccaggagaagatggccaagtgcaaacgcttcctcatgagctacctgaacgaggtccgcagcacagaggtagcaaatggctacaaggaggacatcgacacagccttgctcaaactgtatgcagaggctgaccacgacagcctgctggacctcctggtcactgagaacttctgtcttctgacggacagtgctgcctggctagagaagcacaaaaagtattttgcacttggactgctctatcattataataaccaagatgctgctgcagttcagttgtgggtgaacattgtgaatggcgatgtccaggactccacacgctcagacctgtatgaatacatcgtggattttcttacctactgcttagacgaggaactagtgtgggcctatgctgattgggtcctgcagaaaagtgaagaggtcggagttcaggttttcaccaagagacctttggatgaacagcagaagaacagttttaatccagacgacattatcaattgccttaaaaaataccctaaagcccttgtgaagtatctggaacatcttgtgatagacaagagactgcagaaagaagagtatcacacccacttagctgtgctgtacctggaagaggtgctgctgcagagggcctccgccagtggcaagggtgcagaggccaccgagacgcaggccaagctgcggcggctgctccagaaatctgatttataccgagtccactttcttctcgagaggctgcagggagctggcctgcccatggagagcgccatcctgcacgggaagctgggcgagcatgagaaggcgctgcatatcctggtgcacgagctgcaggactttgcagcggccgaggactactgcctgtggtgctccgagggccgagacccaccccaccgccagcaactctttcacacgctgctggccatctacctgcatgctggccccactgcccacgagctggccgtggctgccgtggacctgctgaaccgccacgccaccgaatttgatgcagcccaggtgctgcagatgctgcctgacacctggtcagtgcagctcctctgcccattcctgatgggggccatgagggacagcatccatgccaggaggaccatgcaggtggctctcggcctggccaggtccgaaaacttaatctacacctacgataagatgaagttgaaaggaagctcaatccaactctcagacaaaaagctttgtcagatatgccaaaatcccttttgtgagcctgtgtttgttagatacccaaatggtggtcttgtgcacacccactgtgccgccagcagacacacaaaccccagctcatccagtcctggcactcggacttgaaaagcttggcccaagggtgcgaggggaactccgagttctttctgagcctgctggacatgaagagcagatgaccaccatgctctgtgtcagccaggacgaagggagacatctgggtgccagggagccttccgtccatacgcaacaaggactcctcgctgctgaccaggctctatgaatgtacatggaatgaccaggctctatgaatgtacatggaaaacccctaaaaatccccaaaacagaaacatacaagagttcacctgtccaggtacatagtaatccaagacagaggtctactttgaaaaaaaaaaaaagggagtcttcctcatgcagtccagacccaggtgggggatcccccaccacccccacactccaacctttagactcatgtttgcactggaaacgtggcttcaccatggctggcgacaaagtcctctcttgcctgggtgagtggcgagggcacagagcctcatgggggtcagccttgccctcctgcagaaacacgttctccatccacgccgctcactcatgggcccatttcccagggttacctcgtgggctctgcctttgccctcagaaacggctgaccctggagaagtacctttgttccttctttcttcctctccggctctcagctcccaaaagattctgccttgtgtacccaagcactcactcttgggtgaactaatgcttctggctgcctagcaagtgaagatctgttgagaaactgagaacgctccaagagagaagctgctctcccctccttgaagaagccgcggacacgggaaacccacggcgggcaagggcccagctgtgtgctcctttcctgtcatggcatctgctgatttgaaactccatgacgaacacgttgaactaaacatttttatttaaatttgtatcatgttcgtagttgctctcttgttgagagagtcatctgtcctgtttgttaggggtattttttcttgttaaaatgtatctcctgttgaatactcgggaaattcaaagggaagtgtggtcagcacacactgagcgttcttttctggagaggccggttttagcctcgtacctttagcaggaccgacagcgggtggaagggcccgtgtgctggatgggggtgtcgcctcctggatggcacaccctcccgaggacatccagacaggctgtgtcaccctccagcactttatgtgcctgctctgaggtgtcctgaacacacagcaacggcctctccttcatcacaggccggggattccttttgtgtttctgtataacatcgatgacgagctgaagctgttgtcacttcactgccctctttggaatttcttcattgtgctgactgattctattaggggctaacaataaaggcagtctacccactactatcatgcttgggaaacaagcgtcagcttgtacatatgacaagagaggaccctgaatacaccctctcttcatcagcccaagccttactgaggtgggatgaagacctcattctctgttctttaaaacatgtttcgtgaactaatattggtccatgtattttttgtccttttgggactctaagtgggtcaagaagcaaaaacatccatgtgttgtttggggggaattggcaccattttttcctgactatgtttcaattaactaaagaataaatgatgaagaaattctccttgtagcacaactgtatgctgtgtaaattggtgtgagctcaaagcccagtcatgtgttttacctgtgggtgactctgttgtagaatggtcatattactgcatatgttatcatgacaacttgtgagtttgagtttatatttctcaaagaacaagttacccgtatatgcaacattgcgccattaaaagcttatttctctgtacacaaaatgggtaaaatcttgaaaaaacttagtaatttctcattcctaacacacagacagagtctcactctgtcacccaggctggagtgcagtggcgcaatctcggctcactgcaacctccacctcctgggttcaagcgattctgctgcctcagcctcccgagtagctgggactacaggtgcatgccaccacgcccagctaatttttgtatttttagtagagacggggtttcaccatgttggccaggatggtctcggtctcctgacctcgtgatctgcctgcctcggcctcccaaagtgctgggattacaggcgtgagccactgcgcccagccaacactagtcatttttattttttcactgaacattgatcaatactctaaaatgtttgtcatcctttagaataatgggaattaaagttgagcagttttccatctctaccaaatccttcaccacaagcagcattctattacagtatgaagaattgtctcatatgttaaaactgtacttttctctaacctttctctcactcctacaaggcccttttctcaaatcatatttctgagagaaatgtatggttctttctcacaggcctgctgatttgtaactgtgccatcgaatagagcaattagatccatcagacctttttcccctcattaggttcagtggaaccattctggttaaaacagcatgaactgaactcagtttacattcatattctatgggcaataccatttggtttttggaactgtttatctgctgttccctatcaagtattaatgtagggatgtcactcaggctgcgttgcactgggctgagttcaactgcgacgctctcactgacgcgtgcttacatgtgcttctcacttccggagcacaggcaggtggctgcggggtcccagctctgaatggatgcccatgatgcaactggggcagcccttgctttttgcttgctctcccacagaaacctttgtccttgcaactttatcctttgtcccgattgggtcccagatacacaaaatgtacaaatgtaaacttgctcattttattaaaattcttttagttctttgttctttctgtaattttttaaaataaaaattgccttgatgga

SEQ ID NO: 192588 - DNA, 5595 bp, Homo sapiens
  Payload ID: 18023
  Gene Name: transforming growth factor, beta receptor associated protein 1
  Uniprot ID: Q8WUH2
  ENST ID: ENST00000595531
  CDS Start-End: 21-2603
cagcagatcagccagtagacatgatgagcatcaaagcctttacgcttgtctctgctgtggagcgggagctgctgatgggcgacaaggagcgcgtcaacatagagtgcgtggagtgctgcggcagggacctctacgtgggcaccaacgactgcttcgtctaccacttcctgttggaggagaggccagtgcctgctgggccagccacgttcactgccaccaaacagctgcagagacacttgggcttcaagaagcccgtgaacgagctgcgtgcggcctcagcactcaacaggctgctggtgctgtgtgacaactccatcagcctggtcaacatgctgaacctcgagccagtgccttcgggggcccgcatcaagggggcagccacgtttgcactgaacgagaaccctgtgagtggggaccccttctgtgtagaagtttgcatcatctctgtcaaacgcagaaccatccagatgtttctggtgtacgaggaccgggtgcagatcgtcaaggaggtgtcgactgccgagcagcccctcgctgtggctgtggacggccacttcctgtgtctggctctgaccactcagtacatcatccacaattacagcacaggcgtctcccaggacctgtttccctactgcagtgaggagaggccgccgatcgtcaagaggatagggagacaggagttcctgctggcgggccccggagggctgggcatgtttgccacagtcgcagggatatcccagcgcgcccccgtgcactggtcggagaatgtgattggggcggctgtgtcctttccatacgtcatagcgctcgatgacgaattcatcacagtccacagcatgttggatcagcaacagaagcagacgctgccctttaaggagggccatatcctacaggactttgaaggaagagtgatcgttgccacaagtaaaggagtttacatcttggttccattacctttggaaaaacaaatacaggatcttctagcaagccgcagagtagaagaggctttggttttagcaaaaggagcccggaggaacattccaaaggaaaaatttcaggtaatgtacagaaggattctgcagcaggcgggatttatacagtttgcacaacttcagttcctggaagctaaagagctcttcagaagcggccagcttgatgtccgggagctgatctctctctaccccttcctgttgcccacctcctcctccttcacccggtcccaccctcctcttcatgagtacgcagacctgaaccagctgacccagggggaccaggagaagatggccaagtgcaaacgcttcctcatgagctacctgaacgaggtccgcagcacagaggtagcaaatggctacaaggaggacatcgacacagccttgctcaaactgtatgcagaggctgaccacgacagcctgctggacctcctggtcactgagaacttctgtcttctgacggacagtgctgcctggctagagaagcacaaaaagtattttgcacttggactgctctatcattataataaccaagatgctgctgcagttcagttgtgggtgaacattgtgaatggcgatgtccaggactccacacgctcagacctgtatgaatacatcgtggattttcttacctactgcttagacgaggaactagtgtgggcctatgctgattgggtcctgcagaaaagtgaagaggtcggagttcaggttttcaccaagagacctttggatgaacagcagaagaacagttttaatccagacgacattatcaattgccttaaaaaataccctaaagcccttgtgaagtatctggaacatcttgtgatagacaagagactgcagaaagaagagtatcacacccacttagctgtgctgtacctggaagaggtgctgctgcagagggcctccgccagtggcaagggtgcagaggccaccgagacgcaggccaagctgcggcggctgctccagaaatctgatttataccgagtccactttcttctcgagaggctgcagggagctggcctgcccatggagagcgccatcctgcacgggaagctgggcgagcatgagaaggcgctgcatatcctggtgcacgagctgcaggactttgcagcggccgaggactactgcctgtggtgctccgagggccgagacccaccccaccgccagcaactctttcacacgctgctggccatctacctgcatgctggccccactgcccacgagctggccgtggctgccgtggacctgctgaaccgccacgccaccgaatttgatgcagcccaggtgctgcagatgctgcctgacacctggtcagtgcagctcctctgcccattcctgatgggggccatgagggacagcatccatgccaggaggaccatgcaggtggctctcggcctggccaggtccgaaaacttaatctacacctacgataagatgaagttgaaaggaagctcaatccaactctcagacaaaaagctttgtcagatatgccaaaatcccttttgtgagcctgtgtttgttagatacccaaatggtggtcttgtgcacacccactgtgccgccagcagacacacaaaccccagctcatccagtcctggcactcggacttgaaaagcttggcccaagggtgcgaggggaactccgagttctttctgagcctgctggacatgaagagcagatgaccaccatgctctgtgtcagccaggacgaagggagacatctgggtgccagggagccttccgtccatacgcaacaaggactcctcgctgctgaccaggctctatgaatgtacatggaatgaccaggctctatgaatgtacatggaaaacccctaaaaatccccaaaacagaaacatacaagagttcacctgtccaggtacatagtaatccaagacagaggtctactttgaaaaaaaaaaaaagggagtcttcctcatgcagtccagacccaggtgggggatcccccaccacccccacactccaacctttagactcatgtttgcactggaaacgtggcttcaccatggctggcgacaaagtcctctcttgcctgggtgagtggcgagggcacagagcctcatgggggtcagccttgccctcctgcagaaacacgttctccatccacgccgctcactcatgggcccatttcccagggttacctcgtgggctctgcctttgccctcagaaacggctgaccctggagaagtacctttgttccttctttcttcctctccggctctcagctcccaaaagattctgccttgtgtacccaagcactcactcttgggtgaactaatgcttctggctgcctagcaagtgaagatctgttgagaaactgagaacgctccaagagagaagctgctctcccctccttgaagaagccgcggacacgggaaacccacggcgggcaagggcccagctgtgtgctcctttcctgtcatggcatctgctgatttgaaactccatgacgaacacgttgaactaaacatttttatttaaatttgtatcatgttcgtagttgctctcttgttgagagagtcatctgtcctgtttgttaggggtattttttcttgttaaaatgtatctcctgttgaatactcgggaaattcaaagggaagtgtggtcagcacacactgagcgttcttttctggagaggccggttttagcctcgtacctttagcaggaccgacagcgggtggaagggcccgtgtgctggatgggggtgtcgcctcctggatggcacaccctcccgaggacatccagacaggctgtgtcaccctccagcactttatgtgcctgctctgaggtgtcctgaacacacagcaacggcctctccttcatcacaggccggggattccttttgtgtttctgtataacatcgatgacgagctgaagctgttgtcacttcactgccctctttggaatttcttcattgtgctgactgattctattaggggctaacaataaaggcagtctacccactactatcatgcttgggaaacaagcgtcagcttgtacatatgacaagagaggaccctgaatacaccctctcttcatcagcccaagccttactgaggtgggatgaagacctcattctctgttctttaaaacatgtttcgtgaactaatattggtccatgtattttttgtccttttgggactctaagtgggtcaagaagcaaaaacatccatgtgttgtttggggggaattggcaccattttttcctgactatgtttcaattaactaaagaataaatgatgaagaaattctccttgtagcacaactgtatgctgtgtaaattggtgtgagctcaaagcccagtcatgtgttttacctgtgggtgactctgttgtagaatggtcatattactgcatatgttatcatgacaacttgtgagtttgagtttatatttctcaaagaacaagttacccgtatatgcaacattgcgccattaaaagcttatttctctgtacacaaaatgggtaaaatcttgaaaaaacttagtaatttctcattcctaacacacagacagagtctcactctgtcacccaggctggagtgcagtggcgcaatctcggctcactgcaacctccacctcctgggttcaagcgattctgctgcctcagcctcccgagtagctgggactacaggtgcatgccaccacgcccagctaatttttgtatttttagtagagacggggtttcaccatgttggccaggatggtctcggtctcctgacctcgtgatctgcctgcctcggcctcccaaagtgctgggattacaggcgtgagccactgcgcccagccaacactagtcatttttattttttcactgaacattgatcaatactctaaaatgtttgtcatcctttagaataatgggaattaaagttgagcagttttccatctctaccaaatccttcaccacaagcagcattctattacagtatgaagaattgtctcatatgttaaaactgtacttttctctaacctttctctcactcctacaaggcccttttctcaaatcatatttctgagagaaatgtatggttctttctcacaggcctgctgatttgtaactgtgccatcgaatagagcaattagatccatcagacctttttcccctcattaggttcagtggaaccattctggttaaaacagcatgaactgaactcagtttacattcatattctatgggcaataccatttggtttttggaactgtttatctgctgttccctatcaagtattaatgtagggatgtcactcaggctgcgttgcactgggctgagttcaactgcgacgctctcactgacgcgtgcttacatgtgcttctcacttccggagcacaggcaggtggctgcggggtcccagctctgaatggatgcccatgatgcaactggggcagcccttgctttttgcttgctctcccacagaaacctttgtccttgcaactttatcctttgtcccgattgggtcccagatacacaaaatgtacaaatgtaaacttgctcattttattaaaattcttttagttctttgttctttctgtaattttttaaaataaaaattgccttgatggagtgatggttttcactcgcaccat

SEQ ID NO: 192589 - DNA, 4621 bp, Homo sapiens
  Payload ID: 18024
  Gene Name: transforming growth factor, beta receptor II (70/80kDa)
  Uniprot ID: P37173
  ENST ID: ENST00000295754
  CDS Start-End: 383-2086
ggagagggagaaggctctcgggcggagagaggtcctgcccagctgttggcgaggagtttcctgtttcccccgcagcgctgagttgaagttgagtgagtcactcgcgcgcacggagcgacgacacccccgcgcgtgcacccgctcgggacaggagccggactcctgtgcagcttccctcggccgccgggggcctccccgcgcctcgccggcctccaggccccctcctggctggcgagcgggcgccacatctggcccgcacatctgcgctgccggcccggcgcggggtccggagagggcgcggcgcggaggcgcagccaggggtccgggaaggcgccgtccgctgcgctgggggctcggtctatgacgagcagcggggtctgccatgggtcgggggctgctcaggggcctgtggccgctgcacatcgtcctgtggacgcgtatcgccagcacgatcccaccgcacgttcagaagtcggttaataacgacatgatagtcactgacaacaacggtgcagtcaagtttccacaactgtgtaaattttgtgatgtgagattttccacctgtgacaaccagaaatcctgcatgagcaactgcagcatcacctccatctgtgagaagccacaggaagtctgtgtggctgtatggagaaagaatgacgagaacataacactagagacagtttgccatgaccccaagctcccctaccatgactttattctggaagatgctgcttctccaaagtgcattatgaaggaaaaaaaaaagcctggtgagactttcttcatgtgttcctgtagctctgatgagtgcaatgacaacatcatcttctcagaagaatataacaccagcaatcctgacttgttgctagtcatatttcaagtgacaggcatcagcctcctgccaccactgggagttgccatatctgtcatcatcatcttctactgctaccgcgttaaccggcagcagaagctgagttcaacctgggaaaccggcaagacgcggaagctcatggagttcagcgagcactgtgccatcatcctggaagatgaccgctctgacatcagctccacgtgtgccaacaacatcaaccacaacacagagctgctgcccattgagctggacaccctggtggggaaaggtcgctttgctgaggtctataaggccaagctgaagcagaacacttcagagcagtttgagacagtggcagtcaagatctttccctatgaggagtatgcctcttggaagacagagaaggacatcttctcagacatcaatctgaagcatgagaacatactccagttcctgacggctgaggagcggaagacggagttggggaaacaatactggctgatcaccgccttccacgccaagggcaacctacaggagtacctgacgcggcatgtcatcagctgggaggacctgcgcaagctgggcagctccctcgcccgggggattgctcacctccacagtgatcacactccatgtgggaggcccaagatgcccatcgtgcacagggacctcaagagctccaatatcctcgtgaagaacgacctaacctgctgcctgtgtgactttgggctttccctgcgtctggaccctactctgtctgtggatgacctggctaacagtgggcaggtgggaactgcaagatacatggctccagaagtcctagaatccaggatgaatttggagaatgttgagtccttcaagcagaccgatgtctactccatggctctggtgctctgggaaatgacatctcgctgtaatgcagtgggagaagtaaaagattatgagcctccatttggttccaaggtgcgggagcacccctgtgtcgaaagcatgaaggacaacgtgttgagagatcgagggcgaccagaaattcccagcttctggctcaaccaccagggcatccagatggtgtgtgagacgttgactgagtgctgggaccacgacccagaggcccgtctcacagcccagtgtgtggcagaacgcttcagtgagctggagcatctggacaggctctcggggaggagctgctcggaggagaagattcctgaagacggctccctaaacactaccaaatagctcttctggggcaggctgggccatgtccaaagaggctgcccctctcaccaaagaacagaggcagcaggaagctgcccctgaactgatgcttcctggaaaaccaagggggtcactcccctccctgtaagctgtggggataagcagaaacaacagcagcagggagtgggtgacatagagcattctatgcctttgacattgtcataggataagctgtgttagcacttcctcaggaaatgagattgatttttacaatagccaataacatttgcactttattaatgcctgtatataaatatgaatagctatgttttatatatatatatatatatctatatatgtctatagctctatatatatagccataccttgaaaagagacaaggaaaaacatcaaatattcccaggaaattggttttattggagaactccagaaccaagcagagaaggaagggacccatgacagcattagcatttgacaatcacacatgcagtggttctctgactgtaaaacagtgaactttgcatgaggaaagaggctccatgtctcacagccagctatgaccacattgcacttgcttttgcaaaataatcattccctgcctagcacttctcttctggccatggaactaagtacagtggcactgtttgaggaccagtgttcccggggttcctgtgtgcccttatttctcctggacttttcatttaagctccaagccccaaatctggggggctagtttagaaactctccctcaacctagtttagaaactctaccccatctttaataccttgaatgttttgaaccccactttttaccttcatgggttgcagaaaaatcagaacagatgtccccatccatgcgattgccccaccatctactaatgaaaaattgttctttttttcatctttcccctgcacttatgttactattctctgctcccagccttcatccttttctaaaaaggagcaaattctcactctaggctttatcgtgtttactttttcattacacttgacttgattttctagttttctatacaaacaccaatgggttccatctttctgggctcctgattgctcaagcacagtttggcctgatgaagaggatttcaactacacaatactatcattgtcaggactatgacctcaggcactctaaacatatgttttgtttggtcagcacagcgtttcaaaaagtgaagccactttataaatatttggagattttgcaggaaaatctggatccccaggtaaggatagcagatggttttcagttatctccagtccacgttcacaaaatgtgaaggtgtggagacacttacaaagctgcctcacttctcactgtaaacattagctctttccactgcctacctggaccccagtctaggaattaaatctgcacctaaccaaggtcccttgtaagaaatgtccattcaagcagtcattctctgggtatataatatgattttgactaccttatctggtgttaagatttgaagttggccttttattggactaaaggggaactcctttaagggtctcagttagcccaagtttcttttgcttatatgttaatagttttaccctctgcattggagagaggagtgctttactccaagaagctttcctcatggttaccgttctctccatcatgccagccttctcaacctttgcagaaattactagagaggatttgaatgtgggacacaaaggtcccatttgcagttagaaaatttgtgtccacaaggacaagaacaaagtatgagctttaaaactccataggaaacttgttaatcaacaaagaagtgttaatgctgcaagtaatctcttttttaaaactttttgaagctacttattttcagccaaataggaatattagagagggactggtagtgagaatatcagctctgtttggatggtggaaggtctcattttattgagatttttaagatacatgcaaaggtttggaaatagaacctctaggcaccctcctcagtgtgggtgggctgagagttaaagacagtgtggctgcagtagcatagaggcgcctagaaattccacttgcaccgtagggcatgctgataccatcccaatagctgttgcccattgacctctagtggtgagtttctagaatactggtccattcatgagatattcaagattcaagagtattctcacttctgggttatcagcataaactggaatgtagtgtcagaggatactgtggcttgttttgtttatgtttttttttcttattcaagaaaaaagaccaaggaataacattctgtagttcctaaaaatactgacttttttcactactatacataaagggaaagttttattcttttatggaacacttcagctgtactcatgtattaaaataggaatgtgaatgctatatactctttttatatcaaaagtctcaagcacttatttttattctatgcattgtttgtcttttacataaataaaatgtttattagattgaataaagcaaaatactcaggtgagcatcctgcctcctgttcccattcctag

SEQ ID NO: 192590 - DNA, 4605 bp, Homo sapiens
  Payload ID: 18024
  Gene Name: transforming growth factor, beta receptor II (70/80kDa)
  Uniprot ID: P37173
  ENST ID: ENST00000359013
  CDS Start-End: 284-2062
actcgcgcgcacggagcgacgacacccccgcgcgtgcacccgctcgggacaggagccggactcctgtgcagcttccctcggccgccgggggcctccccgcgcctcgccggcctccaggccccctcctggctggcgagcgggcgccacatctggcccgcacatctgcgctgccggcccggcgcggggtccggagagggcgcggcgcggaggcgcagccaggggtccgggaaggcgccgtccgctgcgctgggggctcggtctatgacgagcagcggggtctgccatgggtcgggggctgctcaggggcctgtggccgctgcacatcgtcctgtggacgcgtatcgccagcacgatcccaccgcacgttcagaagtcggatgtggaaatggaggcccagaaagatgaaatcatctgccccagctgtaataggactgcccatccactgagacatattaataacgacatgatagtcactgacaacaacggtgcagtcaagtttccacaactgtgtaaattttgtgatgtgagattttccacctgtgacaaccagaaatcctgcatgagcaactgcagcatcacctccatctgtgagaagccacaggaagtctgtgtggctgtatggagaaagaatgacgagaacataacactagagacagtttgccatgaccccaagctcccctaccatgactttattctggaagatgctgcttctccaaagtgcattatgaaggaaaaaaaaaagcctggtgagactttcttcatgtgttcctgtagctctgatgagtgcaatgacaacatcatcttctcagaagaatataacaccagcaatcctgacttgttgctagtcatatttcaagtgacaggcatcagcctcctgccaccactgggagttgccatatctgtcatcatcatcttctactgctaccgcgttaaccggcagcagaagctgagttcaacctgggaaaccggcaagacgcggaagctcatggagttcagcgagcactgtgccatcatcctggaagatgaccgctctgacatcagctccacgtgtgccaacaacatcaaccacaacacagagctgctgcccattgagctggacaccctggtggggaaaggtcgctttgctgaggtctataaggccaagctgaagcagaacacttcagagcagtttgagacagtggcagtcaagatctttccctatgaggagtatgcctcttggaagacagagaaggacatcttctcagacatcaatctgaagcatgagaacatactccagttcctgacggctgaggagcggaagacggagttggggaaacaatactggctgatcaccgccttccacgccaagggcaacctacaggagtacctgacgcggcatgtcatcagctgggaggacctgcgcaagctgggcagctccctcgcccgggggattgctcacctccacagtgatcacactccatgtgggaggcccaagatgcccatcgtgcacagggacctcaagagctccaatatcctcgtgaagaacgacctaacctgctgcctgtgtgactttgggctttccctgcgtctggaccctactctgtctgtggatgacctggctaacagtgggcaggtgggaactgcaagatacatggctccagaagtcctagaatccaggatgaatttggagaatgttgagtccttcaagcagaccgatgtctactccatggctctggtgctctgggaaatgacatctcgctgtaatgcagtgggagaagtaaaagattatgagcctccatttggttccaaggtgcgggagcacccctgtgtcgaaagcatgaaggacaacgtgttgagagatcgagggcgaccagaaattcccagcttctggctcaaccaccagggcatccagatggtgtgtgagacgttgactgagtgctgggaccacgacccagaggcccgtctcacagcccagtgtgtggcagaacgcttcagtgagctggagcatctggacaggctctcggggaggagctgctcggaggagaagattcctgaagacggctccctaaacactaccaaatagctcttctggggcaggctgggccatgtccaaagaggctgcccctctcaccaaagaacagaggcagcaggaagctgcccctgaactgatgcttcctggaaaaccaagggggtcactcccctccctgtaagctgtggggataagcagaaacaacagcagcagggagtgggtgacatagagcattctatgcctttgacattgtcataggataagctgtgttagcacttcctcaggaaatgagattgatttttacaatagccaataacatttgcactttattaatgcctgtatataaatatgaatagctatgttttatatatatatatatatatctatatatgtctatagctctatatatatagccataccttgaaaagagacaaggaaaaacatcaaatattcccaggaaattggttttattggagaactccagaaccaagcagagaaggaagggacccatgacagcattagcatttgacaatcacacatgcagtggttctctgactgtaaaacagtgaactttgcatgaggaaagaggctccatgtctcacagccagctatgaccacattgcacttgcttttgcaaaataatcattccctgcctagcacttctcttctggccatggaactaagtacagtggcactgtttgaggaccagtgttcccggggttcctgtgtgcccttatttctcctggacttttcatttaagctccaagccccaaatctggggggctagtttagaaactctccctcaacctagtttagaaactctaccccatctttaataccttgaatgttttgaaccccactttttaccttcatgggttgcagaaaaatcagaacagatgtccccatccatgcgattgccccaccatctactaatgaaaaattgttctttttttcatctttcccctgcacttatgttactattctctgctcccagccttcatccttttctaaaaaggagcaaattctcactctaggctttatcgtgtttactttttcattacacttgacttgattttctagttttctatacaaacaccaatgggttccatctttctgggctcctgattgctcaagcacagtttggcctgatgaagaggatttcaactacacaatactatcattgtcaggactatgacctcaggcactctaaacatatgttttgtttggtcagcacagcgtttcaaaaagtgaagccactttataaatatttggagattttgcaggaaaatctggatccccaggtaaggatagcagatggttttcagttatctccagtccacgttcacaaaatgtgaaggtgtggagacacttacaaagctgcctcacttctcactgtaaacattagctctttccactgcctacctggaccccagtctaggaattaaatctgcacctaaccaaggtcccttgtaagaaatgtccattcaagcagtcattctctgggtatataatatgattttgactaccttatctggtgttaagatttgaagttggccttttattggactaaaggggaactcctttaagggtctcagttagcccaagtttcttttgcttatatgttaatagttttaccctctgcattggagagaggagtgctttactccaagaagctttcctcatggttaccgttctctccatcatgccagccttctcaacctttgcagaaattactagagaggatttgaatgtgggacacaaaggtcccatttgcagttagaaaatttgtgtccacaaggacaagaacaaagtatgagctttaaaactccataggaaacttgttaatcaacaaagaagtgttaatgctgcaagtaatctcttttttaaaactttttgaagctacttattttcagccaaataggaatattagagagggactggtagtgagaatatcagctctgtttggatggtggaaggtctcattttattgagatttttaagatacatgcaaaggtttggaaatagaacctctaggcaccctcctcagtgtgggtgggctgagagttaaagacagtgtggctgcagtagcatagaggcgcctagaaattccacttgcaccgtagggcatgctgataccatcccaatagctgttgcccattgacctctagtggtgagtttctagaatactggtccattcatgagatattcaagattcaagagtattctcacttctgggttatcagcataaactggaatgtagtgtcagaggatactgtggcttgttttgtttatgtttttttttcttattcaagaaaaaagaccaaggaataacattctgtagttcctaaaaatactgacttttttcactactatacataaagggaaagttttattcttttatggaacacttcagctgtactcatgtattaaaataggaatgtgaatgctatatactctttttatatcaaaagtctcaagcacttatttttattctatgcattgtttgtcttttacataaataaaatgtttattagattgaataaagcaaaatactcaggtgagcatcctgcctcctgttcccattcctagtagctaaa

SEQ ID NO: 192591 - DNA, 6465 bp, Homo sapiens
  Payload ID: 18025
  Gene Name: transforming growth factor, beta receptor III
  Uniprot ID: Q03167
  ENST ID: ENST00000212355
  CDS Start-End: 516-3071
gagagcccccggtggggccggcggaggagcgcccttccccccgcgcgctgattgctgtggcgtcctgcccgtccccgcccgcgtgtgtgcgagggagggcgagtgcgccgggtcggcctgatgggggtaatcgagggtttcggggacgccgagcggcactttcctcttcccagcgagtgaaggagggcagtcggcggctctcgcgccccggccactttccctgcgcgattcccggagctccctgcaggaggtgagagtccccagcgggtccggatggcgtagttttgccgcggcgcagcagctgccggagctcgccgccgccgagcgctgggcggggaaacttgccgccgctttcctccaacttgctgcgggtggatctccgctggacacaccgcctccgaggcagtttgaaaattgcaaggagggactttaagactacttctgatttgcaaagattgtctgtgctctgagcaggctgaagtgactggacgagacgcactgttggagaaataaaaatgacttcccattatgtgattgccatctttgccctgatgagctcctgtttagccactgcaggtccagagcctggtgcactgtgtgaactgtcacctgtcagtgcctcccatcctgtccaggccttgatggagagcttcactgttttgtcaggctgtgccagcagaggcacaactgggctgccacaggaggtgcatgtcctgaatctccgcactgcaggccaggggcctggccagctacagagagaggtcacacttcacctgaatcccatctcctcagtccacatccaccacaagtctgttgtgttcctgctcaactccccacaccccctggtgtggcatctgaagacagagagacttgccactggggtctccagactgtttttggtgtctgagggttctgtggtccagttttcatcagcaaacttctccttgacagcagaaacagaagaaaggaacttcccccatggaaatgaacatctgttaaattgggcccgaaaagagtatggagcagttacttcattcaccgaactcaagatagcaagaaacatttatattaaagtgggggaagatcaagtgttccctccaaagtgcaacatagggaagaattttctctcactcaattaccttgctgagtaccttcaacccaaagcagcagaagggtgtgtgatgtccagccagccccagaatgaggaagtacacatcatcgagctaatcacccccaactctaacccctacagtgctttccaggtggatataacaattgatataagaccttctcaagaggatcttgaagtggtcaaaaatctcatcctgatcttgaagtgcaaaaagtctgtcaactgggtgatcaaatcttttgatgttaagggaagcctgaaaattattgctcctaacagtattggctttggaaaagagagtgaaagatctatgacaatgaccaaatcaataagagatgacattccttcaacccaagggaatctggtgaagtgggctttggacaatggctatagtccaataacttcatacacaatggctcctgtggctaatagatttcatcttcggcttgaaaataatgcagaggagatgggagatgaggaagtccacactattcctcctgagctacggatcctgctggaccctggtgccctgcctgccctgcagaacccgcccatccggggaggggaaggccaaaatggaggccttccgtttcctttcccagatatttccaggagagtctggaatgaagagggagaagatgggctccctcggccaaaggaccctgtcattcccagcatacaactgtttcctggtctcagagagccagaagaggtgcaagggagcgtggatattgccctgtctgtcaaatgtgacaatgagaagatgatcgtggctgtagaaaaagattcttttcaggccagtggctactcggggatggacgtcaccctgttggatcctacctgcaaggccaagatgaatggcacacactttgttttggagtctcctctgaatggctgcggtactcggccccggtggtcagcccttgatggtgtggtctactataactccattgtgatacaggttccagcccttggggacagtagtggttggccagatggttatgaagatctggagtcaggtgataatggatttccgggagatatggatgaaggagatgcttccctgttcacccgacctgaaatcgtggtgtttaattgcagccttcagcaggtgaggaaccccagcagcttccaggaacagccccacggaaacatcaccttcaacatggagctatacaacactgacctctttttggtgccctcccagggcgtcttctctgtgccagagaatggacacgtttatgttgaggtatctgttactaaggctgaacaagaactgggatttgccatccaaacgtgctttatctctccatattcgaaccctgataggatgtctcattacaccattattgagaatatttgtcctaaagatgaatctgtgaaattctacagtcccaagagagtgcactttcctatcccgcaagctgacatggataagaagcgattcagctttgtcttcaagcctgtcttcaacacctcactgctctttctacagtgtgagctgacgctgtgtacgaagatggagaagcacccccagaagttgcctaagtgtgtgcctcctgacgaagcctgcacctcgctggacgcctcgataatctgggccatgatgcagaataagaagacgttcactaagccccttgctgtgatccaccatgaagcagaatctaaagaaaaaggtccaagcatgaaggaaccaaatccaatttctccaccaattttccatggtctggacaccctaaccgtgatgggcattgcgtttgcagcctttgtgatcggagcactcctgacgggggccttgtggtacatctattctcacacaggggagacagcaggaaggcagcaagtccccacctccccgccagcctcggaaaacagcagtgctgcccacagcatcggcagcacgcagagcacgccttgctccagcagcagcacggcctagcccaacccagcccaacccggcccaacccagcccagcccagctcagctcagctactgccaagggcaggaccaatggctgagcctcgtgtccagactcagagggctggattttggttcccttgtaaagacagagtgaatttcagtataaagatcacccgttgtattcaccccacacccagggctagtataaacatgaccctgggcttctgtaccacactagaattcatgtgagaaagctaaaatggtggtcttctccaccagcccctcacaggcttgggggttttcaatgtgaaacacatgccagtttttaaaatgctgctttgtccaggtgagaacatccataatttggggccctgagttttacccagactcaaggagttggtaaagggttaatagccagatagtagaaccagtgaggagatgcggccaaagattctttatatctgaaccaagatgtaaaacaagaaatgctttgaggctttctaagcgatcctcctgtctaatttgcacctttgtctggatgcacacttctgaccttgctgccacaacctgtggggtctgatgtgtcccttgatgggtgctgccctcagggactgcaccctgacaagtgttaaggcaacattcctttcttgtgccctgggccaaaaccaatgctgatgaccttatcagcttcctgtttcttcccatacttgcatacaccactgcaaaatgtcttaatgcaaattttgtatttcttacaggcctacagaaattgaaaatgaccaaaatcaggaaccacagatttgtgcccattcctaatattttgttctgcaaattaatgtataatttgaggtgaaattcagttataaagtcaaggacgaatttgcacagtgatatatttctatgtgtatgcaagtacaagtatataatatgtcacctggcacattcattttctcagttgaagaagagaaaatttgaaaatgtccttatgcttttagagttgcaacttaagtatatttggtagggtgagtgtttccactcaaaatatgtcaacttaaaaaaaaataggccctttcataaaaaccaaactgtagcaagatgcaaatgcatggcaaatcctgtcggtctccagttggttatctgaatagtgtcaccaattccaccaagacagtgctgagattggaaaagggcactcatttggattgccttacttctcttgccttaaatatatcccatatatttaatatgtcaaaaagggcttgaggtgaatttcattaaatggaataatatgatgccactttgcagctaaaataagctcagtgatacctccttgttaaaaaaaaaaaaaaaaaaaaagaatgccaggggggaattatcatgctaaattattttactgctgaagatagcttcattgcaaattattctttttccagaatttcccccaaacaacttagaattccataagtagaacaagatagattctacccccaaaatattcataagcaaatcccactgcccttaaaataaggaagttatgcctggttgtctgtgaatggaacctcagtaggtaatcctgatgaagcttaaaaccttagggcagtgtctacatgggaaacaagtatgtggaaattgacaatcatttttaccaaatcgttgagtaataatatgacttacctgatagatatacacattcaataaggaacatttttttttttcaataaggaacattttaactaaaacattactttagggctgagatttccaggctatctacattgatctactgaaaaatttctagatttccatatacaaacgaagaagacatgagtttagagaatttttttcctttaatttttttttaacagaagggtatcagagtggaggacctagattacgctacctgtgtttgaaaatattgcgctttgcctaaccttcggtggaatgtattgtttcagcatattctatgtataaaaaagtttaaagatgtcttcaaagaagactagagtctttaagtcacttatagctatattttactacaaaatttgtgtataaagatatatttaagtgttttagataaatttaagttactccatatgaaatgtttaatttcagctactgtgaattctttcgatcagtcctttgcttttttaaaaaatcttttccatcgtgttaaaaagaaaattagctattaggagatattaaaagattgatgtcttagaaggacagggttaaaaccttctgtaatatatttaaatatatatttttaagagagatgctacattgccaatgattttataaataatttaaaattaatttacaaatttatagatgcaaaccaaaagatctttttaaaagagagagagaggaaaaaaatcaccttttatttgtttgggtctcattgtcagaattattattcagatcaagaaatctgtgtcgataaaacctaatctcatattggagagtgaatgtcgttaagtatttctgaaatgtttctaaaaaatgaacatgaaaaaaataaggtattttctccctagcttctcattacagtatttctaattgcttcacactttacagttttaatacaaagtacaagctctacttttataacgtgtactacaagtttctttaaaagtattgttgtatttcagctgaactcttgtatctgcagtcttttgttatttctgcaggctacacccttaatttgcagaggccattttgttgtttgtttgatgctgaagctgttgttaaaatgccccaaactccaaggcagattgtctgtataatacgctatagcttttcaccatgtggtgtttaccagctgttactctgtattttaaaaagccagagatttcttctgtctaaactgtttctatagcattttctaaacaaaaaaaatggtttttttctttgccttgtaataagattgtaaatccatttcctgcttgtgttcttagtgggcatgattgtgagtgtgtgtggggtgctcacacgcgtgccagtctttttgtactgtaactacctcatggtttgaatgatgattgtactgctggttgtgttaacagagcacattttgttgggtgagtcctatgtgatttttttcatgtttgttttatctgggggttgttcatgaaactgacagatgtttttctaaaaaggactattatcagtttccaaatacaatacttctctcttctggtttttcctgaatgagcctgattttgttgctggttttcatcatctatgagggtaaaacgagtacccttaaaatccctgtggccagtttgaacacccctgttgtattcttttctctgttcagtgtgtcagctattttgtgaagatgcttagatgtatagttttgataaccacagttttaaatcttttatctgtgcataataaaaagatatatatcagttatt

SEQ ID NO: 192592 - DNA, 4550 bp, Homo sapiens
  Payload ID: 18025
  Gene Name: transforming growth factor, beta receptor III
  Uniprot ID: Q03167
  ENST ID: ENST00000370399
  CDS Start-End: 685-3237
aagaatcttgtttttttgagacggagtctcaccctgtcgcccgggctggagtgcagtggcgcgatcgcaacctccgcttcccgggttcaagggattctcctgcctcagcctcctgagtagctgggactacaggcgcacgccactacacccggccaatttttgtatttatttattttattttattttattttttagtagagacggggtttcaccatgttggccagaacagtctcgatctcctaacctcgtgatccacccgcctcgggctcccaaagtgttgagattacaggcgtgagccaccgcgcccgtccagaattatctttaaaatttatttctttaagatttgtagctactaagaaagaaaggagctttttttccttgggccttcaaactgaaagaaccgcatgagcctgaagctgcgcatggtcttaacatcaggctgtgcaggaagaagctatctgcagatggatgccagcacacacaaggaagcagagctctggcaacattgagtcaaagcaaggacacaacatcagagggacggcagagaatccttgtgtgtagatctttggtggcagtttgaaaattgcaaggagggactttaagactacttctgatttgcaaagattgtctgtgctctgagcaggctgaagtgactggacgagacgcactgttggagaaataaaaatgacttcccattatgtgattgccatctttgccctgatgagctcctgtttagccactgcaggtccagagcctggtgcactgtgtgaactgtcacctgtcagtgcctcccatcctgtccaggccttgatggagagcttcactgttttgtcaggctgtgccagcagaggcacaactgggctgccacaggaggtgcatgtcctgaatctccgcactgcaggccaggggcctggccagctacagagagaggtcacacttcacctgaatcccatctcctcagtccacatccaccacaagtctgttgtgttcctgctcaactccccacaccccctggtgtggcatctgaagacagagagacttgccactggggtctccagactgtttttggtgtctgagggttctgtggtccagttttcatcagcaaacttctccttgacagcagaaacagaagaaaggaacttcccccatggaaatgaacatctgttaaattgggcccgaaaagagtatggagcagttacttcattcaccgaactcaagatagcaagaaacatttatattaaagtgggggaagatcaagtgttccctccaaagtgcaacatagggaagaattttctctcactcaattaccttgctgagtaccttcaacccaaagcagcagaagggtgtgtgatgtccagccagccccagaatgaggaagtacacatcatcgagctaatcacccccaactctaacccctacagtgctttccaggtggatataacaattgatataagaccttctcaagaggatcttgaagtggtcaaaaatctcatcctgatcttgaagtgcaaaaagtctgtcaactgggtgatcaaatcttttgatgttaagggaagcctgaaaattattgctcctaacagtattggctttggaaaagagagtgaaagatctatgacaatgaccaaatcaataagagatgacattccttcaacccaagggaatctggtgaagtgggctttggacaatggctatagtccaataacttcatacacaatggctcctgtggctaatagatttcatcttcggcttgaaaataatgaggagatgggagatgaggaagtccacactattcctcctgagctacggatcctgctggaccctggtgccctgcctgccctgcagaacccgcccatccggggaggggaaggccaaaatggaggccttccgtttcctttcccagatatttccaggagagtctggaatgaagagggagaagatgggctccctcggccaaaggaccctgtcattcccagcatacaactgtttcctggtctcagagagccagaagaggtgcaagggagcgtggatattgccctgtctgtcaaatgtgacaatgagaagatgatcgtggctgtagaaaaagattcttttcaggccagtggctactcggggatggacgtcaccctgttggatcctacctgcaaggccaagatgaatggcacacactttgttttggagtctcctctgaatggctgcggtactcggccccggtggtcagcccttgatggtgtggtctactataactccattgtgatacaggttccagcccttggggacagtagtggttggccagatggttatgaagatctggagtcaggtgataatggatttccgggagatatggatgaaggagatgcttccctgttcacccgacctgaaatcgtggtgtttaattgcagccttcagcaggtgaggaaccccagcagcttccaggaacagccccacggaaacatcaccttcaacatggagctatacaacactgacctctttttggtgccctcccagggcgtcttctctgtgccagagaatggacacgtttatgttgaggtatctgttactaaggctgaacaagaactgggatttgccatccaaacgtgctttatctctccatattcgaaccctgataggatgtctcattacaccattattgagaatatttgtcctaaagatgaatctgtgaaattctacagtcccaagagagtgcactttcctatcccgcaagctgacatggataagaagcgattcagctttgtcttcaagcctgtcttcaacacctcactgctctttctacagtgtgagctgacgctgtgtacgaagatggagaagcacccccagaagttgcctaagtgtgtgcctcctgacgaagcctgcacctcgctggacgcctcgataatctgggccatgatgcagaataagaagacgttcactaagccccttgctgtgatccaccatgaagcagaatctaaagaaaaaggtccaagcatgaaggaaccaaatccaatttctccaccaattttccatggtctggacaccctaaccgtgatgggcattgcgtttgcagcctttgtgatcggagcactcctgacgggggccttgtggtacatctattctcacacaggggagacagcaggaaggcagcaagtccccacctccccgccagcctcggaaaacagcagtgctgcccacagcatcggcagcacgcagagcacgccttgctccagcagcagcacggcctagcccaacccagcccaacccggcccaacccagcccagcccagctcagctcagctactgccaagggcaggaccaatggctgagcctcgtgtccagactcagagggctggattttggttcccttgtaaagacagagtgaatttcagtataaagatcacccgttgtattcaccccacacccagggctagtataaacatgaccctgggcttctgtaccacactagaattcatgtgagaaagctaaaatggtggtcttctccaccagcccctcacaggcttgggggttttcaatgtgaaacacatgccagtttttaaaatgctgctttgtccaggtgagaacatccataatttggggccctgagttttacccagactcaaggagttggtaaagggttaatagccagatagtagaaccagtgaggagatgcggccaaagattctttatatctgaaccaagatgtaaaacaagaaatgctttgaggctttctaagcgatcctcctgtctaatttgcacctttgtctggatgcacacttctgaccttgctgccacaacctgtggggtctgatgtgtcccttgatgggtgctgccctcagggactgcaccctgacaagtgttaaggcaacattcctttcttgtgccctgggccaaaaccaatgctgatgaccttatcagcttcctgtttcttcccatacttgcatacaccactgcaaaatgtcttaatgcaaattttgtatttcttacaggcctacagaaattgaaaatgaccaaaatcaggaaccacagatttgtgcccattcctaatattttgttctgcaaattaatgtataatttgaggtgaaattcagttataaagtcaaggacgaatttgcacagtgatatatttctatgtgtatgcaagtacaagtatataatatgtcacctggcacattcattttctcagttgaagaagagaaaatttgaaaatgtccttatgcttttagagttgcaacttaagtatatttggtagggtgagtgtttccactcaaaatatgtcaacttaaaaaaaaataggccctttcataaaaaccaaactgtagcaagatgcaaatgcatggcaaatcctgtcggtctccagttggttatctgaatagtgtcaccaattccaccaagacagtgctgagattggaaaagggcactcatttggattgccttacttctcttgccttaaatatatcccatatatttaatatgtcaaaaagggcttgaggtgaatttcattaaatggaataatatgatgccactttgcagctaaaataagctcagtgatacctccttgtt

SEQ ID NO: 192593 - DNA, 551 bp, Homo sapiens
  Payload ID: 18025
  Gene Name: transforming growth factor, beta receptor III
  ENST ID: ENST00000417833
  CDS Start-End: 446-551
actttcctcttcccagcgagtgaaggagggcagtcggcggctctcgcgccccggccactttccctgcgcgattcccggagctccctgcaggaggtgagagtccccagcgggtccggatggcgtagttttgccgcggcgcagcagctgccggagctcgccgccgccgagcgctgggcggggaaacttgccgccgctttcctccaacttgctgcgggtggatctccgctggacacaccgcctccgagctctgcagctctcctccctcctgtaatgcttcctctgcctgcagtgtcattcatcacctgacttttaaaatcttcgcttatcctcaggcagtttgaaaattgcaaggagggactttaagactacttctgatttgcaaagattgtctgtgctctgagcaggctgaagtgactggacgagacgcactgttggagaaataaaaatgacttcccattatgtgattgccatctttgccctgatgagctcctgtttagccactgcaggtccagagcctggtgcactgtgtgaactgtcacctgtcagtgcct

SEQ ID NO: 192594 - DNA, 2908 bp, Homo sapiens
  Payload ID: 18025
  Gene Name: transforming growth factor, beta receptor III
  Uniprot ID: Q03167
  ENST ID: ENST00000465892
  CDS Start-End: 346-2898
cagcgagtgaaggagggcagtcggcggctctcgcgccccggccactttccctgcgcgattcccggagctccctgcaggaggtgagagtccccagcgggtccggatggcgtagttttgccgcggcgcagcagctgccggagctcgccgccgccgagcgctgggcggggaaacttgccgccgctttcctccaacttgctgcgggtggatctccgctggacacaccgcctccgaggcagtttgaaaattgcaaggagggactttaagactacttctgatttgcaaagattgtctgtgctctgagcaggctgaagtgactggacgagacgcactgttggagaaataaaaatgacttcccattatgtgattgccatctttgccctgatgagctcctgtttagccactgcaggtccagagcctggtgcactgtgtgaactgtcacctgtcagtgcctcccatcctgtccaggccttgatggagagcttcactgttttgtcaggctgtgccagcagaggcacaactgggctgccacaggaggtgcatgtcctgaatctccgcactgcaggccaggggcctggccagctacagagagaggtcacacttcacctgaatcccatctcctcagtccacatccaccacaagtctgttgtgttcctgctcaactccccacaccccctggtgtggcatctgaagacagagagacttgccactggggtctccagactgtttttggtgtctgagggttctgtggtccagttttcatcagcaaacttctccttgacagcagaaacagaagaaaggaacttcccccatggaaatgaacatctgttaaattgggcccgaaaagagtatggagcagttacttcattcaccgaactcaagatagcaagaaacatttatattaaagtgggggaagatcaagtgttccctccaaagtgcaacatagggaagaattttctctcactcaattaccttgctgagtaccttcaacccaaagcagcagaagggtgtgtgatgtccagccagccccagaatgaggaagtacacatcatcgagctaatcacccccaactctaacccctacagtgctttccaggtggatataacaattgatataagaccttctcaagaggatcttgaagtggtcaaaaatctcatcctgatcttgaagtgcaaaaagtctgtcaactgggtgatcaaatcttttgatgttaagggaagcctgaaaattattgctcctaacagtattggctttggaaaagagagtgaaagatctatgacaatgaccaaatcaataagagatgacattccttcaacccaagggaatctggtgaagtgggctttggacaatggctatagtccaataacttcatacacaatggctcctgtggctaatagatttcatcttcggcttgaaaataatgaggagatgggagatgaggaagtccacactattcctcctgagctacggatcctgctggaccctggtgccctgcctgccctgcagaacccgcccatccggggaggggaaggccaaaatggaggccttccgtttcctttcccagatatttccaggagagtctggaatgaagagggagaagatgggctccctcggccaaaggaccctgtcattcccagcatacaactgtttcctggtctcagagagccagaagaggtgcaagggagcgtggatattgccctgtctgtcaaatgtgacaatgagaagatgatcgtggctgtagaaaaagattcttttcaggccagtggctactcggggatggacgtcaccctgttggatcctacctgcaaggccaagatgaatggcacacactttgttttggagtctcctctgaatggctgcggtactcggccccggtggtcagcccttgatggtgtggtctactataactccattgtgatacaggttccagcccttggggacagtagtggttggccagatggttatgaagatctggagtcaggtgataatggatttccgggagatatggatgaaggagatgcttccctgttcacccgacctgaaatcgtggtgtttaattgcagccttcagcaggtgaggaaccccagcagcttccaggaacagccccacggaaacatcaccttcaacatggagctatacaacactgacctctttttggtgccctcccagggcgtcttctctgtgccagagaatggacacgtttatgttgaggtatctgttactaaggctgaacaagaactgggatttgccatccaaacgtgctttatctctccatattcgaaccctgataggatgtctcattacaccattattgagaatatttgtcctaaagatgaatctgtgaaattctacagtcccaagagagtgcactttcctatcccgcaagctgacatggataagaagcgattcagctttgtcttcaagcctgtcttcaacacctcactgctctttctacagtgtgagctgacgctgtgtacgaagatggagaagcacccccagaagttgcctaagtgtgtgcctcctgacgaagcctgcacctcgctggacgcctcgataatctgggccatgatgcagaataagaagacgttcactaagccccttgctgtgatccaccatgaagcagaatctaaagaaaaaggtccaagcatgaaggaaccaaatccaatttctccaccaattttccatggtctggacaccctaaccgtgatgggcattgcgtttgcagcctttgtgatcggagcactcctgacgggggccttgtggtacatctattctcacacaggggagacagcaggaaggcagcaagtccccacctccccgccagcctcggaaaacagcagtgctgcccacagcatcggcagcacgcagagcacgccttgctccagcagcagcacggcctagcccaacccag

SEQ ID NO: 192595 - DNA, 6455 bp, Homo sapiens
  Payload ID: 18025
  Gene Name: transforming growth factor, beta receptor III
  ENST ID: ENST00000533089
  CDS Start-End: 516-785
ccatctctactaaaaatacaaaaattagccaggcgtagtggcgcatgtctgtaatcccagctacttgggaggctgaggcaggagaatcgcttgaacccaggaggcggaggttgcagtgagccaagactgcgccactgtgctccagcttggcgacagagagagactctatctcaaaaaaaaaaaaaaaaagccaataacaaatatgtcatttgcaaaagtatttgctataaaaatctttattagatagtcactgccctcagtctagtttgcttgagtgctattttgcatcttttaagataaatttcttacattacgcttttcagaaattctctgtttaattttagtgtctgtttgtttatgaagtttcttcattaagttttcttattgaaatttgttttacaggcagtttgaaaattgcaaggagggactttaagactacttctgatttgcaaagattgtctgtgctctgagcaggctgaagtgactggacgagacgcactgttggagaaataaaaatgacttcccattatgtgattgccatctttgccctgatgagctcctgtttagccactgcaggtccagagcctggtgcactgtgtgaactgtcacctgtcagtgcctcccatcctgtccaggccttgatggagagcttcactgttttgtcaggctgtgccagcagaggcacaactgggctgccacaggaggtgcatgtcctgaatctccgcactgcaggccaggggcctggccagctacagagagaggcctgttcaatgaatcactattaagaacccactgtgtgctagagtccttcagctgaacctgaaatttgtacaactcttggaggatgaggggcaaattacagagtccctgctgacttactgagtgagcctctgctgaaactccagaaattgtgtaagtggaccccttccccacaaaagattcagaaagcagcgcactatacatgggacacatcctagagaaaaggggtgtggtcacacttcacctgaatcccatctcctcagtccacatccaccacaagtctgttgtgttcctgctcaactccccacaccccctggtgtggcatctgaagacagagagacttgccactggggtctccagactgtttttggttacccagggagcctaaaggagctgtggaaagcgaatgggtctcttgactctcagtccacgatgcataagaaaggaacttcccccatggaaatgaacatctgttaaattgggcccgaaaagagtatggagcagttacttcattcaccgaactcaagatagcaagaaacatttatattaaagtgggggaagatcaagtgttccctccaaagtgcaacatagggaagaattttctctcactcaattaccttgctgagtaccttcaacccaaagcagcagaagggtgtgtgatgtccagccagccccagaatgaggaagtacacatcatcgagctaatcacccccaactctaacccctacagtgctttccaggtggatataacaattgatataagaccttctcaagaggatcttgaagtggtcaaaaatctcatcctgatcttgaagtgcaaaaagtctgtcaactgggtgatcaaatcttttgatgttaagggaagcctgaaaattattgctcctaacagtattggctttggaaaagagagtgaaagatctatgacaatgaccaaatcaataagagatgacattccttcaacccaagggaatctggtgaagtgggctttggacaatggctatagtccaataacttcatacacaatggctcctgtggctaatagatttcatcttcggcttgaaaataatgaggagatgggagatgaggaagtccacactattcctcctgagctacggatcctgctggaccctggtgccctgcctgccctgcagaacccgcccatccggggaggggaaggccaaaatggaggccttccgtttcctttcccagatatttccaggagagtctggaatgaagagggagaagatgggctccctcggccaaaggaccctgtcattcccagcatacaactgtttcctggtctcagagagccagaagaggtgcaagggagcgtggatattgccctgtctgtcaaatgtgacaatgagaagatgatcgtggctgtagaaaaagattcttttcaggccagtggctactcggggatggacgtcaccctgttggatcctacctgcaaggccaagatgaatggcacacactttgttttggagtctcctctgaatggctgcggtactcggccccggtggtcagcccttgatggtgtggtctactataactccattgtgatacaggttccagcccttggggacagtagtggttggccagatggttatgaagatctggagtcaggtgataatggatttccgggagatatggatgaaggagatgcttccctgttcacccgacctgaaatcgtggtgtttaattgcagccttcagcaggtgaggaaccccagcagcttccaggaacagccccacggaaacatcaccttcaacatggagctatacaacactgacctctttttggtgccctcccagggcgtcttctctgtgccagagaatggacacgtttatgttgagtgtgagctgacgctgtgtacgaagatggagaagcacccccagaagttgcctaagtgtgtgcctcctgacgaagcctgcacctcgctggacgcctcgataatctgggccatgatgcagaataagaagacgttcactaagccccttgctgtgatccaccatgaagcagaatctaaagaaaaaggtccaagcatgaaggaaccaaatccaatttctccaccaattttccatggtctggacaccctaaccgtgatgggcattgcgtttgcagcctttgtgatcggagcactcctgacgggggccttgtggtacatctattctcacacaggggagacagcaggaaggcagcaagtccccacctccccgccagcctcggaaaacagcagtgctgcccacagcatcggcagcacgcagagcacgccttgctccagcagcagcacggcctagcccaacccagcccaacccggcccaacccagcccagcccagctcagctcagctactgccaagggcaggaccaatggctgagcctcgtgtccagactcagagggctggattttggttcccttgtaaagacagagtgaatttcagtataaagatcacccgttgtattcaccccacacccagggctagtataaacatgaccctgggcttctgtaccacactagaattcatgtgagaaagctaaaatggtggtcttctccaccagcccctcacaggcttgggggttttcaatgtgaaacacatgccagtttttaaaatgctgctttgtccaggtgagaacatccataatttggggccctgagttttacccagactcaaggagttggtaaagggttaatagccagatagtagaaccagtgaggagatgcggccaaagattctttatatctgaaccaagatgtaaaacaagaaatgctttgaggctttctaagcgatcctcctgtctaatttgcacctttgtctggatgcacacttctgaccttgctgccacaacctgtggggtctgatgtgtcccttgatgggtgctgccctcagggactgcaccctgacaagtgttaaggcaacattcctttcttgtgccctgggccaaaaccaatgctgatgaccttatcagcttcctgtttcttcccatacttgcatacaccactgcaaaatgtcttaatgcaaattttgtatttcttacaggcctacagaaattgaaaatgaccaaaatcaggaaccacagatttgtgcccattcctaatattttgttctgcaaattaatgtataatttgaggtgaaattcagttataaagtcaaggacgaatttgcacagtgatatatttctatgtgtatgcaagtacaagtatataatatgtcacctggcacattcattttctcagttgaagaagagaaaatttgaaaatgtccttatgcttttagagttgcaacttaagtatatttggtagggtgagtgtttccactcaaaatatgtcaacttaaaaaaaaataggccctttcataaaaaccaaactgtagcaagatgcaaatgcatggcaaatcctgtcggtctccagttggttatctgaatagtgtcaccaattccaccaagacagtgctgagattggaaaagggcactcatttggattgccttacttctcttgccttaaatatatcccatatatttaatatgtcaaaaagggcttgaggtgaatttcattaaatggaataatatgatgccactttgcagctaaaataagctcagtgatacctccttgttaaaaaaaaaaaaaaaaaaaaagaatgccaggggggaattatcatgctaaattattttactgctgaagatagcttcattgcaaattattctttttccagaatttcccccaaacaacttagaattccataagtagaacaagatagattctacccccaaaatattcataagcaaatcccactgcccttaaaataaggaagttatgcctggttgtctgtgaatggaacctcagtaggtaatcctgatgaagcttaaaaccttagggcagtgtctacatgggaaacaagtatgtggaaattgacaatcatttttaccaaatcgttgagtaataatatgacttacctgatagatatacacattcaataaggaacatttttttttttcaataaggaacattttaactaaaacattactttagggctgagatttccaggctatctacattgatctactgaaaaatttctagatttccatatacaaacgaagaagacatgagtttagagaatttttttcctttaatttttttttaacagaagggtatcagagtggaggacctagattacgctacctgtgtttgaaaatattgcgctttgcctaaccttcggtggaatgtattgtttcagcatattctatgtataaaaaagtttaaagatgtcttcaaagaagactagagtctttaagtcacttatagctatattttactacaaaatttgtgtataaagatatatttaagtgttttagataaatttaagttactccatatgaaatgtttaatttcagctactgtgaattctttcgatcagtcctttgcttttttaaaaaatcttttccatcgtgttaaaaagaaaattagctattaggagatattaaaagattgatgtcttagaaggacagggttaaaaccttctgtaatatatttaaatatatatttttaagagagatgctacattgccaatgattttataaataatttaaaattaatttacaaatttatagatgcaaaccaaaagatctttttaaaagagagagagaggaaaaaaatcaccttttatttgtttgggtctcattgtcagaattattattcagatcaagaaatctgtgtcgataaaacctaatctcatattggagagtgaatgtcgttaagtatttctgaaatgtttctaaaaaatgaacatgaaaaaaataaggtattttctccctagcttctcattacagtatttctaattgcttcacactttacagttttaatacaaagtacaagctctacttttataacgtgtactacaagtttctttaaaagtattgttgtatttcagctgaactcttgtatctgcagtcttttgttatttctgcaggctacacccttaatttgcagaggccattttgttgtttgtttgatgctgaagctgttgttaaaatgccccaaactccaaggcagattgtctgtataatacgctatagcttttcaccatgtggtgtttaccagctgttactctgtattttaaaaagccagagatttcttctgtctaaactgtttctatagcattttctaaacaaaaaaaatggtttttttctttgccttgtaataagattgtaaatccatttcctgcttgtgttcttagtgggcatgattgtgagtgtgtgtggggtgctcacacgcgtgccagtctttttgtactgtaactacctcatggtttgaatgatgattgtactgctggttgtgttaacagagcacattttgttgggtgagtcctatgtgatttttttcatgtttgttttatctgggggttgttcatgaaactgacagatgtttttctaaaaaggactattatcagtttccaaatacaatacttctctcttctggtttttcctgaatgagcctgattttgttgctggttttcatcatctatgagggtaaaacgagtacccttaaaatccctgtggccagtttgaacacccctgttgtattcttttctctgttcagtgtgtcagctattttgtgaagatgcttagatgtatagttttgataaccacagttttaaatcttttatctgtgcataataaaaagatatatatcagttattaa

SEQ ID NO: 192596 - DNA, 3913 bp, Homo sapiens
  Payload ID: 18025
  Gene Name: transforming growth factor, beta receptor III
  ENST ID: ENST00000532540
  CDS Start-End: 169-318
ccgctttcctccaacttgctgcgggtggatctccgctggacacaccgcctccgaggcagtttgaaaattgcaaggagggactttaagactacttctgatttgcaaagattgtctgtgctctgagcaggctgaagtgactggacgagacgcactgttggagaaataaaaatgacttcccattatgtgattgccatctttgccctgatgagctcctgtttagccactgcaggctggagtgcaatggcgcgatcttggctcactgcaacctccgcctcccgggttcaagcgattcttctgcctcagcctcctgagtactaggattacaggtccagagcctggtgcactgtgtgaactgtcacctgtcagtgcctcccatcctgtccaggccttgatggagagcttcactgttttgtcaggctgtgccagcagaggcacaactgggctgccacaggaggtgcatgtcctgaatctccgcactgcaggccaggggcctggccagctacagagagaggtcacacttcacctgaatcccatctcctcagtccacatccaccacaagtctgttgtgttcctgctcaactccccacaccccctggtgtggcatctgaagacagagagacttgccactggggtctccagactgtttttggtgtctgagggttctgtggtccagttttcatcagcaaacttctccttgacagcagaaacagaagaaaggaacttcccccatggaaatgaacatctgttaaattgggcccgaaaagagtatggagcagttacttcattcaccgaactcaagatagcaagaaacatttatattaaagtgggggaagatcaagtgttccctccaaagtgcaacatagggaagaattttctctcactcaattaccttgctgagtaccttcaacccaaagcagcagaagggtgtgtgatgtccagccagccccagaatgaggaagtacacatcatcgagctaatcacccccaactctaacccctacagtgctttccaggtggatataacaattgatataagaccttctcaagaggatcttgaagtggtcaaaaatctcatcctgatcttgaagtgcaaaaagtctgtcaactgggtgatcaaatcttttgatgttaagggaagcctgaaaattattgctcctaacagtattggctttggaaaagagagtgaaagatctatgacaatgaccaaatcaataagagatgacattccttcaacccaagggaatctggtgaagtgggctttggacaatggctatagtccaataacttcatacacaatggctcctgtggctaatagatttcatcttcggcttgaaaataatgcagaggagatgggagatgaggaagtccacactattcctcctgagctacggatcctgctggaccctggtgccctgcctgccctgcagaacccgcccatccggggaggggaaggccaaaatggaggccttccgtttcctttcccagatatttccaggagagtctggaatgaagagggagaagatgggctccctcggccaaaggaccctgtcattcccagcatacaactgtttcctggtctcagagagccagaagaggtgcaagggagcgtggatattgccctgtctgtcaaatgtgacaatgagaagatgatcgtggctgtagaaaaagattcttttcaggccagtggctactcggggatggacgtcaccctgttggatcctacctgcaaggccaagatgaatggcacacactttgttttggagtctcctctgaatggctgcggtactcggccccggtggtcagcccttgatggtgtggtctactataactccattgtgatacaggttccagcccttggggacagtagtggttggccagatggttatgaagatctggagtcaggtgataatggatttccgggagatatggatgaaggagatgcttccctgttcacccgacctgaaatcgtggtgtttaattgcagccttcagcaggtgaggaaccccagcagcttccaggaacagccccacggaaacatcaccttcaacatggagctatacaacactgacctctttttggtgccctcccagggcgtcttctctgtgccagagaatggacacgtttatgttgaggtatctgttactaaggctgaacaagaactgggatttgccatccaaacgtgctttatctctccatattcgaaccctgataggatgtctcattacaccattattgagaatatttgtcctaaagatgaatctgtgaaattctacagtcccaagagagtgcactttcctatcccgcaagctgacatggataagaagcgattcagctttgtcttcaagcctgtcttcaacacctcactgctctttctacagtgtgagctgacgctgtgtacgaagatggagaagcacccccagaagttgcctaagtgtgtgcctcctgacgaagcctgcacctcgctggacgcctcgataatctgggccatgatgcagaataagaagacgttcactaagccccttgctgtgatccaccatgaagcagaatctaaagaaaaaggtccaagcatgaaggaaccaaatccaatttctccaccaattttccatggtctggacaccctaaccgtgatgggcattgcgtttgcagcctttgtgatcggagcactcctgacgggggccttgtggtacatctattctcacacaggggagacagcaggaaggcagcaagtccccacctccccgccagcctcggaaaacagcagtgctgcccacagcatcggcagcacgcagagcacgccttgctccagcagcagcacggcctagcccaacccagcccaacccggcccaacccagcccagcccagctcagctcagctactgccaagggcaggaccaatggctgagcctcgtgtccagactcagagggctggattttggttcccttgtaaagacagagtgaatttcagtataaagatcacccgttgtattcaccccacacccagggctagtataaacatgaccctgggcttctgtaccacactagaattcatgtgagaaagctaaaatggtggtcttctccaccagcccctcacaggcttgggggttttcaatgtgaaacacatgccagtttttaaaatgctgctttgtccaggtgagaacatccataatttggggccctgagttttacccagactcaaggagttggtaaagggttaatagccagatagtagaaccagtgaggagatgcggccaaagattctttatatctgaaccaagatgtaaaacaagaaatgctttgaggctttctaagcgatcctcctgtctaatttgcacctttgtctggatgcacacttctgaccttgctgccacaacctgtggggtctgatgtgtcccttgatgggtgctgccctcagggactgcaccctgacaagtgttaaggcaacattcctttcttgtgccctgggccaaaaccaatgctgatgaccttatcagcttcctgtttcttcccatacttgcatacaccactgcaaaatgtcttaatgcaaattttgtatttcttacaggcctacagaaattgaaaatgaccaaaatcaggaaccacagatttgtgcccattcctaatattttgttctgcaaattaatgtataatttgaggtgaaattcagttataaagtcaaggacgaatttgcacagtgatatatttctatgtgtatgcaagtacaagtatataatatgtcacctggcacattcattttctcagttgaagaagagaaaatttgaaaatgtccttatgcttttagagttgcaacttaagtatatttggtagggtgagtgtttccactcaaaatatgtcaacttaaaaaaaaataggccctttcataaaaaccaaactgtagcaagatgcaaatgcatggca

SEQ ID NO: 192597 - DNA, 3927 bp, Homo sapiens
  Payload ID: 18025
  Gene Name: transforming growth factor, beta receptor III
  Uniprot ID: Q03167
  ENST ID: ENST00000525962
  CDS Start-End: 63-2618
gattgtctgtgctctgagcaggctgaagtgactggacgagacgcactgttggagaaataaaaatgacttcccattatgtgattgccatctttgccctgatgagctcctgtttagccactgcaggtccagagcctggtgcactgtgtgaactgtcacctgtcagtgcctcccatcctgtccaggccttgatggagagcttcactgttttgtcaggctgtgccagcagaggcacaactgggctgccacaggaggtgcatgtcctgaatctccgcactgcaggccaggggcctggccagctacagagagaggtcacacttcacctgaatcccatctcctcagtccacatccaccacaagtctgttgtgttcctgctcaactccccacaccccctggtgtggcatctgaagacagagagacttgccactggggtctccagactgtttttggtgtctgagggttctgtggtccagttttcatcagcaaacttctccttgacagcagaaacagaagaaaggaacttcccccatggaaatgaacatctgttaaattgggcccgaaaagagtatggagcagttacttcattcaccgaactcaagatagcaagaaacatttatattaaagtgggggaagatcaagtgttccctccaaagtgcaacatagggaagaattttctctcactcaattaccttgctgagtaccttcaacccaaagcagcagaagggtgtgtgatgtccagccagccccagaatgaggaagtacacatcatcgagctaatcacccccaactctaacccctacagtgctttccaggtggatataacaattgatataagaccttctcaagaggatcttgaagtggtcaaaaatctcatcctgatcttgaagtgcaaaaagtctgtcaactgggtgatcaaatcttttgatgttaagggaagcctgaaaattattgctcctaacagtattggctttggaaaagagagtgaaagatctatgacaatgaccaaatcaataagagatgacattccttcaacccaagggaatctggtgaagtgggctttggacaatggctatagtccaataacttcatacacaatggctcctgtggctaatagatttcatcttcggcttgaaaataatgcagaggagatgggagatgaggaagtccacactattcctcctgagctacggatcctgctggaccctggtgccctgcctgccctgcagaacccgcccatccggggaggggaaggccaaaatggaggccttccgtttcctttcccagatatttccaggagagtctggaatgaagagggagaagatgggctccctcggccaaaggaccctgtcattcccagcatacaactgtttcctggtctcagagagccagaagaggtgcaagggagcgtggatattgccctgtctgtcaaatgtgacaatgagaagatgatcgtggctgtagaaaaagattcttttcaggccagtggctactcggggatggacgtcaccctgttggatcctacctgcaaggccaagatgaatggcacacactttgttttggagtctcctctgaatggctgcggtactcggccccggtggtcagcccttgatggtgtggtctactataactccattgtgatacaggttccagcccttggggacagtagtggttggccagatggttatgaagatctggagtcaggtgataatggatttccgggagatatggatgaaggagatgcttccctgttcacccgacctgaaatcgtggtgtttaattgcagccttcagcaggtgaggaaccccagcagcttccaggaacagccccacggaaacatcaccttcaacatggagctatacaacactgacctctttttggtgccctcccagggcgtcttctctgtgccagagaatggacacgtttatgttgaggtatctgttactaaggctgaacaagaactgggatttgccatccaaacgtgctttatctctccatattcgaaccctgataggatgtctcattacaccattattgagaatatttgtcctaaagatgaatctgtgaaattctacagtcccaagagagtgcactttcctatcccgcaagctgacatggataagaagcgattcagctttgtcttcaagcctgtcttcaacacctcactgctctttctacagtgtgagctgacgctgtgtacgaagatggagaagcacccccagaagttgcctaagtgtgtgcctcctgacgaagcctgcacctcgctggacgcctcgataatctgggccatgatgcagaataagaagacgttcactaagccccttgctgtgatccaccatgaagcagaatctaaagaaaaaggtccaagcatgaaggaaccaaatccaatttctccaccaattttccatggtctggacaccctaaccgtgatgggcattgcgtttgcagcctttgtgatcggagcactcctgacgggggccttgtggtacatctattctcacacaggggagacagcaggaaggcagcaagtccccacctccccgccagcctcggaaaacagcagtgctgcccacagcatcggcagcacgcagagcacgccttgctccagcagcagcacggcctagcccaacccagcccaacccggcccaacccagcccagcccagctcagctcagctactgccaagggcaggaccaatggctgagcctcgtgtccagactcagagggctggattttggttcccttgtaaagacagagtgaatttcagtataaagatcacccgttgtattcaccccacacccagggctagtataaacatgaccctgggcttctgtaccacactagaattcatgtgagaaagctaaaatggtggtcttctccaccagcccctcacaggcttgggggttttcaatgtgaaacacatgccagtttttaaaatgctgctttgtccaggtgagaacatccataatttggggccctgagttttacccagactcaaggagttggtaaagggttaatagccagatagtagaaccagtgaggagatgcggccaaagattctttatatctgaaccaagatgtaaaacaagaaatgctttgaggctttctaagcgatcctcctgtctaatttgcacctttgtctggatgcacacttctgaccttgctgccacaacctgtggggtctgatgtgtcccttgatgggtgctgccctcagggactgcaccctgacaagtgttaaggcaacattcctttcttgtgccctgggccaaaaccaatgctgatgaccttatcagcttcctgtttcttcccatacttgcatacaccactgcaaaatgtcttaatgcaaattttgtatttcttacaggcctacagaaattgaaaatgaccaaaatcaggaaccacagatttgtgcccattcctaatattttgttctgcaaattaatgtataatttgaggtgaaattcagttataaagtcaaggacgaatttgcacagtgatatatttctatgtgtatgcaagtacaagtatataatatgtcacctggcacattcattttctcagttgaagaagagaaaatttgaaaatgtccttatgcttttagagttgcaacttaagtatatttggtagggtgagtgtttccactcaaaatatgtcaacttaaaaaaaaataggccctttcataaaaaccaaactgtagcaagatgcaaatgcatggcaaatcctgtcggtctccagttggttatctgaatagtgtcaccaattccaccaagacagtgctgagattggaaaagggcactcatttggattgccttacttctcttgccttaaatatatcccatatatttaatatgtcaaaaagggcttgaggtgaatttcattaaatggaataatatgatgccactttgcagctaaaataagctcagtgatacctcct

SEQ ID NO: 192598 - DNA, 1260 bp, Homo sapiens
  Payload ID: 18026
  Gene Name: transforming growth factor, beta receptor III-like
  Uniprot ID: H3BV60
  ENST ID: ENST00000565886
  CDS Start-End: 124-1074
agcttcggaggcttctctaggggcgcatggctctgcaaccggctcagttgctgggctgtgcgagtcccaggggtcgccagggggcacatcaccgtcaggggggaaagtggcgcggagcccatcatgggtgaatcggccgccgcaaccgcatcccttttccaaaggcggcggcgggggcgaggtggtcgggtcacttttcccggaggcctaaagggcagcgcgcgttttctctcctttgggccgcccttccccgccccgccagctcccccgttccccgcggcgcccggcccctggctgcgcagacccctcttcagcctgaagctgtccgacacagaggacgtctttcctcgccgcgcggggccgctcgaggtcccggccgacagccgcgtgttcgtgcaggcggccttggcccgtccctccccgcgctggggcctggccctgcaccgctgctcagtgacgccgtcctcacgcccggccccggggcccgccctggctctgctgcgtgagggctgccccgccgacacctctgtcgccttcccgccaccgccgccgccgagcccgggtgccgcccgccccgcgcgtttcagcttccgcctgcgcccggtcttcaacgcctcggtgcagttcctgcactgccagctgagccgctgccgccgcctccggggagtccgccgggcgcctgcgcctctgacgccgccgccgccgccgccgccatcgcggtgtctgcctcaggacgaggcgtgcgccgacactggcagtggcagcgccgagggcctggctgctgacggcccccacctgcacacgctgacgcagcctatcgtggtcaccgtgccgcggccgccccccaggccgcccaagagtgtccccggccgtgcagtgcgccctgagcctcccgcgccggcccccgcggccctggaacccgcgccggtggtggcgctggtgttggcagccttcgtgctgggcgccgcgctggccgccgggctgggtctcgtctgtgcgcactcagcgccccacgcccctggcccgcccgcgagagcctcgcccagcggtccccagcccaggaggtcccagtgaggaagggatggtgcgcccccaacatggtccggagatacacccagctaccaattcgggaccaggaccaacaggaccggacccgcctccctggacctcggacctgatgaggccacgacccctgcgcttctctcctccccctgtccctcccacctgtgctcaaaataaacctctggactgaccggctaa

SEQ ID NO: 192599 - DNA, 2804 bp, Homo sapiens
  Payload ID: 18027
  Gene Name: transforming growth factor, beta-induced, 68kDa
  Uniprot ID: Q15582
  ENST ID: ENST00000442011
  CDS Start-End: 162-2213
ctccttgcacgggccggcccagcttccccgcccctggcgtccgctccctcccgctcgcagcttacttaacctggcccgggcggcggaggcgctctcacttccctggagccgcccgcttgcccgtcggtcgctagctcgctcggtgcgcgtcgtcccgctccatggcgctcttcgtgcggctgctggctctcgccctggctctggccctgggccccgccgcgaccctggcgggtcccgccaagtcgccctaccagctggtgctgcagcacagcaggctccggggccgccagcacggccccaacgtgtgtgctgtgcagaaggttattggcactaataggaagtacttcaccaactgcaagcagtggtaccaaaggaaaatctgtggcaaatcaacagtcatcagctacgagtgctgtcctggatatgaaaaggtccctggggagaagggctgtccagcagccctaccactctcaaacctttacgagaccctgggagtcgttggatccaccaccactcagctgtacacggaccgcacggagaagctgaggcctgagatggaggggcccggcagcttcaccatcttcgcccctagcaacgaggcctgggcctccttgccagctgaagtgctggactccctggtcagcaatgtcaacattgagctgctcaatgccctccgctaccatatggtgggcaggcgagtcctgactgatgagctgaaacacggcatgaccctcacctctatgtaccagaattccaacatccagatccaccactatcctaatgggattgtaactgtgaactgtgcccggctgctgaaagccgaccaccatgcaaccaacggggtggtgcacctcatcgataaggtcatctccaccatcaccaacaacatccagcagatcattgagatcgaggacacctttgagacccttcgggctgctgtggctgcatcagggctcaacacgatgcttgaaggtaacggccagtacacgcttttggccccgaccaatgaggccttcgagaagatccctagtgagactttgaaccgtatcctgggcgacccagaagccctgagagacctgctgaacaaccacatcttgaagtcagctatgtgtgctgaagccatcgttgcggggctgtctgtagagaccctggagggcacgacactggaggtgggctgcagcggggacatgctcactatcaacgggaaggcgatcatctccaataaagacatcctagccaccaacggggtgatccactacattgatgagctactcatcccagactcagccaagacactatttgaattggctgcagagtctgatgtgtccacagccattgaccttttcagacaagccggcctcggcaatcatctctctggaagtgagcggttgaccctcctggctcccctgaattctgtattcaaagatggaacccctccaattgatgcccatacaaggaatttgcttcggaaccacataattaaagaccagctggcctctaagtatctgtaccatggacagaccctggaaactctgggcggcaaaaaactgagagtttttgtttatcgtaatagcctctgcattgagaacagctgcatcgcggcccacgacaagagggggaggtacgggaccctgttcacgatggaccgggtgctgacccccccaatggggactgtcatggatgtcctgaagggagacaatcgctttagcatgctggtagctgccatccagtctgcaggactgacggagaccctcaaccgggaaggagtctacacagtctttgctcccacaaatgaagccttccgagccctgccaccaagagaacggagcagactcttgggagatgccaaggaacttgccaacatcctgaaataccacattggtgatgaaatcctggttagcggaggcatcggggccctggtgcggctaaagtctctccaaggtgacaagctggaagtcagcttgaaaaacaatgtggtgagtgtcaacaaggagcctgttgccgagcctgacatcatggccacaaatggcgtggtccatgtcatcaccaatgttctgcagcctccagccaacagacctcaggaaagaggggatgaacttgcagactctgcgcttgagatcttcaaacaagcatcagcgttttccagggcttcccagaggtctgtgcgactagcccctgtctatcaaaagttattagagaggatgaagcattagcttgaagcactacaggaggaatgcaccacggcagctctccgccaatttctctcagatttccacagagactgtttgaatgttttcaaaaccaagtatcacactttaatgtacatgggccgcaccataatgagatgtgagccttgtgcatgtgggggaggagggagagagatgtactttttaaatcatgttccccctaaacatggctgttaacccactgcatgcagaaacttggatgtcactgcctgacattcacttccagagaggacctatcccaaatgtggaattgactgcctatgccaagtccctggaaaaggagcttcagtattgtggggctcataaaacatgaatcaagcaatccagcctcatgggaagtcctggcacagtttttgtaaagcccttgcacagctggagaaatggcatcattataagctatgagttgaaatgttctgtcaaatgtgtctcacatctacacgtggcttggaggcttttatggggccctgtccaggtagaaaagaaatggtatgtagagcttagatttccctattgtgacagagccatggtgtgtttgtaataataaaaccaaagaaacat

SEQ ID NO: 192600 - DNA, 1691 bp, Homo sapiens
  Payload ID: 18027
  Gene Name: transforming growth factor, beta-induced, 68kDa
  ENST ID: ENST00000514554
  CDS Start-End: 1-1099
ggccttcgagaagatccctagtgagactttgaaccgtatcctgggcgacccagaagccctgagagacctgctgaacaaccacatcttgaagtcagctatgtgtgctgaagccatcgttgcggggctgtctgtagagaccctggagggcacgacactggaggtgggctgcagcggggacatgctcactatcaacgggaaggcgatcatctccaataaagacatcctagccaccaacggggtgatccactacattgatgagctactcatcccagactcagccaagacactatttgaattggctgcagagtctgatgtgtccacagccattgaccttttcagacaagccggcctcggcaatcatctctctggaagtgagcggttgaccctcctggctcccctgaattctgtattcaaagatggaacccctccaattgatgcccatacaaggaatttgcttcggaaccacataattaaagaccagctggcctctaagtatctgtaccatggacagaccctggaaactctgggcggcaaaaaactgagagtttttgtttatcgtaatagcctctgcattgagaacagctgcatcgcggcccacgacaagagggggaggtacgggaccctgttcacgatggaccgggtgctgacccccccaatggggactgtcatggatgtcctgaagggagacaatcgctttagcatgctggtagctgccatccagtctgcaggactgacggagaccctcaaccgggaaggagtctacacagtctttgctcccacaaatgaagccttccgagccctgccaccaagagaacggagcagactcttgggagatgccaaggaacttgccaacatcctgaaataccacattggtgatgaaatcctggttagcggaggcatcggggccctggtgcggctaaagtctctccaaggtgacaagctggaagtcagcttgaaaaacaatgtggtgagtgtcaacaaggagcctgttgccgagcctgacatcatggccacaaatggcgtggtccatgtcatcaccaatgttctgcagcctccagcccctgtctatcaaaagttattagagaggatgaagcattagcttgaagcactacaggaggaatgcaccacggcagctctccgccaatttctctcagatttccacagagactgtttgaatgttttcaaaaccaagtatcacactttaatgtacatgggccgcaccataatgagatgtgagccttgtgcatgtgggggaggagggagagagatgtactttttaaatcatgttccccctaaacatggctgttaacccactgcatgcagaaacttggatgtcactgcctgacattcacttccagagaggacctatcccaaatgtggaattgactgcctatgccaagtccctggaaaaggagcttcagtattgtggggctcataaaacatgaatcaagcaatccagcctcatgggaagtcctggcacagtttttgtaaagcccttgcacagctggagaaatggcatcattataagctatgagttgaaatgttctgtcaaatgtgtctcacatctacacgtggcttggaggcttttatggggccctgtccaggtagaaaagaaatggtatgtagagcttagatttccctattgtgacagagccatggtgtgtttgtaataataaaaccaaagaaacata

SEQ ID NO: 192601 - DNA, 2469 bp, Homo sapiens
  Payload ID: 18027
  Gene Name: transforming growth factor, beta-induced, 68kDa
  ENST ID: ENST00000507018
  CDS Start-End: 1-385
gccctaccagctggtgctgcagcacagcaggctccggggccgccagcacggccccaacgtgtgtgctgtgcagaaggttattggcactaataggaagtacttcaccaactgcaagcagtggtaccaaaggaaaatctgtggcaaatcaacagtcatcagctacgagtgctgtcctggatatgaaaaggtccctggggagaagggctgtccagcagccctaccactctcaaacctttacgagaccctgggagtcgttggatccaccaccactcagctgtacacggaccgcacggagaagctgaggcctgagatggaggggcccggcagcttcaccatcttcgcccctagcaacgaggcctgggcctccttgccagctgtgagatgacctccgtctgcccgggggactcttatggggaactgccttacttccccgaggggaagtgctggactccctggtcagcaatgtcaacattgagctgctcaatgccctccgctaccatatggtgggcaggcgagtcctgactgatgagctgaaacacggcatgaccctcacctctatgtaccagaattccaacatccagatccaccactatcctaatgggattgtaactgtgaactgtgcccggctgctgaaagccgaccaccatgcaaccaacggggtggtgcacctcatcgataaggtcatctccaccatcaccaacaacatccagcagatcattgagatcgaggacacctttgagacccttcgggctgctgtggctgcatcagggctcaacacgatgcttgaaggtaacggccagtacacgcttttggccccgaccaatgaggccttcgagaagatccctagtgagactttgaaccgtatcctgggcgacccagaagccctgagagacctgctgaacaaccacatcttgaagtcagctatgtgtgctgaagccatcgttgcggggctgtctgtagagaccctggagggcacgacactggaggtgggctgcagcggggacatgctcactatcaacgggaaggcgatcatctccaataaagacatcctagccaccaacggggtgatccactacattgatgagctactcatcccagactcagccaagacactatttgaattggctgcagagtctgatgtgtccacagccattgaccttttcagacaagccggcctcggcaatcatctctctggaagtgagcggttgaccctcctggctcccctgaattctgtattcaaagatggaacccctccaattgatgcccatacaaggaatttgcttcggaaccacataattaaagaccagctggcctctaagtatctgtaccatggacagaccctggaaactctgggcggcaaaaaactgagagtttttgtttatcgtaatagcctctgcattgagaacagctgcatcgcggcccacgacaagagggggaggtacgggaccctgttcacgatggaccgggtgctgacccccccaatggggactgtcatggatgtcctgaagggagacaatcgctttagcatgctggtagctgccatccagtctgcaggactgacggagaccctcaaccgggaaggagtctacacagtctttgctcccacaaatgaagccttccgagccctgccaccaagagaacggagcagactcttgggagatgccaaggaacttgccaacatcctgaaataccacattggtgatgaaatcctggttagcggaggcatcggggccctggtgcggctaaagtctctccaaggtgacaagctggaagtcagcttgaaaaacaatgtggtgagtgtcaacaaggagcctgttgccgagcctgacatcatggccacaaatggcgtggtccatgtcatcaccaatgttctgcagcctccagccaacagacctcaggaaagaggggatgaacttgcagactctgcgcttgagatcttcaaacaagcatcagcgttttccagggcttcccagaggtctgtgcgactagcccctgtctatcaaaagttattagagaggatgaagcattagcttgaagcactacaggaggaatgcaccacggcagctctccgccaatttctctcagatttccacagagactgtttgaatgttttcaaaaccaagtatcacactttaatgtacatgggccgcaccataatgagatgtgagccttgtgcatgtgggggaggagggagagagatgtactttttaaatcatgttccccctaaacatggctgttaacccactgcatgcagaaacttggatgtcactgcctgacattcacttccagagaggacctatcccaaatgtggaattgactgcctatgccaagtccctggaaaaggagcttcagtattgtggggctcataaaacatgaatcaagcaatccagcctcatgggaagtcctggcacagtttttgtaaagcccttgcacagctggagaaatggcatcattataagctatgagttg

SEQ ID NO: 192602 - DNA, 582 bp, Homo sapiens
  Payload ID: 18027
  Gene Name: transforming growth factor, beta-induced, 68kDa
  ENST ID: ENST00000508767
  CDS Start-End: 1-582
caacggggtggtgcacctcatcgataaggtcatctccaccatcaccaacaacatccagcagatcattgagatcgaggacacctttgagacccttcgggctgctgtggctgcatcagggctcaacacgatgcttgaaggtaacggccagtacacgcttttggccccgaccaatgaggccttcgagaagatccctagtgagactttgaaccgtatcctgggcgacccagaagccctgagagacatgctcactatcaacgggaaggcgatcatctccaataaagacatcctagccaccaacggggtgatccactacattgatgagctactcatcccagactcagccaagacactatttgaattggctgcagagtctgatgtgtccacagccattgaccttttcagacaagccggcctcggcaatcatctctctggaagtgagcggttgaccctcctggctcccctgaattctgtattcaaagatggaacccctccaattgatgcccatacaaggaatttgcttcggaaccacataattaaagaccagctggcctctaagtatctgtaccatggacagaccctgga

SEQ ID NO: 192603 - DNA, 1034 bp, Homo sapiens
  Payload ID: 18027
  Gene Name: transforming growth factor, beta-induced, 68kDa
  ENST ID: ENST00000508076
  CDS Start-End: 248-445
gccaactgactgctggggcagatttgtggtcatgaacatgtgctttgtgtcctctgaccattagacagattgagatgccaaggaacttgccaacatcctgaaataccacattggtgatgaaatcctggttagcggaggcatcggggccctggtgcggctaaagtctctccaaggtgacaagctggaagtcagcttgaaaaacaatgtggtgagtgtcaacaaggagcctgttgccgagcctgacatcatggccacaaatggcgtggtccatgtcatcaccaatgttctgcagcctccagccaacagacctcaggaaagaggggatgaacttgcagactctgcgcttgagatcttcaaacaagcatcagcgttttccagggcttcccagaggtctgtgcgactagcccctgtctatcaaaagttattagagaggatgaagcattagcttgaagcactacaggaggaatgcaccacggcagctctccgccaatttctctcagatttccacagagactgtttgaatgttttcaaaaccaagtatcacactttaatgtacatgggccgcaccataatgagatgtgagccttgtgcatgtgggggaggagggagagagatgtactttttaaatcatgttccccctaaacatggctgttaacccactgcatgcagaaacttggatgtcactgcctgacattcacttccagagaggacctatcccaaatgtggaattgactgcctatgccaagtccctggaaaaggagcttcagtattgtggggctcataaaacatgaatcaagcaatccagcctcatgggaagtcctggcacagtttttgtaaagcccttgcacagctggagaaatggcatcattataagctatgagttgaaatgttctgtcaaatgtgtctcacatctacacgtggcttggaggcttttatggggccctgtccaggtagaaaagaaatggtatgtagagcttagatttccctattgtgacagagccatggtgtgtttgtaataataaaaccaaagaaac

SEQ ID NO: 192604 - DNA, 731 bp, Homo sapiens
  Payload ID: 18027
  Gene Name: transforming growth factor, beta-induced, 68kDa
  ENST ID: ENST00000509485
  CDS Start-End: 1-179
ccaagacactatttgaattggctgcagagtctgatgtgtccacagccattgaccttttcagacaagccggcctcggcaatcatctctctggaagtgagcggttgaccctcctggctcccctgaattctgtattcaaaggagcacatctctctggacctaaccatcaccctttcttgtagatggaacccctccaattgatgcccatacaaggaatttgcttcggaaccacataattaaagaccagctggcctctaagtatctgtaccatggacagaccctggaaactctgggcggcaaaaaactgagagtttttgtttatcgtaatagcctctgcattgagaacagctgcatcgcggcccacgacaagagggggaggtacgggaccctgttcacgatggaccgggtgctgacccccccaatggggactgtcatggatgtcctgaagggagacaatcgctttagagcttagcatttttgctgggtggagagagctggagcctggaatcactccctctttgtgcatacggagggcatgaaaaccaagcatgctggtagctgccatccagtctgcaggactgacggagaccctcaaccgggaaggagtctacacagtctttgctcccacaaatgaagccttccgagccctgccaccaagagaacggagcagactcttgggagatgccaaggaacttgccaacatcctgaaataccacattggtgatgaaatcctg

SEQ ID NO: 192605 - DNA, 399 bp, Homo sapiens
  Payload ID: 18027
  Gene Name: transforming growth factor, beta-induced, 68kDa
  ENST ID: ENST00000503087
  CDS Start-End: 1-236
tccaaggtgacaagctggaagtcagcttgaaaaacaatgtggtgagtgtcaacaaggagcctgttgccgagcctgacatcatggccacaaatggcgtggtccatgtcatcaccaatgttctgcagcctccagccaacagacctcaggaaagaggggatgaacttgcagactctgcgcttgagatcttcaaacaagcatcagcgttttccaggcccctgtctatcaaaagttattagagaggatgaagcattagcttgaagcactacaggaggaatgcaccacggcagctctccgccaatttctctcagatttccacagagactgtttgaatgttttcaaaaccaagtatcacactttaatgtacatgggccgcaccataatgagatgtgagccttgtgc

SEQ ID NO: 192606 - DNA, 1173 bp, Homo sapiens
  Payload ID: 18027
  Gene Name: transforming growth factor, beta-induced, 68kDa
  ENST ID: ENST00000604555
  CDS Start-End: 1-660
cgggctgctgtggctgcatcagggctcaacacgatgcttgaaggtaacggccagtacacgcttttggccccgaccaatgaggccttcgagaagatccctagtgagactttgaaccgtatcctgggcgacccagaagccctgagagacctgctgaacaaccacatcttgaagtcagctatgtgtgctgaagccatcgttgcggggctgtctgtagagaccctggagggcacgacactggaggtgggctgcagcggggacatgctcactatcaacgggaaggcgatcatctccaataaagacatcctagccaccaacggggtgatccactacattgatgagctactcatcccagactcagccaagacactatttgaattggctgcagagtctgatgtgtccacagccattgaccttttcagacaagccggcctcggcaatcatctctctggaagtgagcggttgaccctcctggctcccctgaattctgtattcaaagatggaacccctccaattgatgcccatacaaggaatttgcttcggaaccacataattaaagaccagctggcctctaagtatctgtaccatggacagaccctggaaactctgggcggcaaaaaactgagagtttttgtttatcgtaatgtaagttctgggtcctaaatcatgctcctgggaagctccttactgtgggacttgtattagtgtaaaaaaaaatgtcctcaataagcaggagtttgcatgagaactggttgctgacaaggaaggaaataatttctggaaaatatagataacaaaatgagatcctgcagaaggattggaatctctttttctggaggcctttgagaataaaccacacaattatccaacctgtattgtgaaggaataagtccttcttgaattcaggaattaacacctgggaggagggatggagttcagactctttctgagcttatgagaagagaagccccctaaactaaaatacagccctccttggtccaaaaggtgccttctctcttctgctgtatcttctttgttttcaaacccaacagttaccctggaaatcaaaaaggaagtacaactcaacatagctcttgcctgggaccaaccagcaccatttggctaaagatggttatcatctgttaaacaaagaaataaataaatgggttcaacgta

SEQ ID NO: 192607 - DNA, 6513 bp, Homo sapiens
  Payload ID: 18028
  Gene Name: transforming, acidic coiled-coil containing protein 1
  Uniprot ID: O75410
  ENST ID: ENST00000276520
  CDS Start-End: 321-1508
cagaggtctagcagccgggcgccgcgggccgggggcctgaggaggccacaggacgggcgtcttcccggctagtggagcccggcgcggggcccgctgcggccgcaccgtgaggggaggaggccgaggaggacgcagcgccggctgccggcgggaggaagcgctccaccagggcccccgacggcactcgtttaaccacatccgcgcctctgctggaaacgcttgctggcgcctgtcaccggttccctccattttgaaagggaaaaaggctctccccacccattcccctgcccctaggagctggagccggaggagccgcgctcatggcgttcagcccgtggcagatcctgtcccccgtgcagtgggcgaaatggacgtggtctgcggtacgcggcggggccgccggcgaggacgaggctggcgggcccgagggcgaccccgaggaggaggattcgcaagccgagaccaaatccttgagtttcaggagtggctgtaaggtgaagaagcatgaaactcagtctctcgccctggatgcatgttctcgggatgaaggggcagtgatctcccagatttcagacatttctaatagggatggccatgctactgatgaggagaaactggcatccacgtcatgtggtcagaaatcagctggtgccgaggtgaaaggtgagccagaggaagacctggagtactttgaatgttccaatgttcctgtgtctaccataaatcatgcgttttcatcctcagaagcaggcatagagaaggagacgtgccagaagatggaagaagacgggtccactgtgcttgggctgctggagtcctctgcagagaaggcccctgtgtcggtgtcctgtggaggtgagagccccctggatgggatctgcctcagcgaatcagacaagacagccgtgctcaccttaataagagaagagataattactaaagagattgaagcaaatgaatggaagaagaaatacgaagagacccggcaagaagttttggagatgaggaaaattgtagctgaatatgaaaagactattgctcaaatgattgaagatgaacaaaggacaagtatgacctctcagaagagcttccagcaactgaccatggagaaggaacaggccctggctgaccttaactctgtggaaaggtccctttctgatctcttcaggagatatgagaacctgaaaggtgttctggaagggttcaagaagaatgaagaagccttgaagaaatgtgctcaggattacttagccagagttaaacaagaggagcagcgataccaggccctgaaaatccacgcagaagagaaactggacaaagccaatgaagagattgctcaggttcgaacaaaagcaaaggctgagagtgcagctctccatgctggactccgcaaagagcagatgaaggtggagtccctggaaagggccctgcagcagaagaaccaagaaattgaagaactgacaaaaatctgtgatgagctgattgcaaagctgggaaagactgactgagacactccccctgttagctcaacagatctgcatttggctgcttctcttgtgaccacaattatcttgccttatccaggaataattgcccctttgcagagaaaaaaaaaaacttaaaaaaagcacatgcctactgctgcctgtcccgctttgctgccaatgcaacagccctggaagaaaccctagagggttgcatagtctagaaaggagtgtgacctgacagtgctggagcctcctagtttccccctatgaaggttcccttaggctgctgagtttgggtttgtgatttatctttagtttgttttaaagtcatctttactttcccaaatgtgttaaatttgtaactcctctttggggtcttctccaccacctgtctgatttttttgtgatctgtttaatcttttaattttttagtatcagtggttttatttaaggagacagtttggcctattgttacttccaatttataatcaagaaggggctctggatccccttttaaattacacacactctcacacacatacatgtatgtttatagatgctgctgctcttttccctgaagcatagtcaagtaagaactgctctacagaaggacatatttccttggatgtgagaccctattttgaaatagagtcctgactcagaacaccaacttaagaatttgggggattaaagatgtgaagaccacagtcttgggttttcatatctggagaagactatttgccatgacgttttgttgccctggtatttggacactcctcagctttaatgggtgtggcccctttagggttagtcctcagactaatgatagtgtctgctttctgcatgaacggcaatatgggactccctccaagctagggtttggcaagtctgccctagagtcatttactctcctctgcctccatttgttaatacagaatcaacatttagtcttcattatctttttttttttttttgagacagagtttcgatctattttaagtatgtgaagaaaatctacttgtaaaaggctcagatcttaattaaaaggtaattgtagcacattaccaattataaggtgaagaaatgtttttttcccaagtgtgatgcattgttcttcagatgttgaaaagaaagcaaaaaataccttctaacttaagacagaatttttaacaaaatgagcagtaaaagtcacatgaaccactccaaaaatcagtgcattttgcatatttttaaacaaagacagcttgttgaatactgagaagaggagtgcaaggagaaggtctgtactaacaaagccaaattcctcaagctcttactggactcagttcagagtggtgggccattaaccccaacatggaatttttccatataaatctcaatgaattccctttcatttgaataggcaaacccaaatccatgcaagtgttttaaagcactgtcctgtcttaatcttacatgctgaaagtcttcatggtgatatgcactatattcagtatacgtatgttttcctacttctcttgtaaaactgttgcatgatccaacttcagcaatgaattgtgcctagtggagaacctctatagatcttaaaaaatgaattattctttagcagtgtattactcacatgggtgcaatctttagccccagggaggtcaataatgtcttttaaagccagaagtcacattttaccaatatgcatttatcataattggtgcttaggctgtatattcaagcctgttgtcttaacattttgtataaaaaagaacaacagaaattatctgtcatttgagaagtggcttgacaatcatttgagctttgaaagcagtcactgtggtgtaatatgaatgctgtcctagtggtcatagtaccaagggcacgtgtctccccttggtataactgatttcctttttagtcctctactgctaaataagttaattttgcattttgcagaaagaaacattgattgctaaatctttttgctgctgtgttttggtgttttcatgtttacttgttttatattgatctgttttaagtatgagaggcttatagtgccctccattgtaaatccatagtcatctttttaagcttattgtgtttaagaaagtagctatgtgttaaacagaggtgatggcagcccttccctagcacactggtggaagagaccccttaagaacctgaccccagtgaatgaagctgatgcacagggagcaccaaaggaccttcgttaagtgataattgtcctggcctctcagccatgaccgttatgaggaaatatcccccattcgaacttaacagatgcctcctctccaaagagaattaaaatcgtagcttgtacagatcaagagaatatactgggcagaatgaagtatgtttgtttatttttctttaaaaataaaggattttggaactctggagagtaagaatatagtatagagtttgcctcaacacatgtgagggccaaataacctgctagctaggcagtaataaactctgttacagaagagaaaaagggccgggcacagtggcttattcctgtaatcccaacactgtggaaggccgaggcaggaggatcacttgagtccaggagtttgaaacctacctaggcaacatggtgaaaccttgtctctaccaaaataaaaattagctgggcatggtggcacgtgcctgtggtcccagctacttgggaggctgaggtgggagcctgggaggtcaaggctgcagtgagccatgatcatgccactgcactccatcctgggtgacagcaagatcttgtctcaaaaaaaaaaaaaaaaaaaaaaaaaccaggagtgaaaaaggaaagtagaaggcagctgctggcctagatgttggtttgggaatattaggtgatcctgttgagattctggatccagagcaatttctttagcttttgactttgccaaagtgtagatagcctttatccagcagtattttaagtggggaatgcaacgtgaggccaactgaacaattccccccgtggctgcccagatagtcacagtcaaggttggagagtctccttccagccagtgacctacccaaaccttttgttctgtaaaactgctctggaaataccgggaagcccagttttctcacgtggtttctagcttcttcagactcagcccaaattaggaagtgcagaagcacatgatggtgaaaaacctaggatttggcagccttccagaatggtatggaatctgagggaagatttatgtttcgttttggaggatagctcaagttgaattttctttccagccagttaccctttcaacctacccatactttgtacaactcttacacaaatacttagatatttattagatagccctgaattcactctaattataaacagggagtgtaaactgcccccagatgttcctgggctgggtaaaagcagctggagtgaagcactcattttccataaaggtaacaaagggcagctcagtggttactcaagctcaaaagggtttttttaagagcaagcattggttaagtctgtgtatactgagttggaagtgatttcagcacattcttttttagtggagtgaaagttctgaagcccccttttaacttcctcttggtttttcattataattggtagccatctcatgaactgtctctgactgttgtctctttgtggtcatgtgattgtgagcttgctttctgacttgcatttctgactttatcctgttgttaggaagatagaaactaggttttgaaagattacatgattcaagcgagggattttaaagtaaagatgtatttattctgaagaatctaaaagataacagattatttgcttatgaaagaacaatatagtctgggaatcccagaatgtcaagccaaaggtctaagaagtcatctccttcaaatactttaataaagaagtatttcgaggagatatctgtccaaaaaggtttgactggcctccagattccagttatttttaaaaagcaacttaccactaaatccttgagtctccatagagtaacagtaaagaaactgatgtaacagactctcctctcaaaggatctcctctggaagagactatcagcggcagcattctccagggaagacccatcccctagtgccagagcttgcatcctggagactaaagattgcacttttttgtagttttttgtccaaatgcaatcccatttctgtgcctcttagcatgcagttagatttggacaaacaagattcctaaggaatgactttattaactataatatggttacagctattatataaatatatattctggttatagttctaatatggagatgttgtgtgcaatgctggcctgtggtggtctgtgtaatgctttaacttgtatggaggaggccaggctcagagctgagatgtggcctgaaccttccctgtatcgatcctttaatttagaactgtcaagatgtcactttctccccctctgccttttagtggtatctgacatatactcaaaacagtaatttcctggtcacatcattaactgctaattctgtatttataaagaattttcagatggacatgtacaaatttgaactcaaaccatccccagtccagatacagggcagcgtgtaggtgaccacaccagagcctcagcctcggtccttctcagccgtcgggataggatccaggcatttcttttaaatctcagaggtagcagtaaacttttcagtattgctgttagcaagtgtgtgtttgccaatagatacccattatactaatgtgccaagtaaatgttcattgcacatctgcttccactgtgttcccacgggtgccatgaagtgtgtgaggagcccctcatctggagggatgagtgctgcgttgactactgctatcaggattgtgttgtgtggaatattcatctacataaattttatatgcacagtaatttccctttttatatgtcaagtaactatttgtaaaagttatactcacaaattattataatgattactaatatattttttccatgtttcattgcctgaataaaaactgtttaccactgtta

SEQ ID NO: 192608 - DNA, 7802 bp, Homo sapiens
  Payload ID: 18028
  Gene Name: transforming, acidic coiled-coil containing protein 1
  Uniprot ID: O75410
  ENST ID: ENST00000317827
  CDS Start-End: 380-2797
agctgatgcgcgccccgccggccgggaggcgggagtccgcgagccgggagcgggagcagcagaggtctagcagccgggcgccgcgggccgggggcctgaggaggccacaggacgggcgtcttcccggctagtggagcccggcgcggggcccgctgcggccgcaccgtgaggggaggaggccgaggaggacgcagcgccggctgccggcgggaggaagcgctccaccagggcccccgacggcactcgtttaaccacatccgcgcctctgctggaaacgcttgctggcgcctgtcaccggttccctccattttgaaagggaaaaaggctctccccacccattcccctgcccctaggagctggagccggaggagccgcgctcatggcgttcagcccgtggcagatcctgtcccccgtgcagtgggcgaaatggacgtggtctgcggtacgcggcggggccgccggcgaggacgaggctggcgggcccgagggcgaccccgaggaggaggattcgcaagccgagaccaaatccttgagtttcagctcggattctgaaggtaattttgagactcctgaagctgaaaccccgatccgatcacctttcaaggagtcctgtgatccatcactcggattggcaggacctggggccaaaagccaagaatcacaagaagctgatgaacagcttgtagcagaagtggttgaaaaatgttcatctaagacttgttctaaaccttcagaaaatgaagtgccacagcaggccattgactctcactcagtcaagaatttcagagaagaacctgaacatgattttagcaaaatttccatcgtgaggccattttcaatagaaacgaaggattccacggatatctcggcagtcctcggaacaaaagcagctcatggctgtgtaactgcagtctcaggcaaggctctgccttccagcccgccagacgccctccaggacgaggcgatgacagaaggcagcatgggggtcaccctcgaggcctccgcagaagctgatctaaaagctggcaactcctgtccagagcttgtgcccagcagaagaagcaagctgagaaagcccaagcctgtccccctgaggaagaaagcaattggaggagagttctcagacaccaacgctgctgtggagggcacacctctccccaaggcatcctatcacttcagtcctgaagagttggatgagaacacaagtcctttgctaggagatgccaggttccagaagtctccccctgaccttaaagaaactcccggcactctcagtagtgacaccaacgactcaggggttgagctgggggaggagtcgaggagctcacctctcaagcttgagtttgatttcacagaagatacaggaaacatagaggccaggaaagcccttccaaggaagcttggcaggaaactgggtagcacactgactcccaagatacaaaaagatggcatcagtaagtcagcaggtttagaacagcctacagacccagtggcacgagacgggcctctctcccaaacatcttccaagccagatcctagtcagtgggaaagccccagcttcaacccctttgggagccactctgttctgcagaactccccacccctctcttctgagggctcctaccactttgacccagataactttgacgaatccatggatccctttaaaccaactacgaccttaacaagcagtgacttttgttctcccactggtaatcacgttaatgaaatcttagaatcacccaagaaggcaaagtcgcgtttaataacgagtggctgtaaggtgaagaagcatgaaactcagtctctcgccctggatgcatgttctcgggatgaaggggcagtgatctcccagatttcagacatttctaatagggatggccatgctactgatgaggagaaactggcatccacgtcatgtggtcagaaatcagctggtgccgaggtgaaaggtgagccagaggaagacctggagtactttgaatgttccaatgttcctgtgtctaccataaatcatgcgttttcatcctcagaagcaggcatagagaaggagacgtgccagaagatggaagaagacgggtccactgtgcttgggctgctggagtcctctgcagagaaggcccctgtgtcggtgtcctgtggaggtgagagccccctggatgggatctgcctcagcgaatcagacaagacagccgtgctcaccttaataagagaagagataattactaaagagattgaagcaaatgaatggaagaagaaatacgaagagacccggcaagaagttttggagatgaggaaaattgtagctgaatatgaaaagactattgctcaaatgattgaagatgaacaaaggacaagtatgacctctcagaagagcttccagcaactgaccatggagaaggaacaggccctggctgaccttaactctgtggaaaggtccctttctgatctcttcaggagatatgagaacctgaaaggtgttctggaagggttcaagaagaatgaagaagccttgaagaaatgtgctcaggattacttagccagagttaaacaagaggagcagcgataccaggccctgaaaatccacgcagaagagaaactggacaaagccaatgaagagattgctcaggttcgaacaaaagcaaaggctgagagtgcagctctccatgctggactccgcaaagagcagatgaaggtggagtccctggaaagggccctgcagcagaagaaccaagaaattgaagaactgacaaaaatctgtgatgagctgattgcaaagctgggaaagactgactgagacactccccctgttagctcaacagatctgcatttggctgcttctcttgtgaccacaattatcttgccttatccaggaataattgcccctttgcagagaaaaaaaaaaacttaaaaaaagcacatgcctactgctgcctgtcccgctttgctgccaatgcaacagccctggaagaaaccctagagggttgcatagtctagaaaggagtgtgacctgacagtgctggagcctcctagtttccccctatgaaggttcccttaggctgctgagtttgggtttgtgatttatctttagtttgttttaaagtcatctttactttcccaaatgtgttaaatttgtaactcctctttggggtcttctccaccacctgtctgatttttttgtgatctgtttaatcttttaattttttagtatcagtggttttatttaaggagacagtttggcctattgttacttccaatttataatcaagaaggggctctggatccccttttaaattacacacactctcacacacatacatgtatgtttatagatgctgctgctcttttccctgaagcatagtcaagtaagaactgctctacagaaggacatatttccttggatgtgagaccctattttgaaatagagtcctgactcagaacaccaacttaagaatttgggggattaaagatgtgaagaccacagtcttgggttttcatatctggagaagactatttgccatgacgttttgttgccctggtatttggacactcctcagctttaatgggtgtggcccctttagggttagtcctcagactaatgatagtgtctgctttctgcatgaacggcaatatgggactccctccaagctagggtttggcaagtctgccctagagtcatttactctcctctgcctccatttgttaatacagaatcaacatttagtcttcattatctttttttttttttttgagacagagtttcgatctattttaagtatgtgaagaaaatctacttgtaaaaggctcagatcttaattaaaaggtaattgtagcacattaccaattataaggtgaagaaatgtttttttcccaagtgtgatgcattgttcttcagatgttgaaaagaaagcaaaaaataccttctaacttaagacagaatttttaacaaaatgagcagtaaaagtcacatgaaccactccaaaaatcagtgcattttgcatatttttaaacaaagacagcttgttgaatactgagaagaggagtgcaaggagaaggtctgtactaacaaagccaaattcctcaagctcttactggactcagttcagagtggtgggccattaaccccaacatggaatttttccatataaatctcaatgaattccctttcatttgaataggcaaacccaaatccatgcaagtgttttaaagcactgtcctgtcttaatcttacatgctgaaagtcttcatggtgatatgcactatattcagtatacgtatgttttcctacttctcttgtaaaactgttgcatgatccaacttcagcaatgaattgtgcctagtggagaacctctatagatcttaaaaaatgaattattctttagcagtgtattactcacatgggtgcaatctttagccccagggaggtcaataatgtcttttaaagccagaagtcacattttaccaatatgcatttatcataattggtgcttaggctgtatattcaagcctgttgtcttaacattttgtataaaaaagaacaacagaaattatctgtcatttgagaagtggcttgacaatcatttgagctttgaaagcagtcactgtggtgtaatatgaatgctgtcctagtggtcatagtaccaagggcacgtgtctccccttggtataactgatttcctttttagtcctctactgctaaataagttaattttgcattttgcagaaagaaacattgattgctaaatctttttgctgctgtgttttggtgttttcatgtttacttgttttatattgatctgttttaagtatgagaggcttatagtgccctccattgtaaatccatagtcatctttttaagcttattgtgtttaagaaagtagctatgtgttaaacagaggtgatggcagcccttccctagcacactggtggaagagaccccttaagaacctgaccccagtgaatgaagctgatgcacagggagcaccaaaggaccttcgttaagtgataattgtcctggcctctcagccatgaccgttatgaggaaatatcccccattcgaacttaacagatgcctcctctccaaagagaattaaaatcgtagcttgtacagatcaagagaatatactgggcagaatgaagtatgtttgtttatttttctttaaaaataaaggattttggaactctggagagtaagaatatagtatagagtttgcctcaacacatgtgagggccaaataacctgctagctaggcagtaataaactctgttacagaagagaaaaagggccgggcacagtggcttattcctgtaatcccaacactgtggaaggccgaggcaggaggatcacttgagtccaggagtttgaaacctacctaggcaacatggtgaaaccttgtctctaccaaaataaaaattagctgggcatggtggcacgtgcctgtggtcccagctacttgggaggctgaggtgggagcctgggaggtcaaggctgcagtgagccatgatcatgccactgcactccatcctgggtgacagcaagatcttgtctcaaaaaaaaaaaaaaaaaaaaaaaaaccaggagtgaaaaaggaaagtagaaggcagctgctggcctagatgttggtttgggaatattaggtgatcctgttgagattctggatccagagcaatttctttagcttttgactttgccaaagtgtagatagcctttatccagcagtattttaagtggggaatgcaacgtgaggccaactgaacaattccccccgtggctgcccagatagtcacagtcaaggttggagagtctccttccagccagtgacctacccaaaccttttgttctgtaaaactgctctggaaataccgggaagcccagttttctcacgtggtttctagcttcttcagactcagcccaaattaggaagtgcagaagcacatgatggtgaaaaacctaggatttggcagccttccagaatggtatggaatctgagggaagatttatgtttcgttttggaggatagctcaagttgaattttctttccagccagttaccctttcaacctacccatactttgtacaactcttacacaaatacttagatatttattagatagccctgaattcactctaattataaacagggagtgtaaactgcccccagatgttcctgggctgggtaaaagcagctggagtgaagcactcattttccataaaggtaacaaagggcagctcagtggttactcaagctcaaaagggtttttttaagagcaagcattggttaagtctgtgtatactgagttggaagtgatttcagcacattcttttttagtggagtgaaagttctgaagcccccttttaacttcctcttggtttttcattataattggtagccatctcatgaactgtctctgactgttgtctctttgtggtcatgtgattgtgagcttgctttctgacttgcatttctgactttatcctgttgttaggaagatagaaactaggttttgaaagattacatgattcaagcgagggattttaaagtaaagatgtatttattctgaagaatctaaaagataacagattatttgcttatgaaagaacaatatagtctgggaatcccagaatgtcaagccaaaggtctaagaagtcatctccttcaaatactttaataaagaagtatttcgaggagatatctgtccaaaaaggtttgactggcctccagattccagttatttttaaaaagcaacttaccactaaatccttgagtctccatagagtaacagtaaagaaactgatgtaacagactctcctctcaaaggatctcctctggaagagactatcagcggcagcattctccagggaagacccatcccctagtgccagagcttgcatcctggagactaaagattgcacttttttgtagttttttgtccaaatgcaatcccatttctgtgcctcttagcatgcagttagatttggacaaacaagattcctaaggaatgactttattaactataatatggttacagctattatataaatatatattctggttatagttctaatatggagatgttgtgtgcaatgctggcctgtggtggtctgtgtaatgctttaacttgtatggaggaggccaggctcagagctgagatgtggcctgaaccttccctgtatcgatcctttaatttagaactgtcaagatgtcactttctccccctctgccttttagtggtatctgacatatactcaaaacagtaatttcctggtcacatcattaactgctaattctgtatttataaagaattttcagatggacatgtacaaatttgaactcaaaccatccccagtccagatacagggcagcgtgtaggtgaccacaccagagcctcagcctcggtccttctcagccgtcgggataggatccaggcatttcttttaaatctcagaggtagcagtaaacttttcagtattgctgttagcaagtgtgtgtttgccaatagatacccattatactaatgtgccaagtaaatgttcattgcacatctgcttccactgtgttcccacgggtgccatgaagtgtgtgaggagcccctcatctggagggatgagtgctgcgttgactactgctatcaggattgtgttgtgtggaatattcatctacataaattttatatgcacagtaatttccctttttatatgtcaagtaactatttgtaaaagttatactcacaaattattataatgattactaatatattttttccatgtttcattgcctgaataaaaactgtttaccactgtta

SEQ ID NO: 192609 - DNA, 967 bp, Homo sapiens
  Payload ID: 18028
  Gene Name: transforming, acidic coiled-coil containing protein 1
  ENST ID: ENST00000521935
  CDS Start-End: 554-967
aagaaggtcgcgtgatgacaggcccctggcagctgctgggaaatggtggtctctgccgggctgtcatccgcgtgattgcggaaggcaggtgacaccattcttagcctcgggcccagggagttccagcagctcggattctgaaggtaattttgagactcctgaagctgaaaccccgatccgatcacctttcaaggagtcctgtgatccatcactcggattggcaggacctggggccaaaagccaagaatcacaagaagctgatgaacagcttgtagcagaagtggttgaaaaatgttcatctaagacttgttctaaaccttcagaaaatgaagtgccacagcaggccattgactctcactcagtcaagaatttcagagaagaacctgaacatgattttagcaaaatttccatcgtgaggccattttcaatagaaacgaaggattccacggatatctcggcagtcctcggaacaaaagcagctcatggctgtgtaactgcagtctcaggcaaggctctgccttccagcccgccagacgccctccaggacgaggcgatgacagaaggcagcatgggggtcaccctcgaggcctccgcagaagctgatctaaaagctggcaactcctgtccagagcttgtgcccagcagaagaagcaagctgagaaagcccaagcctgtccccctgaggaagaaagcaattggaggagagttctcagacaccaacgctgctgtggagggcacacctctccccaaggcatcctatcacttcagtcctgaagagttggatgagaacacaagtcctttgctaggagatgccaggttccagaagtctccccctgaccttaaagaaactcccggcactctcagtagtgacaccaacgactcaggggttgagctgggggaggagtcgaggagctcacctctcaagcttgagtttgatttcacagaagatacaggaaacatagaggcc

SEQ ID NO: 192610 - DNA, 1807 bp, Homo sapiens
  Payload ID: 18028
  Gene Name: transforming, acidic coiled-coil containing protein 1
  ENST ID: ENST00000521866
  CDS Start-End: 1-1688
gaagaagcaagctgagaaagcccaagcctgtccccctgaggaagaaagcaattggaggagagttctcagacaccaacgctgctgtggagggcacacctctccccaaggcatcctatcacttcagtcctgaagagttggatgagaacacaagtcctttgctaggagatgccaggttccagaagtctccccctgaccttaaagaaactcccggcactctcagtagtgacaccaacgactcaggggttgagctgggggaggagtcgaggagctcacctctcaagcttgagtttgatttcacagaagatacaggaaacatagaggccaggaaagcccttccaaggaagcttggcaggaaactgggtagcacactgactcccaagatacaaaaagatggcatcagtaagtcagcaggtttagaacagcctacagacccagtggcacgagacgggcctctctcccaaacatcttccaagccagatcctagtcagtgggaaagccccagcttcaacccctttgggagccactctgttctgcagaactccccacccctctcttctgagggctcctaccactttgacccagataactttgacgaatccatggatccctttaaaccaactacgaccttaacaagcagtgacttttgttctcccactggtaatcacgttaatgaaatcttagaatcacccaagaaggcaaagtcgcgtttaataacgactactgaacaagtgaaatttctctgttttctgttgagtggctgtaaggtgaagaagcatgaaactcagtctctcgccctggatgcatgttctcgggatgaaggggcagtgatctcccagatttcagacatttctaatagggatggccatgctactgatgaggagaaactggcatccacgtcatgtggtcagaaatcagctggtgccgaggtgaaaggcatagagaaggagacgtgccagaagatggaagaagacgggtccactgtgcttgggctgctggagtcctctgcagagaaggcccctgtgtcggtgtcctgtggaggtgagagccccctggatgggatctgcctcagcgaatcagacaagacagccgtgctcaccttaataagagaagagataattactaaagagattgaagcaaatgaatggaagaagaaatacgaagagacccggcaagaagttttggagatgaggaaaattgtagctgaatatgaaaagactattgctcaaatgattgatgaacaaaggacaagtatgacctctcagaagagcttccagcaactgaccatggagaaggaacaggccctggctgaccttaactctgtggaaaggtccctttctgatctcttcaggagatatgagaacctgaaaggtgttctggaagggttcaagaagaatgaagaagccttgaagaaatgtgctcaggattacttagccagagttaaacaagaggagcagcgataccaggccctgaaaatccacgcagaagagaaactggacaaagccaatgaagagattgctcaggttcgaacaaaagcaaaggctgagagtgcagctctccatgctggactccgcaaagagcagatgaaggtggagtccctggaaagggccctgcagcagaagaaccaagaaattgaagaactgacaaaaatctgtgatgagctgattgcaaagctgggaaagactgactgagacactccccctgttagctcaacagatctgcatttggctgcttctcttgtgaccacaattatcttgccttatccaggaataattgcccctttgcagagaaaaaaaaaaacttaaaaaaa

SEQ ID NO: 192611 - DNA, 5509 bp, Homo sapiens
  Payload ID: 18028
  Gene Name: transforming, acidic coiled-coil containing protein 1
  Uniprot ID: O75410
  ENST ID: ENST00000520615
  CDS Start-End: 907-2739
acaggatgtttctgagccaagttgaagcaaaagaaactttttccagcatgtcaggaacgaagctgacgttccattaagaaaaaaaaaaaaaaaaaaagaagtgctagaggaaggagtaagaggtgaaaaggcaccagaattcagacggagctttaaattccagacagggccagcgttgggagcacgtaggaggcgcccctcggaaaggagccggagacccagctgacttcgcacttgagctccagccccgtggacatttcctgttctgcctctggaaattcaagctgaaagttacaaaacatccttttccctggaaccaagtgcttggttgggagaccatgccctccccttccttcctcggaactcctccctgatcgccccgtggcttccccaggagagatgcgaaatcagcggtagcaggtggcgcagaagggagaggggagcgaccctggggaccgactctggggaccctcgccgaagagctcggattctgaaggtaattttgagactcctgaagctgaaaccccgatccgatcacctttcaaggagtcctgtgatccatcactcggattggcaggacctggggccaaaagccaagaatcacaagaagctgatgaacagcttgtagcagaagtggttgaaaaatgttcatctaagacttgttctaaaccttcagaaaatgaagtgccacagcaggccattgactctcactcagtcaagaatttcagagaagaacctgaacatgattttagcaaaatttccatcgtgaggccattttcaatagaaacgaaggattccacggatatctcggcagtcctcggaacaaaagcagctcatggctgtgtaactgcagtctcaggcaaggctctgccttccagcccgccagacgccctccaggacgaggcgatgacagaaggcagcatgggggtcaccctcgaggcctccgcagaagctgatctaaaagctggcaactcctgtccagagcttgtgcccagcagaagaagcaagctgagaaagcccaagcctgtccccctgaggaagaaagcaattggaggagagttctcagacaccaacgctgctgtggagggcacacctctccccaaggcatcctatcacttcagtcctgaagagttggatgagaacacaagtcctttgctaggagatgccaggttccagaagtctccccctgaccttaaagaaactcccggcactctcagtagtgacaccaacgactcaggggttgagctgggggaggagtcgaggagctcacctctcaagcttgagtttgatttcacagaagatacaggaaacatagaggccaggaaagcccttccaaggaagcttggcaggaaactgggtagcacactgactcccaagatacaaaaagatggcatcagtaagtcagcaggtttagaacagcctacagacccagtggcacgagacgggcctctctcccaaacatcttccaagccagatcctagtcagtgggaaagccccagcttcaacccctttgggagccactctgttctgcagaactccccacccctctcttctgagggctcctaccactttgacccagataactttgacgaatccatggatccctttaaaccaactacgaccttaacaagcagtgacttttgttctcccactggtaatcacgttaatgaaatcttagaatcacccaagaaggcaaagtcgcgtttaataacgagtggctgtaaggtgaagaagcatgaaactcagtctctcgccctggatgcatgttctcgggatgaaggggcagtgatctcccagatttcagacatttctaatagggatggccatgctactgatgaggagaaactggcatccacgtcatgtggtcagaaatcagctggtgccgaggtgaaaggtgagccagaggaagacctggagtactttgaatgttccaatgttcctgtgtctaccataaatcatgcgttttcatcctcagaagcaggcatagagaaggagacgtgccagaagatggaagaagacgggtccactgtgcttgggctgctggagtcctctgcagagaaggcccctgtgtcggtgtcctgtggaggtgagagccccctggatgggatctgcctcagcgaatcagacaagacagccgtgctcaccttaataagagaagagataattactaaagagattgaagcaaatgaatggaagaagaaatacgaagagacccggcaagaagttttggagatgaggaaaattgtagctgaatatgaaaagactattgctcaaatgattgaagatgaacaaaggacaagtatgacctctcagaagagcttccagcaactgaccatggagaaggaacaggccctggctgaccttaactctgtggaaaggtccctttctgatctcttcaggagatatgagaacctgaaaggtgttctggaagggttcaagaagaatgaagaagccttgaagaaatgtgctcaggattacttagccagagttaaacaagaggagcagcgataccaggccctgaaaatccacgcagaagagaaactggacaaagccaatgaagagattgctcaggttcgaacaaaagcaaaggctgagagtgcagctctccatgctggactccgcaaagagcagatgaaggtggagtccctggaaagggccctgcagcagaagaaccaagaaattgaagaactgacaaaaatctgtgatgagctgattgcaaagctgggaaagactgactgagacactccccctgttagctcaacagatctgcatttggctgcttctcttgtgaccacaattatcttgccttatccaggaataattgcccctttgcagagaaaaaaaaaaacttaaaaaaagcacatgcctactgctgcctgtcccgctttgctgccaatgcaacagccctggaagaaaccctagagggttgcatagtctagaaaggagtgtgacctgacagtgctggagcctcctagtttccccctatgaaggttcccttaggctgctgagtttgggtttgtgatttatctttagtttgttttaaagtcatctttactttcccaaatgtgttaaatttgtaactcctctttggggtcttctccaccacctgtctgatttttttgtgatctgtttaatcttttaattttttagtatcagtggttttatttaaggagacagtttggcctattgttacttccaatttataatcaagaaggggctctggatccccttttaaattacacacactctcacacacatacatgtatgtttatagatgctgctgctcttttccctgaagcatagtcaagtaagaactgctctacagaaggacatatttccttggatgtgagaccctattttgaaatagagtcctgactcagaacaccaacttaagaatttgggggattaaagatgtgaagaccacagtcttgggttttcatatctggagaagactatttgccatgacgttttgttgccctggtatttggacactcctcagctttaatgggtgtggcccctttagggttagtcctcagactaatgatagtgtctgctttctgcatgaacggcaatatgggactccctccaagctagggtttggcaagtctgccctagagtcatttactctcctctgcctccatttgttaatacagaatcaacatttagtcttcattatctttttttttttttttgagacagagtttcgatctattttaagtatgtgaagaaaatctacttgtaaaaggctcagatcttaattaaaaggtaattgtagcacattaccaattataaggtgaagaaatgtttttttcccaagtgtgatgcattgttcttcagatgttgaaaagaaagcaaaaaataccttctaacttaagacagaatttttaacaaaatgagcagtaaaagtcacatgaaccactccaaaaatcagtgcattttgcatatttttaaacaaagacagcttgttgaatactgagaagaggagtgcaaggagaaggtctgtactaacaaagccaaattcctcaagctcttactggactcagttcagagtggtgggccattaaccccaacatggaatttttccatataaatctcaatgaattccctttcatttgaataggcaaacccaaatccatgcaagtgttttaaagcactgtcctgtcttaatcttacatgctgaaagtcttcatggtgatatgcactatattcagtatacgtatgttttcctacttctcttgtaaaactgttgcatgatccaacttcagcaatgaattgtgcctagtggagaacctctatagatcttaaaaaatgaattattctttagcagtgtattactcacatgggtgcaatctttagccccagggaggtcaataatgtcttttaaagccagaagtcacattttaccaatatgcatttatcataattggtgcttaggctgtatattcaagcctgttgtcttaacattttgtataaaaaagaacaacagaaattatctgtcatttgagaagtggcttgacaatcatttgagctttgaaagcagtcactgtggtgtaatatgaatgctgtcctagtggtcatagtaccaagggcacgtgtctccccttggtataactgatttcctttttagtcctctactgctaaataagttaattttgcattttgcagaaagaaacattgattgctaaatctttttgctgctgtgttttggtgttttcatgtttacttgttttatattgatctgttttaagtatgagaggcttatagtgccctccattgtaaatccatagtcatctttttaagcttattgtgtttaagaaagtagctatgtgttaaacagaggtgatggcagcccttccctagcacactggtggaagagaccccttaagaacctgaccccagtgaatgaagctgatgcacagggagcaccaaaggaccttcgttaagtgataattgtcctggcctctcagccatgaccgttatgaggaaatatcccccattcgaacttaacagatgcctcctctccaaagagaattaaaatcgtagcttgtacagatcaagagaatatactgggcagaatgaagtatgtttgtttatttttctttaaaaataaaggattttggaactctggagagtaagaatatagtatagagtttgcctcaacacatgtgagggccaaataacctgctagctaggcagtaataaactctgttacagaagagaaaaagggccgggcacagtggcttattcctgtaatcccaacactgtggaaggccgaggcaggaggatcacttgagtccaggagtttgaaacctacctaggcaacatggtgaaaccttgtctctaccaaaataaaaattagctgggcatggtggcacgtgcctgtggtcccagctacttgggaggctgaggtgggagcctgggaggtcaaggctgcagtgagccatgatcatgccactgcactccatcctgggtgacagcaagatcttgtctcaaaaaaaaaaaaaaaaaa

SEQ ID NO: 192612 - DNA, 493 bp, Homo sapiens
  Payload ID: 18028
  Gene Name: transforming, acidic coiled-coil containing protein 1
  ENST ID: ENST00000521642
  CDS Start-End: 95-493
tcctcccgccccaccgcctccccgcccagggtctgggcacagccgcccgccgcccagcacaggagggtgcagccccggccccaagttctgcgccatgggaggctcccactctcagaccccgaggggccgggaacccgccggggagaggcacccgagacccacggagaccgcgagtggctgtaaggtgaagaagcatgaaactcagtctctcgccctggatgcatgttctcgggatgaaggggcagtgatctcccagatttcagacatttctaatagggatggccatgctactgatgaggagaaactggcatccacgtcatgtggtcagaaatcagctggtgccgaggtgaaaggtgagccagaggaagacctggagtactttgaatgttccaatgttcctgtgtctaccataaatcatgcgttttcatcctcagaagcaggcatagagaaggagacgtgccagaagatggaagaagacgggtccactgtgctt

SEQ ID NO: 192613 - DNA, 5510 bp, Homo sapiens
  Payload ID: 18028
  Gene Name: transforming, acidic coiled-coil containing protein 1
  ENST ID: ENST00000519416
  CDS Start-End: 911-2740
aaggacaggatgtttctgagccaagttgaagcaaaagaaactttttccagcatgtcaggaacgaagctgacgttccattaagaaaaaaaaaaaaaaaaaaagaagtgctagaggaaggagtaagaggtgaaaaggcaccagaattcagacggagctttaaattccagacagggccagcgttgggagcacgtaggaggcgcccctcggaaaggagccggagacccagctgacttcgcacttgagctccagccccgtggacatttcctgttctgcctctggaaattcaagctgaaagttacaaaacatccttttccctggaaccaagtgcttggttgggagaccatgccctccccttccttcctcggaactcctccctgatcgccccgtggcttccccaggagagatgcgaaatcagcggtagcaggtggcgcagaagggagaggggagcgaccctggggaccgactctggggaccctcgccgaagagctcggattctgaaggtaattttgagactcctgaagctgaaaccccgatccgatcacctttcaaggagtcctgtgatccatcactcggattggcaggacctggggccaaaagccaagaatcacaagaagctgatgaacagcttgtagcagaagtggttgaaaaatgttcatctaagacttgttctaaaccttcagaaaatgaagtgccacagcaggccattgactctcactcagtcaagaatttcagagaagaacctgaacatgattttagcaaaatttccatcgtgaggccattttcaatagaaacgaaggattccacggatatctcggcagtcctcggaacaaaagcagctcatggctgtgtaactgcagtctcaggcaaggctctgccttccagcccgccagacgccctccaggacgaggcgatgacagaaggcagcatgggggtcaccctcgaggcctccgcagaagctgatctaaaagctggcaactcctgtccagagcttgtgcccagcagaagaagcaagctgagaaagcccaagcctgtccccctgaggaagaaagcaattggaggagagttctcagacaccaacgctgctgtggagggcacacctctccccaaggcatcctatcacttcagtcctgaagagttggatgagaacacaagtcctttgctaggagatgccaggttccagaagtctccccctgaccttaaagaaactcccggcactctcagtagtgacaccaacgactcaggggttgagctgggggaggagtcgaggagctcacctctcaagcttgagtttgatttcacagaagatacaggaaacatagaggccaggaaagcccttccaaggaagcttggcaggaaactgggtagcacactgactcccaagatacaaaaagatggcatcagtaagtcagcaggtttagaacagcctacagacccagtggcacgagacgggcctctctcccaaacatcttccaagccagatcctagtcagtgggaaagccccagcttcaacccctttgggagccactctgttctgcagaactccccacccctctcttctgagggctcctaccactttgacccagataactttgacgaatccatggatccctttaaaccaactacgaccttaacaagcagtgacttttgttctcccactggtaatcacgttaatgaaatcttagaatcacccaagaaggcaaagtcgcgtttaataactggctgtaaggtgaagaagcatgaaactcagtctctcgccctggatgcatgttctcgggatgaaggggcagtgatctcccagatttcagacatttctaatagggatggccatgctactgatgaggagaaactggcatccacgtcatgtggtcagaaatcagctggtgccgaggtgaaaggtgagccagaggaagacctggagtactttgaatgttccaatgttcctgtgtctaccataaatcatgcgttttcatcctcagaagcaggcatagagaaggagacgtgccagaagatggaagaagacgggtccactgtgcttgggctgctggagtcctctgcagagaaggcccctgtgtcggtgtcctgtggaggtgagagccccctggatgggatctgcctcagcgaatcagacaagacagccgtgctcaccttaataagagaagagataattactaaagagattgaagcaaatgaatggaagaagaaatacgaagagacccggcaagaagttttggagatgaggaaaattgtagctgaatatgaaaagactattgctcaaatgattgaagatgaacaaaggacaagtatgacctctcagaagagcttccagcaactgaccatggagaaggaacaggccctggctgaccttaactctgtggaaaggtccctttctgatctcttcaggagatatgagaacctgaaaggtgttctggaagggttcaagaagaatgaagaagccttgaagaaatgtgctcaggattacttagccagagttaaacaagaggagcagcgataccaggccctgaaaatccacgcagaagagaaactggacaaagccaatgaagagattgctcaggttcgaacaaaagcaaaggctgagagtgcagctctccatgctggactccgcaaagagcagatgaaggtggagtccctggaaagggccctgcagcagaagaaccaagaaattgaagaactgacaaaaatctgtgatgagctgattgcaaagctgggaaagactgactgagacactccccctgttagctcaacagatctgcatttggctgcttctcttgtgaccacaattatcttgccttatccaggaataattgcccctttgcagagaaaaaaaaaaacttaaaaaaagcacatgcctactgctgcctgtcccgctttgctgccaatgcaacagccctggaagaaaccctagagggttgcatagtctagaaaggagtgtgacctgacagtgctggagcctcctagtttccccctatgaaggttcccttaggctgctgagtttgggtttgtgatttatctttagtttgttttaaagtcatctttactttcccaaatgtgttaaatttgtaactcctctttggggtcttctccaccacctgtctgatttttttgtgatctgtttaatcttttaattttttagtatcagtggttttatttaaggagacagtttggcctattgttacttccaatttataatcaagaaggggctctggatccccttttaaattacacacactctcacacacatacatgtatgtttatagatgctgctgctcttttccctgaagcatagtcaagtaagaactgctctacagaaggacatatttccttggatgtgagaccctattttgaaatagagtcctgactcagaacaccaacttaagaatttgggggattaaagatgtgaagaccacagtcttgggttttcatatctggagaagactatttgccatgacgttttgttgccctggtatttggacactcctcagctttaatgggtgtggcccctttagggttagtcctcagactaatgatagtgtctgctttctgcatgaacggcaatatgggactccctccaagctagggtttggcaagtctgccctagagtcatttactctcctctgcctccatttgttaatacagaatcaacatttagtcttcattatctttttttttttttttgagacagagtttcgatctattttaagtatgtgaagaaaatctacttgtaaaaggctcagatcttaattaaaaggtaattgtagcacattaccaattataaggtgaagaaatgtttttttcccaagtgtgatgcattgttcttcagatgttgaaaagaaagcaaaaaataccttctaacttaagacagaatttttaacaaaatgagcagtaaaagtcacatgaaccactccaaaaatcagtgcattttgcatatttttaaacaaagacagcttgttgaatactgagaagaggagtgcaaggagaaggtctgtactaacaaagccaaattcctcaagctcttactggactcagttcagagtggtgggccattaaccccaacatggaatttttccatataaatctcaatgaattccctttcatttgaataggcaaacccaaatccatgcaagtgttttaaagcactgtcctgtcttaatcttacatgctgaaagtcttcatggtgatatgcactatattcagtatacgtatgttttcctacttctcttgtaaaactgttgcatgatccaacttcagcaatgaattgtgcctagtggagaacctctatagatcttaaaaaatgaattattctttagcagtgtattactcacatgggtgcaatctttagccccagggaggtcaataatgtcttttaaagccagaagtcacattttaccaatatgcatttatcataattggtgcttaggctgtatattcaagcctgttgtcttaacattttgtataaaaaagaacaacagaaattatctgtcatttgagaagtggcttgacaatcatttgagctttgaaagcagtcactgtggtgtaatatgaatgctgtcctagtggtcatagtaccaagggcacgtgtctccccttggtataactgatttcctttttagtcctctactgctaaataagttaattttgcattttgcagaaagaaacattgattgctaaatctttttgctgctgtgttttggtgttttcatgtttacttgttttatattgatctgttttaagtatgagaggcttatagtgccctccattgtaaatccatagtcatctttttaagcttattgtgtttaagaaagtagctatgtgttaaacagaggtgatggcagcccttccctagcacactggtggaagagaccccttaagaacctgaccccagtgaatgaagctgatgcacagggagcaccaaaggaccttcgttaagtgataattgtcctggcctctcagccatgaccgttatgaggaaatatcccccattcgaacttaacagatgcctcctctccaaagagaattaaaatcgtagcttgtacagatcaagagaatatactgggcagaatgaagtatgtttgtttatttttctttaaaaataaaggattttggaactctggagagtaagaatatagtatagagtttgcctcaacacatgtgagggccaaataacctgctagctaggcagtaataaactctgttacagaagagaaaaagggccgggcacagtggcttattcctgtaatcccaacactgtggaaggccgaggcaggaggatcacttgagtccaggagtttgaaacctacctaggcaacatggtgaaaccttgtctctaccaaaataaaaattagctgggcatggtggcacgtgcctgtggtcccagctacttgggaggctgaggtgggagcctgggaggtcaaggctgcagtgagccatgatcatgccactgcactccatcctgggtgacagcaagatcttgtctcaaaaaaaaaaaaaaaaaa

SEQ ID NO: 192614 - DNA, 3011 bp, Homo sapiens
  Payload ID: 18028
  Gene Name: transforming, acidic coiled-coil containing protein 1
  Uniprot ID: O75410
  ENST ID: ENST00000518415
  CDS Start-End: 707-2902
ggggaccgactctggggaccctcgccgaagagtcccaagggttccaaggccagagagaggtcctggtcttgattgctggcatgtttactcttccaagtacactgagatcaaatgcaaagacaaaccatcaaagaaaataactctaaaatctggacatgatatacaaagtgactgcctaaaggagctgaagagaggacataagtggatcgcctctgctgttgcatgttggcttggagaacagaagatgaggagccaaataagcaagtccttcagccccaggcttctagcacggggctgcatgtaggctatgcattctggggagtgaggagatcatgaatgctgaaaataaatgaaggaatccagaaaagcaagagtcaaagaaggcatctgcaggccaaatctctgatcaacccctgacccacatacacacaaaatacactcaaagcagctcagctaaagacaaagatctgcactcagagtagagctgcctccccagaaacagagctcgcagttcaggcccagcaagaaaattacctgcaaaacaaaggaaaaacaacactcatcagagaaaaagaacagaatctggaatcttcacaacctagcattcatcatatccaagattgaaacccaaattatgggacatatttaaaaaccaggaaaatggaacgtagtcttaagagaaaagtcaatcaaatctgacctggagatgaataatatattgaaacttaaaagctcggattctgaaggtaattttgagactcctgaagctgaaaccccgatccgatcacctttcaaggagtcctgtgatccatcactcggattggcaggacctggggccaaaagccaagaatcacaagaagctgatgaacagcttgtagcagaagtggttgaaaaatgttcatctaagacttgttctaaaccttcagaaaatgaagtgccacagcaggccattgactctcactcagtcaagaatttcagagaagaacctgaacatgattttagcaaaatttccatcgtgaggccattttcaatagaaacgaaggattccacggatatctcggcagtcctcggaacaaaagcagctcatggctgtgtaactgcagtctcaggcaaggctctgccttccagcccgccagacgccctccaggacgaggcgatgacagaaggcagcatgggggtcaccctcgaggcctccgcagaagctgatctaaaagctggcaactcctgtccagagcttgtgcccagcagaagaagcaagctgagaaagcccaagcctgtccccctgaggaagaaagcaattggaggagagttctcagacaccaacgctgctgtggagggcacacctctccccaaggcatcctatcacttcagtcctgaagagttggatgagaacacaagtcctttgctaggagatgccaggttccagaagtctccccctgaccttaaagaaactcccggcactctcagtagtgacaccaacgactcaggggttgagctgggggaggagtcgaggagctcacctctcaagcttgagtttgatttcacagaagatacaggaaacatagaggccaggaaagcccttccaaggaagcttggcaggaaactgggtagcacactgactcccaagatacaaaaagatggcatcagtaagtcagcaggtttagaacagcctacagacccagtggcacgagacgggcctctctcccaaacatcttccaagccagatcctagtcagtgggaaagccccagcttcaacccctttgggagccactctgttctgcagaactccccacccctctcttctgagggctcctaccactttgacccagataactttgacgaatccatggatccctttaaaccaactacgaccttaacaagcagtgacttttgttctcccactggtaatcacgttaatgaaatcttagaatcacccaagaaggcaaagtcgcgtttaataacgagtggctgtaaggtgaagaagcatgaaactcagtctctcgccctggatgcatgttctcgggatgaaggggcagtgatctcccagatttcagacatttctaatagggatggccatgctactgatgaggagaaactggcatccacgtcatgtggtcagaaatcagctggtgccgaggtgaaaggcatagagaaggagacgtgccagaagatggaagaagacgggtccactgtgcttgggctgctggagtcctctgcagagaaggcccctgtgtcggtgtcctgtggaggtgagagccccctggatgggatctgcctcagcgaatcagacaagacagccgtgctcaccttaataagagaagagataattactaaagagattgaagcaaatgaatggaagaagaaatacgaagagacccggcaagaagttttggagatgaggaaaattgtagctgaatatgaaaagactattgctcaaatgattgaagatgaacaaaggacaagtatgacctctcagaagagcttccagcaactgaccatggagaaggaacaggccctggctgaccttaactctgtggaaaggtccctttctgatctcttcaggagatatgagaacctgaaaggtgttctggaagggttcaagaagaatgaagaagccttgaagaaatgtgctcaggattacttagccagagttaaacaagaggagcagcgataccaggccctgaaaatccacgcagaagagaaactggacaaagccaatgaagagattgctcaggttcgaacaaaagcaaaggctgagagtgcagctctccatgctggactccgcaaagagcagatgaaggtggagtccctggaaagggccctgcagcagaagaaccaagaaattgaagaactgacaaaaatctgtgatgagctgattgcaaagctgggaaagactgactgagacactccccctgttagctcaacagatctgcatttggctgcttctcttgtgaccacaattatcttgccttatccaggaataattgcccctttgcagagaaaaaaaaaaa

SEQ ID NO: 192615 - DNA, 491 bp, Homo sapiens
  Payload ID: 18028
  Gene Name: transforming, acidic coiled-coil containing protein 1
  ENST ID: ENST00000521050
  CDS Start-End: 57-491
acagccgcccgccgcccagcacaggagggtgcagccccggccccaagttctgcgccatgggaggctcccactctcagaccccgaggggccgggaacccgccggggagaggcacccgagacccacggagaccgcgactactgaacaagtgaaatttctctgttttctgttgagtggctgtaaggtgaagaagcatgaaactcagtctctcgccctggatgcatgttctcgggatgaaggggcagtgatctcccagatttcagacatttctaatagggatggccatgctactgatgaggagaaactggcatccacgtcatgtggtcagaaatcagctggtgccgaggtgaaaggtgagccagaggaagacctggagtactttgaatgttccaatgttcctgtgtctaccataaatcatgcgttttcatcctcagaagcaggcatagagaaggagacgtgccagaagatggaagaagacgggtccactgtgctt

SEQ ID NO: 192616 - DNA, 685 bp, Homo sapiens
  Payload ID: 18028
  Gene Name: transforming, acidic coiled-coil containing protein 1
  ENST ID: ENST00000524193
  CDS Start-End: 504-685
gtgcaaatgtgttgtgggccttgaggtggcagtcctatgaggcggtggtagggctttcccctgattcagtactcagctggtcccaaggggctttgagtgtggcttttgcctccttaactggatgctgaataggctccttgcacttattttgggactccgttgtgcctgtgcccagcacagggtgtgctgctggtgaatcacaagaagctgatgaacagcttgtagcagaagtggttgaaaaatgttcatctaagacttgttctaaaccttcagaaaatgaagtgccacagcaggccattgactctcactcagtcaagaatttcagagaagaacctgaacatgattttagcaaaatttccatcgtgaggccattttcaatagaaacgaaggattccacggatatctcggcagtcctcggaacaaaagcagctcatggctgtgtaactgcagtctcaggcaaggctctgccttccagcccgccagacgccctccaggacgaggcgatgacagaaggcagcatgggggtcaccctcgaggcctccgcagaagctgatctaaaagctggcaactcctgtccagagcttgtgcccagcagaagaagcaagctgagaaagcccaagcctgtccccctgaggaagaaagcaattggaggagagttctcagacaccaacgctgctgtggaggg

SEQ ID NO: 192617 - DNA, 1550 bp, Homo sapiens
  Payload ID: 18028
  Gene Name: transforming, acidic coiled-coil containing protein 1
  ENST ID: ENST00000520611
  CDS Start-End: 324-1052
ttaacaagcagtgacttttgttctcccactggtaatcacgttaatgaaatcttagaatcacccaagaaggcaaagtcgcgtttaataacgatgaaggggcagtgatctcccagatttcagacatttctaatagggatggccatgctactgatgaggagaaactggcatccacgtcatgtggtcagaaatcagctggtgccgaggtgaaaggtgagccagaggaagacctggagtactttgaatgttccaatgttcctgtgtctaccataaatcatgcgttttcatcctcagaagcaggcatagagaaggagacgtgccagaagatggaagaagacgggtccactgtgcttgggctgctggagtcctctgcagagaaggcccctgtgtcggtgtcctgtggaggtgagagccccctggatgggatctgcctcagcgaatcagacaagacagccgtgctcaccttaataagagaagagataattactaaagagattgaagcaaatgaatggaagaagaaatacgaagagacccggcaagaagttttggagatgaggaaaattgtagctgaatatgaaaagactattgctcaaatgattgatgaacaaaggacaagtatgacctctcagaagagcttccagcaactgaccatggagaaggaacaggccctggctgaccttaactctgtggaaaggtccctttctgatctcttcaggagatatgagaacctgaaaggtgttctggaagggttcaagaagaatgaagaagccttgaagaaatgtgctcaggattacttagccagagttaaacaagaggagcagcgataccaggccctgaaaatccacgcagaagagaaactggacaaagccaatgaagagattgctcaggttcgaacaaaagcaaaggctgagagtgcagctctccatgctggactccgcaaagagcagatgaaggtggagtccctggaaagggccctgcagcagaagaaccaagaaattgaagaactgacaaaaatctgtgatgagctgattgcaaagctgggaaagactgactgagacactccccctgttagctcaacagatctgcatttggctgcttctcttgtgaccacaattatcttgccttatccaggaataattgcccctttgcagagaaaaaaaaaaacttaaaaaaagcacatgcctactgctgcctgtcccgctttgctgccaatgcaacagccctggaagaaaccctagagggttgcatagtctagaaaggagtgtgacctgacagtgctggagcctcctagtttccccctatgaaggttcccttaggctgctgagtttgggtttgtgatttatctttagtttgttttaaagtcatctttactttcccaaatgtgttaaatttgtaactcctctttggggtcttctccaccacctgtctgatttttttgtgatctgtttaatcttttaattttttagtatcagtggttttatttaaggagacagtttggcctattgttacttccaatttataatcaagaaggggctctggatccccttttaaat

SEQ ID NO: 192618 - DNA, 4116 bp, Homo sapiens
  Payload ID: 18028
  Gene Name: transforming, acidic coiled-coil containing protein 1
  ENST ID: ENST00000518809
  CDS Start-End: 1-1364
gtttagaacagcctacagacccagtggcacgagacgggcctctctcccaaacatcttccaagccagatcctagtcagtgggaaagccccagcttcaacccctttgggagccactctgttctgcagaactccccacccctctcttctgagggctcctaccactttgacccagataactttgacgaatccatggatccctttaaaccaactacgaccttaacaagcagtgacttttgttctcccactggtaatcacgttaatgaaatcttagaatcacccaagaaggcaaagtcgcgtttaataacgactactgaacaagtgaaatttctctgttttctgttgagtggctgtaaggtgaagaagcatgaaactcagtctctcgccctggatgcatgttctcgggatgaaggggcagtgatctcccagatttcagacatttctaatagggatggccatgctactgatgaggagaaactggcatccacgtcatgtggtcagaaatcagctggtgccgaggtgaaaggtgagccagaggaagacctggagtactttgaatgttccaatgttcctgtgtctaccataaatcatgcgttttcatcctcagaagcaggcatagagaaggagacgtgccagaagatggaagaagacgggtccactgtgcttgggctgctggagtcctctgcagagaaggcccctgtgtcggtgtcctgtggaggtgagagccccctggatgggatctgcctcagcgaatcagacaagacagccgtgctcaccttaataagagaagagataattactaaagagattgaagcaaatgaatggaagaagaaatacgaagagacccggcaagaagttttggagatgaggaaaattgtagctgaatatgaaaagactattgctcaaatgattgatgaacaaaggacaagtatgacctctcagaagagcttccagcaactgaccatggagaaggaacaggccctggctgaccttaactctgtggaaaggtccctttctgatctcttcaggagatatgagaacctgaaaggtgttctggaagggttcaagaagaatgaagaagccttgaagaaatgtgctcaggattacttagccagagttaaacaagaggagcagcgataccaggccctgaaaatccacgcagaagagaaactggacaaagccaatgaagagattgctcaggttcgaacaaaagcaaaggctgagagtgcagctctccatgctggactccgcaaagagcagatgaaggtggagtccctggaaagggccctgcagcagaagaaccaagaaattgaagaactgacaaaaatctgtgatgagctgattgcaaagctgggaaagactgactgagacactccccctgttagctcaacagatctgcatttggctgcttctcttgtgaccacaattatcttgccttatccaggaataattgcccctttgcagagaaaaaaaaaaacttaaaaaaagcacatgcctactgctgcctgtcccgctttgctgccaatgcaacagccctggaagaaaccctagagggttgcatagtctagaaaggagtgtgacctgacagtgctggagcctcctagtttccccctatgaaggttcccttaggctgctgagtttgggtttgtgatttatctttagtttgttttaaagtcatctttactttcccaaatgtgttaaatttgtaactcctctttggggtcttctccaccacctgtctgatttttttgtgatctgtttaatcttttaattttttagtatcagtggttttatttaaggagacagtttggcctattgttacttccaatttataatcaagaaggggctctggatccccttttaaattacacacactctcacacacatacatgtatgtttatagatgctgctgctcttttccctgaagcatagtcaagtaagaactgctctacagaaggacatatttccttggatgtgagaccctattttgaaatagagtcctgactcagaacaccaacttaagaatttgggggattaaagatgtgaagaccacagtcttgggttttcatatctggagaagactatttgccatgacgttttgttgccctggtatttggacactcctcagctttaatgggtgtggcccctttagggttagtcctcagactaatgatagtgtctgctttctgcatgaacggcaatatgggactccctccaagctagggtttggcaagtctgccctagagtcatttactctcctctgcctccatttgttaatacagaatcaacatttagtcttcattatctttttttttttttttgagacagagtttcgatctattttaagtatgtgaagaaaatctacttgtaaaaggctcagatcttaattaaaaggtaattgtagcacattaccaattataaggtgaagaaatgtttttttcccaagtgtgatgcattgttcttcagatgttgaaaagaaagcaaaaaataccttctaacttaagacagaatttttaacaaaatgagcagtaaaagtcacatgaaccactccaaaaatcagtgcattttgcatatttttaaacaaagacagcttgttgaatactgagaagaggagtgcaaggagaaggtctgtactaacaaagccaaattcctcaagctcttactggactcagttcagagtggtgggccattaaccccaacatggaatttttccatataaatctcaatgaattccctttcatttgaataggcaaacccaaatccatgcaagtgttttaaagcactgtcctgtcttaatcttacatgctgaaagtcttcatggtgatatgcactatattcagtatacgtatgttttcctacttctcttgtaaaactgttgcatgatccaacttcagcaatgaattgtgcctagtggagaacctctatagatcttaaaaaatgaattattctttagcagtgtattactcacatgggtgcaatctttagccccagggaggtcaataatgtcttttaaagccagaagtcacattttaccaatatgcatttatcataattggtgcttaggctgtatattcaagcctgttgtcttaacattttgtataaaaaagaacaacagaaattatctgtcatttgagaagtggcttgacaatcatttgagctttgaaagcagtcactgtggtgtaatatgaatgctgtcctagtggtcatagtaccaagggcacgtgtctccccttggtataactgatttcctttttagtcctctactgctaaataagttaattttgcattttgcagaaagaaacattgattgctaaatctttttgctgctgtgttttggtgttttcatgtttacttgttttatattgatctgttttaagtatgagaggcttatagtgccctccattgtaaatccatagtcatctttttaagcttattgtgtttaagaaagtagctatgtgttaaacagaggtgatggcagcccttccctagcacactggtggaagagaccccttaagaacctgaccccagtgaatgaagctgatgcacagggagcaccaaaggaccttcgttaagtgataattgtcctggcctctcagccatgaccgttatgaggaaatatcccccattcgaacttaacagatgcctcctctccaaagagaattaaaatcgtagcttgtacagatcaagagaatatactgggcagaatgaagtatgtttgtttatttttctttaaaaataaaggattttggaactctggagagtaagaatatagtatagagtttgcctcaacacatgtgagggccaaataacctgctagctaggcagtaataaactctgttacagaagagaaaaagggccgggcacagtggcttattcctgtaatcccaacactgtggaaggccgaggcaggaggatcacttgagtccaggagtttgaaacctacctaggcaacatggtgaaaccttgtctctaccaaaataaaaattagctgggcatggtggcacgtgcctgtggtcccagctacttgggaggctgaggtgggagcctgggaggtcaaggctgcagtgagccatgatcatgccactgcactccatcctgggtgacagcaagatcttgtctc

SEQ ID NO: 192619 - DNA, 1724 bp, Homo sapiens
  Payload ID: 18028
  Gene Name: transforming, acidic coiled-coil containing protein 1
  ENST ID: ENST00000522904
  CDS Start-End: 53-1724
ccgcccgccgcccagcacaggagggtgcagccccggccccaagttctgcgccatgggaggctcccactctcagaccccgaggggccgggaacccgccggggagaggcacccgagacccacggagaccgcctcggattctgaaggtaattttgagactcctgaagctgaaaccccgatccgatcacctttcaaggagtcctgtgatccatcactcggattggcaggacctggggccaaaagccaagaatcacaagaagctgatgaacagcttgtagcagaagtggttgaaaaatgttcatctaagacttgttctaaaccttcagaaaatgaagtgccacagcaggccattgactctcactcagtcaagaatttcagagaagaacctgaacatgattttagcaaaatttccatcgtgaggccattttcaatagaaacgaaggattccacggatatctcggcagtcctcggaacaaaagcagctcatggctgtgtaactgcagtctcaggcaaggctctgccttccagcccgccagacgccctccaggacgaggcgatgacagaaggcagcatgggggtcaccctcgaggcctccgcagaagctgatctaaaagctggcaactcctgtccagagcttgtgcccagcagaagaagcaagctgagaaagcccaagcctgtccccctgaggaagaaagcaattggaggagagttctcagacaccaacgctgctgtggagggcacacctctccccaaggcatcctatcacttcagtcctgaagagttggatgagaacacaagtcctttgctaggagatgccaggttccagaagtctccccctgaccttaaagaaactcccggcactctcagtagtgacaccaacgactcaggggttgagctgggggaggagtcgaggagctcacctctcaagcttgagtttgatttcacagaagatacaggaaacatagaggccaggaaagcccttccaaggaagcttggcaggaaactgggtagcacactgactcccaagatacaaaaagatggcatcagtaagtcagcaggtttagaacagcctacagacccagtggcacgagacgggcctctctcccaaacatcttccaagccagatcctagtcagtgggaaagccccagcttcaacccctttgggagccactctgttctgcagaactccccacccctctcttctgagggctcctaccactttgacccagataactttgacgaatccatggatccctttaaaccaactacgaccttaacaagcagtgacttttgttctcccactggtaatcacgttaatgaaatcttagaatcacccaagaaggcaaagtcgcgtttaataacgagtggctgtaaggtgaagaagcatgaaactcagtctctcgccctggatgcatgttctcgggatgaaggggcagtgatctcccagatttcagacatttctaatagggatggccatgctactgatgaggagaaactggcatccacgtcatgtggtcagaaatcagctggtgccgaggtgaaaggcatagagaaggagacgtgccagaagatggaagaagacgggtccactgtgcttgggctgctggagtcctctgcagagaaggcccctgtgtcggtgtcctgtggaggtgagagccccctggatgggatctgcctcagcgaatcagacaagacagccgtgctcaccttaataagagaagaggtaa

SEQ ID NO: 192620 - DNA, 476 bp, Homo sapiens
  Payload ID: 18028
  Gene Name: transforming, acidic coiled-coil containing protein 1
  ENST ID: ENST00000524354
  CDS Start-End: 90-476
agaaacagaaccctgtgtcaaatccaggagcctgggggactgtagaacctgaagttttactgggagctggagccggaggagccgcgctcatggcgttcagcccgtggcagatcctgtcccccgtgcagtgggcgaaatggacgtggtctgcggtacgcggcggggccgccggcgaggacgaggctggcgggcccgagggcgaccccgaggaggaggattcgcaagccgagaccaaatccttgagtttcagctcggattctgaaggtaattttgagactcctgaagctgaaaccccgatccgatcacctttcaaggagtcctgtgatccatcactcggattggcaggacctggggccaaaagccaagaatcacaagaagctgatgaacagcttgtagcagaagtggttgaaaaatgttcatctaagacttgttctaaaccttcagaaaatgaagtgccacagcaggccattgactct

SEQ ID NO: 192621 - DNA, 656 bp, Homo sapiens
  Payload ID: 18028
  Gene Name: transforming, acidic coiled-coil containing protein 1
  ENST ID: ENST00000521528
  CDS Start-End: 566-656
agtcgctccccggcccttcccggggccctaccgtgtacccaaaacgcagccgcggtgaagaaggtcgcgtgatgacaggcccctggcagctgctgggaaatggtggtctctgccgggctgtcatccgcgtgattgcggaagctcggattctgaaggtaattttgagactcctgaagctgaaaccccgatccgatcacctttcaaggagtcctgtgatccatcactcggattggcaggacctggggccaaaagccaagaatcacaagaagctgatgaacagcttgtagcagaagtggttgaaaaatgttcatctaagacttgttctaaaccttcagaaaatgaagtgccacagcaggccattgactctcactcagtcaagaatttcagagaagaacctgaacatgattttagcaaaatttccatcgtgaggccattttcaatagaaacgaaggattccacggatatctcggcagtcctcggaacaaaagcagctcatggctgtgtaactgcagtctcaggcaaggctctgccttccagcccgccagacgccctccaggacgaggcgatgacagaaggcagcatgggggtcaccctcgaggcctccgcagaagctgatctaaaagctggcaactcctgtccagagcttgtgcccagca

SEQ ID NO: 192622 - DNA, 2564 bp, Homo sapiens
  Payload ID: 18028
  Gene Name: transforming, acidic coiled-coil containing protein 1
  ENST ID: ENST00000520973
  CDS Start-End: 566-2311
agtcgctccccggcccttcccggggccctaccgtgtacccaaaacgcagccgcggtgaagaaggtcgcgtgatgacaggcccctggcagctgctgggaaatggtggtctctgccgggctgtcatccgcgtgattgcggaagctcggattctgaaggtaattttgagactcctgaagctgaaaccccgatccgatcacctttcaaggagtcctgtgatccatcactcggattggcaggacctggggccaaaagccaagaatcacaagaagctgatgaacagcttgtagcagaagtggttgaaaaatgttcatctaagacttgttctaaaccttcagaaaatgaagtgccacagcaggccattgactctcactcagtcaagaatttcagagaagaacctgaacatgattttagcaaaatttccatcgtgaggccattttcaatagaaacgaaggattccacggatatctcggcagtcctcggaacaaaagcagctcatggctgtgtaactgcagtctcaggcaaggctctgccttccagcccgccagacgccctccaggacgaggcgatgacagaaggcagcatgggggtcaccctcgaggcctccgcagaagctgatctaaaagctggcaactcctgtccagagcttgtgcccagcagaagaagcaagctgagaaagcccaagcctgtccccctgaggaagaaagcaattggaggagagttctcagacaccaacgctgctgtggagggcacacctctccccaaggcatcctatcacttcagtcctgaagagttggatgagaacacaagtcctttgctaggagatgccaggttccagaagtctccccctgaccttaaagaaactcccggcactctcagtagtgacaccaacgactcaggggttgagctgggggaggagtcgaggagctcacctctcaagcttgagtttgatttcacagaagatacaggaaacatagaggccaggaaagcccttccaaggaagcttggcaggaaactgggtagcacactgactcccaagatacaaaaagatggcatcagtaagtcagcaggtttagaacagcctacagacccagtggcacgagacgggcctctctcccaaacatcttccaagccagatcctagtcagtgggaaagccccagcttcaacccctttgggagccactctgttctgcagaactccccacccctctcttctgagggctcctaccactttgacccagataactttgacgaatccatggatccctttaaaccaactacgaccttaacaagcagtgacttttgttctcccactggtaatcacgttaatgaaatcttagaatcacccaagaaggcaaagtcgcgtttaataacgagtggctgtaaggtgaagaagcatgaaactcagtctctcgccctggatgcatgttctcgggatgaaggggcagtgatctcccagatttcagacatttctaatagggatggccatgctactgatgaggagaaactggcatccacgtcatgtggtcagaaatcagctggtgccgaggtgaaaggcatagagaaggagacgtgccagaagatggaagaagacgggtccactgtgcttgggctgctggagtcctctgcagagaaggcccctgtgtcggtgtcctgtggaggtgagagccccctggatgggatctgcctcagcgaatcagacaagacagccgtgctcaccttaataagagaagagataattactaaagagattgaagcaaatgaatggaagaagaaatacgaagagacccggcaagaagttttggagatgaggaaaattgtagctgaatatgaaaagactattgctcaaatgattgaagatgaacaaaggacaagtatgacctctcagaagagcttccagcaactgaccatggagaaggaacaggccctggctgaccttaactctgtggaaaggtccctttctgatctcttcaggagatatgagaacctgaaaggtgttctggaagggttcaagaagaatgaagaagccttgaagaaatgtgctcaggattacttagccagagttaaacaagaggagcagcgataccaggccctgaaaatccacgcagaagagaaactggacaaagccaatgaagagattgctcaggttcgaacaaaagcaaaggctgagagtgcagctctccatgctggactccgcaaagagcagatgaaggtggagtccctggaaagggccctgcagcagaagaaccaagaaattgaagaactgacaaaaatctgtgatgagctgattgcaaagctgggaaagactgactgagacactccccctgttagctcaacagatctgcatttggctgcttctcttgtgaccacaattatcttgccttatccaggaataattgcccctttgcagagaaaaaaaaaaacttaaaaaaagcacatgcctactgctgcctgtcccgctttgctgccaatgcaacagccctggaagaaaccctagagggttgcatagtctagaaaggagtgtgacctgacagtgctggagcctcctagtttccccctatgaaggt

SEQ ID NO: 192623 - DNA, 1976 bp, Homo sapiens
  Payload ID: 18028
  Gene Name: transforming, acidic coiled-coil containing protein 1
  ENST ID: ENST00000520340
  CDS Start-End: 133-1875
gatgcgaaatcagcggtagcaggtggcgcagaagggagaggggagcgaccctggggaccgactctggggaccctcgccgaagagtcccaagggttccaaggccagagagaggtcctggtcttgattgctggcatgtttactcttccaagtacactgagatcaaatgcaaagacaaaccatcaaagctcggattctgaaggtaattttgagactcctgaagctgaaaccccgatccgatcacctttcaaggagtcctgtgatccatcactcggattggcaggacctggggccaaaagccaagaatcacaagaagctgatgaacagcttgtagcagaagtggttgaaaaatgttcatctaagacttgttctaaaccttcagaaaatgaagtgccacagcaggccattgactctcactcagtcaagaatttcagagaagaacctgaacatgattttagcaaaatttccatcgtgaggccattttcaatagaaacgaaggattccacggatatctcggcagtcctcggaacaaaagcagctcatggctgtgtaactgcagtctcaggcaaggctctgccttccagcccgccagacgccctccaggacgaggcgatgacagaaggcagcatgggggtcaccctcgaggcctccgcagaagctgatctaaaagctggcaactcctgtccagagcttgtgcccagcagaagaagcaagctgagaaagcccaagcctgtccccctgaggaagaaagcaattggaggagagttctcagacaccaacgctgctgtggagggcacacctctccccaaggcatcctatcacttcagtcctgaagagttggatgagaacacaagtcctttgctaggagatgccaggttccagaagtctccccctgaccttaaagaaactcccggcactctcagtagtgacaccaacgactcaggggttgagctgggggaggagtcgaggagctcacctctcaagcttgagtttgatttcacagaagatacaggaaacatagaggccaggaaagcccttccaaggaagcttggcaggaaactgggtagcacactgactcccaagatacaaaaagatggcatcagtaagtcagcaggtttagaacagcctacagacccagtggcacgagacgggcctctctcccaaacatcttccaagccagatcctagtcagtgggaaagccccagcttcaacccctttgggagccactctgttctgcagaactccccacccctctcttctgagggctcctaccactttgacccagataactttgacgaatccatggatccctttaaaccaactacgaccttaacaagcagtgacttttgttctcccactggtaatcacgttaatgaaatcttagaatcacccaagaaggcaaagtcgcgtttaataacgagtggctgtaaggtgaagaagcatgaaactcagtctctcgccctggatgcatgttctcgggatgaaggggcagtgatctcccagatttcagacatttctaatagggatggccatgctactgatgaggagaaactggcatccacgtcatgtggtcagaaatcagctggtgccgaggtgaaaggcatagagaaggagacgtgccagaagatggaagaagacgggtccactgtgcttgggctgctggagtcctctgcagagaaggcccctgtgtcggtgtcctgtggaggtgagagccccctggatgggatctgcctcagcgaatcagacaagacagccgtgctcaccttaataagagaagagataattactaaagagattgaagcaaatgaatggaagaagaaatacgaagagacccggcaagaagttttggagatgagaaaggagagttatgagccatgaaatgactaaagatgaaatcaaagtagagaagaaaaaaaggcataaataattcacacacagtgtggtcaacacttgaatgattaaaaaacattttaagtata

SEQ ID NO: 192624 - DNA, 3644 bp, Homo sapiens
  Payload ID: 18029
  Gene Name: transforming, acidic coiled-coil containing protein 2
  Uniprot ID: O95359
  ENST ID: ENST00000260733
  CDS Start-End: 82-3162
cgccccggctcccggctgcaggaatcgcgccaggacgctggccccgctcgcggctagcttgcacgccagggcacagcgaggatgggagggtcgcagtccctgcagccagccccagccagcgacctgaacctggaggcttccgaggcaatgagttccgattctgaagaggcatttgagaccccggagtcaacgacccctgtcaaagctccgccagctccacccccaccaccccccgaagtcatcccagaacccgaggtcagcacacagccacccccggaagaaccaggatgtggttctgagacagtccctgtccctgatggcccacggagcgactcggtggaaggaagtcccttccgtcccccgtcacactccttctctgccgtcttcgatgaagacaagccgatagccagcagtgggacttacaacttggactttgacaacattgagcttgtggatacctttcagaccttggagcctcgtgcctcagacgctaagaatcaggagggcaaagtgaacacacggaggaagtccacggattccgtccccatctctaagtctacactgtcccggtcgctcagcctgcaagccagtgactttgatggtgcttcttcctcaggcaatcccgaggccgtggcccttgccccagatgcatatagcacgggttccagcagtgcttctagtacccttaagcgaactaaaaaaccgaggccgccttccttaaaaaagaaacagaccaccaagaaacccacagagacccccccagtgaaggagacgcaacaggagccagatgaagagagccttgtccccagtggggagaatctagcatctgagacgaaaacggaatctgccaagacggaaggtcctagcccagccttattggaggagacgccccttgagcccgctgtggggcccaaagctgcctgccctctggactcagagagtgcagaaggggttgtccccccggcttctggaggtggcagagtgcagaactcaccccctgtcgggaggaaaacgctgcctcttaccacggccccggaggcaggggaggtaaccccatcggatagcggggggcaagaggactctccagccaaagggctctccgtaaggctggagtttgactattctgaggacaagagtagttgggacaaccagcaggaaaacccccctcctaccaaaaagataggcaaaaagccagttgccaaaatgcccctgaggaggccaaagatgaaaaagacacccgagaaacttgacaacactcctgcctcacctcccagatcccctgctgaacccaatgacatccccattgctaaaggtacttacacctttgatattgacaagtgggatgaccccaattttaaccctttttcttccacctcaaaaatgcaggagtctcccaaactgccccaacaatcatacaactttgacccagacacctgtgatgagtccgttgacccctttaagacatcctctaagacccccagctcaccttctaaatccccagcctcctttgagatcccagccagtgctatggaagccaatggagtggacggggatgggctaaacaagcccgccaagaagaagaagacgcccctaaagactgacacatttagggtgaaaaagtcgccaaaacggtctcctctctctgatccaccttcccaggaccccaccccagctgctacaccagaaacaccaccagtgatctctgcggtggtccacgccacagatgaggaaaagctggcggtcaccaaccagaagtggacgtgcatgacagtggacctagaggctgacaaacaggactacccgcagccctcggacctgtccacctttgtaaacgagaccaaattcagttcacccactgaggagttggattacagaaactcctatgaaattgaatatatggagaaaattggctcctccttacctcaggacgacgatgccccgaagaagcaggccttgtaccttatgtttgacacttctcaggagagccctgtcaagtcatctcccgtccgcatgtcagagtccccgacgccgtgttcagggtcaagttttgaagagactgaagcccttgtgaacactgctgcgaaaaaccagcatcctgtcccacgaggactggcccctaaccaagagtcacacttgcaggtgccagagaaatcctcccagaaggagctggaggccatgggcttgggcaccccttcagaagcgattgaaattacagctcccgagggctcctttgcctctgctgacgccctcctcagcaggctagctcaccccgtctctctctgtggtgcacttgactatctggagcccgacttagcagaaaagaaccccccactattcgctcagaaactccaggaggagttagagtttgccatcatgcggatagaagccctgaagctggccaggcagattgctttggcttcccgcagccaccaggatgccaagagagaggctgctcacccaacagacgtctccatctccaaaacagccttgtactcccgcatcgggaccgctgaggtggagaaacctgcaggccttctgttccagcagcccgacctggactctgccctccagatcgccagagcagagatcataaccaaggagagagaggtctcagaatggaaagataaatatgaagaaagcaggcgggaagtgatggaaatgaggaaaatagtggccgagtatgagaagaccatcgctcagatgatagaggacgaacagagagagaagtcagtctcccaccagacggtgcagcagctggttctggagaaggagcaagccctggccgacctgaactccgtggagaagtctctggccgacctcttcagaagatatgagaagatgaaggaggtcctagaaggcttccgcaagaatgaagaggtgttgaagagatgtgcgcaggagtacctgtcccgggtgaagaaggaggagcagaggtaccaggccctgaaggtgcacgcggaggagaaactggacagggccaatgctgagattgctcaggttcgaggcaaggcccagcaggagcaagccgcccaccaggccagcctgcggaaggagcagctgcgagtggacgccctggaaaggacgctggagcagaagaataaagaaatagaagaactcaccaagatttgtgacgaactgattgccaaaatggggaaaagctaactctgaaccgaatgttttggacttaactgttgcgtgcaatatgaccgtcggcacactgctgttcctccagttccatggacaggttctgttttcactttttcgtatgcactactgtatttcctttctaaataaaattgatttgattgtatgcagtactaaggagactatcagaatttcttgctattggtttgcattttcctagtataattcatagcaagttgacctcagagttcctgtatcagggagattgtctgattctctaataaaagacacattgctgaccttggccttgccctttgtacacaagttcccagggtgagcagcttttggatttaatatgaacatgtacagcgtgcatagggactcttgccttaaggagtgtaaacttgatctgcatttgctgatttgtttttaaaaaaacaagaaatgcatgtttcaaataaaattctctattgtaaataaaattttttctttggatcttg

SEQ ID NO: 192625 - DNA, 9377 bp, Homo sapiens
  Payload ID: 18029
  Gene Name: transforming, acidic coiled-coil containing protein 2
  Uniprot ID: O95359
  ENST ID: ENST00000334433
  CDS Start-End: 47-8893
gtcacctctgacaaaattctggggacgctgggaacactgaatcaacatgggcaatgagaacagcacctcggacaaccagaggactttatcagctcagactccaaggtccgcgcagccacccgggaacagtcagaatataaaaaggaagcagcaggacacgcccggaagccctgaccacagagacgcgtccagcattggcagcgttgggcttggaggcttctgcaccgcttctgagagttctgccagcctggatccatgccttgtgtccccagaggtgactgagccaaggaaggacccacagggagccagggggccagaaggttctttgctgcccagcccaccaccgtcccaggagcgagagcacccctcgtcctccatgccctttgccgagtgtcccccggaaggttgcttggcaagtccagcagcggcacctgaagatggtcctcagactcagtctcccaggagggaacctgccccaaatgccccaggagacatcgcggcggcatttcccgctgagagggacagctctactccataccaagagattgctgccgtccccagtgctggaagagagagacagccgaaggaagaaggacagaagtcctccttctccttctccagtggcatcgaccagtcacctggaatgtcgccagtacccctcagagagccaatgaaggcaccgctgtgtggagagggggaccagcctggtggttttgagtcccaagagaaagaggctgcaggtggctttccccctgcagagtccaggcagggggtggcttctgtgcaagtgacccctgaggcccctgctgcagcccagcagggcacagaaagctcagcggtcttggagaagtcccccctaaaacccatggccccgatcccacaagatccagccccaagagcctcagacagagaaagaggccaaggggaggcgccgcctcagtatttaacagatgacttggaattcctcagggcctgccatctccctaggagcaattcaggggctgccccagaagcagaagtgaatgccgcttcccaggagagctgccagcagccagtgggagcatatctgccgcacgcagagctgccctggggcttgccaagtcctgccctggtgccagaggctgggggctctgggaaggaggctctggacaccattgatgttcagggtcacccacagacagggatgcgaggaaccaagcccaatcaagttgtctgtgtggcagcaggcggccagcccgaagggggtttgcctgtgagccctgaaccttccctgctcactccgactgaggaagcacatccagcttcaagcctcgcttcattcccagctgctcagattcctattgctgtagaagaacctggatcatcatccagggaatcagtttccaaggctgggatgccagtttctgcagatgcagccaaagaggtggtggatgcagggttggtgggactggagaggcaggtgtcagatcttggaagcaagggagagcatccagaaggggaccctggagaggttcctgccccatcaccccaggagaggggagagcacttgaacacggagcaaagccatgaggtccaaccaggagtaccaccccctcctcttcccaaggagcaaagccatgaggtccaaccaggagcaccaccccctcctcttcccaaggcaccaagtgaaagtgccagagggccaccggggccaacggatggagccaaggtccatgaagattccacaagcccagccgtggctaaagaaggaagcagatcacctggtgacagccctggaggaaaggaggaagccccagagccacctgatggtggagacccagggaacctgcaaggagaggactctcaggctttcagcagcaagcgtgatccagaagtaggcaaagatgagctttcaaagccaagcagtgatgcagagagcagagaccatcccagctcacactcagcacagccacccagaaaggggggtgctgggcacacggacgggccccactctcagacagcagaggctgatgcatctggcctaccacacaagctgggtgaggaggaccccgtcctgccccctgtgccagatggagctggtgagcccactgttcccgaaggagccatctgggaggggtcaggattgcagcccaaatgtcctgacacccttcagagcagggaaggattgggaagaatggagtctttcctgactttagaatcagagaaatcagattttccaccaactcctgttgcagaggttgcacccaaagcccaggaaggtgagagcacattggaaataaggaagatgggcagctgtgatggggagggcttgctgacgtccccagatcaaccccgcgggccggcgtgtgatgcgtcgagacaggaatttcatgctggggtgccacatcccccccagggggagaacttggcagcagacctggggctcacggcactcatcctggaccaagatcagcagggaatcccatcctgcccaggggaaggctggataagaggagctgcatccgagtggcccctactatcttctgagaagcatctccagccatcccaggcacaaccagagacatccatctttgacgtgctcaaggagcaggcccagccacctgaaaatgggaaagagacttctccaagccatccaggttttaaggaccagggagcagattcttcccaaatccatgtacctgtggaacctcaggaagataacaacttgcccactcatggaggacaggagcaggctttgggatcagaacttcaaagtcagctccccaaaggcaccctgtctgatactccaacttcatctcccactgacatggtttgggagagttctctgacagaagagtcagaattgtcagcaccaacgagacagaagttgcctgcactaggggagaagcggccagagggagcatgcggtgatggtcagtcctcgagggtctcgcctccagcagcagatgtcttaaaagacttttctcttgcagggaacttcagcagaaaggaaacttgctgcactgggcaggggccaaacaagtctcaacaggcattggctgatgccttggaagaaggcagccagcatgaagaagcatgtcaaaggcatccaggagcttctgaagcagctgatggttgttccccactctggggcttgagtaagagggagatggcaagtggaaacacaggggaggccccaccttgtcagcctgactcagtagctctcctggatgcagttccctgcctgccagccctggcgcccgccagccccggagtcacacccacccaggatgccccagagacagaggcatgtgatgaaacccaggaaggcaggcagcaaccagtgccggccccgcagcagaaaatggagtgctgggccacttcggatgcagagtccccaaagcttcttgcaagtttcccatcagctggggagcaaggtggtgaagccggggctgctgagactggtggcagcgctggtgcaggagacccaggaaagcagcaggctccggagaaacctggagaagctactttgagttgtggcctccttcagactgagcactgccttacctccggggaggaagcttctacctctgccctacgtgagtcctgccaagctgagcaccccatggccagctgccaggatgccttgctgccagccagagagctgggtgggattcccaggagcaccatggatttttctacacaccaggctgtcccagacccaaaggagctcctgctgtctgggccaccagaagtggctgctcctgacaccccttacctgcatgtcgacagtgctgcccagagaggagcagaagacagtggagtgaaagctgtttcctctgcagaccccagagctcctggcgaaagcccctgtcctgtaggggagcccccacttgccttggaaaatgctgcctccttgaagctgtttgctggctccctcgcccccctgttgcaaccaggagctgcaggtggggaaatccctgcagtgcaagccagcagtggtagtcccaaagccagaaccactgagggaccagtggactccatgccatgcctggaccggatgccacttctggccaagggcaagcaggcaacaggggaagagaaagcagcaacagctccaggtgcaggtgccaaggccagtggggagggcatggcaggtgatgcagcaggagagacagagggcagcatggagaggatgggagagccttcccaggacccaaagcagggcacatcaggtggtgtggacacaagctctgagcaaatcgccaccctcactggcttcccagacttcagggagcacatcgccaagatcttcgagaagcctgtgctcggagccctggccacacctggagaaaaggcaggagctgggaggagtgcagtgggtaaagacctcaccaggccattgggcccagagaagcttctagatgggcctccaggagtggatgtcacccttctccctgcacctcctgctcgactccaggtggagaagaagcaacagttggctggagaggctgagatttcccatctggctctgcaagatccagcttcagacaagcttctgggtccagcagggctgacctgggagcggaacttgccaggtgccggtgtggggaaggagatggcaggtgtcccacccacactgagggaagacgagaggccagaggggcctggggcagcctggccaggcctggaaggccaggcttactcacagctggagaggagcaggcaggaattagcttcaggtcttccttcaccagcagctactcaggagctccctgtggagagagctgctgccttccaggtggctccccatagccatggagaagaggccgtggcccaagacagaattccttctggaaagcagcaccaggaaacatctgcctgcgacagtccacatggagaagatggtcccggggactttgctcacacaggggttccaggacatgtgccaaggtccacgtgtgccccttctcctcagagggaggttttgactgtgcctgaggccaacagtgagccctggacccttgacacgcttgggggtgaaaggagacccggagtcactgctggcatcttggaaatgcgaaatgccctgggcaaccagagcacccctgcaccaccaactggagaagtggcagacactcccctggagcctggcaaggtggcaggcgctgctggggaagcagagggtgacatcaccctgagcacagctgagacacaggcatgtgcgtccggtgatctgcctgaagcaggtactacgaggacattctccgttgtggcaggtgacttggtgctgccaggaagctgtcaggacccagcctgctctgacaaggctccggggatggagggtacagctgcccttcatggggacagcccagccaggccccagcaggctaaggagcagccagggcctgagcgccccattccagctggggatgggaaggtgtgcgtctcctcacctccagagcctgacgaaactcacgacccgaagctgcaacatttggctccagaagagctccacactgacagagagagccccaggcctggcccatccatgttaccttcggttcctaagaaggatgctccaagagtcatggataaagtcacttcagatgagaccagaggtgcggaaggaacagaaagttcacctgtggcagatgatatcatccagcccgctgcccccgcagacctggaaagcccaaccttagctgcctcttcctaccacggtgatgttgttggccaggtctctacggatctgatagcccagagcatctccccagctgctgcccatgcgggtcttcctccctcggctgcagaacacatagtttcgccatctgccccagctggtgacagagtagaagcttccactccctcctgcccagatccggccaaggacctcagcaggagttccgattctgaagaggcatttgagaccccggagtcaacgacccctgtcaaagctccgccagctccacccccaccaccccccgaagtcatcccagaacccgaggtcagcacacagccacccccggaagaaccaggatgtggttctgagacagtccctgtccctgatggcccacggagcgactcggtggaaggaagtcccttccgtcccccgtcacactccttctctgccgtcttcgatgaagacaagccgatagccagcagtgggacttacaacttggactttgacaacattgagcttgtggatacctttcagaccttggagcctcgtgcctcagacgctaagaatcaggagggcaaagtgaacacacggaggaagtccacggattccgtccccatctctaagtctacactgtcccggtcgctcagcctgcaagccagtgactttgatggtgcttcttcctcaggcaatcccgaggccgtggcccttgccccagatgcatatagcacgggttccagcagtgcttctagtacccttaagcgaactaaaaaaccgaggccgccttccttaaaaaagaaacagaccaccaagaaacccacagagacccccccagtgaaggagacgcaacaggagccagatgaagagagccttgtccccagtggggagaatctagcatctgagacgaaaacggaatctgccaagacggaaggtcctagcccagccttattggaggagacgccccttgagcccgctgtggggcccaaagctgcctgccctctggactcagagagtgcagaaggggttgtccccccggcttctggaggtggcagagtgcagaactcaccccctgtcgggaggaaaacgctgcctcttaccacggccccggaggcaggggaggtaaccccatcggatagcggggggcaagaggactctccagccaaagggctctccgtaaggctggagtttgactattctgaggacaagagtagttgggacaaccagcaggaaaacccccctcctaccaaaaagataggcaaaaagccagttgccaaaatgcccctgaggaggccaaagatgaaaaagacacccgagaaacttgacaacactcctgcctcacctcccagatcccctgctgaacccaatgacatccccattgctaaaggtacttacacctttgatattgacaagtgggatgaccccaattttaaccctttttcttccacctcaaaaatgcaggagtctcccaaactgccccaacaatcatacaactttgacccagacacctgtgatgagtccgttgacccctttaagacatcctctaagacccccagctcaccttctaaatccccagcctcctttgagatcccagccagtgctatggaagccaatggagtggacggggatgggctaaacaagcccgccaagaagaagaagacgcccctaaagactgacacatttagggtgaaaaagtcgccaaaacggtctcctctctctgatccaccttcccaggaccccaccccagctgctacaccagaaacaccaccagtgatctctgcggtggtccacgccacagatgaggaaaagctggcggtcaccaaccagaagtggacgtgcatgacagtggacctagaggctgacaaacaggactacccgcagccctcggacctgtccacctttgtaaacgagaccaaattcagttcacccactgaggagttggattacagaaactcctatgaaattgaatatatggagaaaattggctcctccttacctcaggacgacgatgccccgaagaagcaggccttgtaccttatgtttgacacttctcaggagagccctgtcaagtcatctcccgtccgcatgtcagagtccccgacgccgtgttcagggtcaagttttgaagagactgaagcccttgtgaacactgctgcgaaaaaccagcatcctgtcccacgaggactggcccctaaccaagagtcacacttgcaggtgccagagaaatcctcccagaaggagctggaggccatgggcttgggcaccccttcagaagcgattgaaattacagctcccgagggctcctttgcctctgctgacgccctcctcagcaggctagctcaccccgtctctctctgtggtgcacttgactatctggagcccgacttagcagaaaagaaccccccactattcgctcagaaactccaggaggagttagagtttgccatcatgcggatagaagccctgaagctggccaggcagattgctttggcttcccgcagccaccaggatgccaagagagaggctgctcacccaacagacgtctccatctccaaaacagccttgtactcccgcatcgggaccgctgaggtggagaaacctgcaggccttctgttccagcagcccgacctggactctgccctccagatcgccagagcagagatcataaccaaggagagagaggtctcagaatggaaagataaatatgaagaaagcaggcgggaagtgatggaaatgaggaaaatagtggccgagtatgagaagaccatcgctcagatgatagaggacgaacagagagagaagtcagtctcccaccagacggtgcagcagctggttctggagaaggagcaagccctggccgacctgaactccgtggagaagtctctggccgacctcttcagaagatatgagaagatgaaggaggtcctagaaggcttccgcaagaatgaagaggtgttgaagagatgtgcgcaggagtacctgtcccgggtgaagaaggaggagcagaggtaccaggccctgaaggtgcacgcggaggagaaactggacagggccaatgctgagattgctcaggttcgaggcaaggcccagcaggagcaagccgcccaccaggccagcctgcggaaggagcagctgcgagtggacgccctggaaaggacgctggagcagaagaataaagaaatagaagaactcaccaagatttgtgacgaactgattgccaaaatggggaaaagctaactctgaaccgaatgttttggacttaactgttgcgtgcaatatgaccgtcggcacactgctgttcctccagttccatggacaggttctgttttcactttttcgtatgcactactgtatttcctttctaaataaaattgatttgattgtatgcagtactaaggagactatcagaatttcttgctattggtttgcattttcctagtataattcatagcaagttgacctcagagttcctgtatcagggagattgtctgattctctaataaaagacacattgctgaccttggccttgccctttgtacacaagttcccagggtgagcagcttttggatttaatatgaacatgtacagcgtgcatagggactcttgccttaaggagtgtaaacttgatctgcatttgctgatttgtttttaaaaaaacaagaaatgcatgtttcaaataaaattctctattgtaaataaaattttttctttggatcttggc

SEQ ID NO: 192626 - DNA, 3815 bp, Homo sapiens
  Payload ID: 18029
  Gene Name: transforming, acidic coiled-coil containing protein 2
  Uniprot ID: O95359
  ENST ID: ENST00000358010
  CDS Start-End: 47-3331
gtcacctctgacaaaattctggggacgctgggaacactgaatcaacatgggcaatgagaacagcacctcggacaaccagaggactttatcagctcagactccaaggtccgcgcagccacccgggaacagtcagaatataaaaaggaagcagcaggacacgcccggaagccctgaccacagagacgcgtccagttcacctgtggcagatgatatcatccagcccgctgcccccgcagacctggaaagcccaaccttagctgcctcttcctaccacggtgatgttgttggccaggtctctacggatctgatagcccagaggagttccgattctgaagaggcatttgagaccccggagtcaacgacccctgtcaaagctccgccagctccacccccaccaccccccgaagtcatcccagaacccgaggtcagcacacagccacccccggaagaaccaggatgtggttctgagacagtccctgtccctgatggcccacggagcgactcggtggaaggaagtcccttccgtcccccgtcacactccttctctgccgtcttcgatgaagacaagccgatagccagcagtgggacttacaacttggactttgacaacattgagcttgtggatacctttcagaccttggagcctcgtgcctcagacgctaagaatcaggagggcaaagtgaacacacggaggaagtccacggattccgtccccatctctaagtctacactgtcccggtcgctcagcctgcaagccagtgactttgatggtgcttcttcctcaggcaatcccgaggccgtggcccttgccccagatgcatatagcacgggttccagcagtgcttctagtacccttaagcgaactaaaaaaccgaggccgccttccttaaaaaagaaacagaccaccaagaaacccacagagacccccccagtgaaggagacgcaacaggagccagatgaagagagccttgtccccagtggggagaatctagcatctgagacgaaaacggaatctgccaagacggaaggtcctagcccagccttattggaggagacgccccttgagcccgctgtggggcccaaagctgcctgccctctggactcagagagtgcagaaggggttgtccccccggcttctggaggtggcagagtgcagaactcaccccctgtcgggaggaaaacgctgcctcttaccacggccccggaggcaggggaggtaaccccatcggatagcggggggcaagaggactctccagccaaagggctctccgtaaggctggagtttgactattctgaggacaagagtagttgggacaaccagcaggaaaacccccctcctaccaaaaagataggcaaaaagccagttgccaaaatgcccctgaggaggccaaagatgaaaaagacacccgagaaacttgacaacactcctgcctcacctcccagatcccctgctgaacccaatgacatccccattgctaaaggtacttacacctttgatattgacaagtgggatgaccccaattttaaccctttttcttccacctcaaaaatgcaggagtctcccaaactgccccaacaatcatacaactttgacccagacacctgtgatgagtccgttgacccctttaagacatcctctaagacccccagctcaccttctaaatccccagcctcctttgagatcccagccagtgctatggaagccaatggagtggacggggatgggctaaacaagcccgccaagaagaagaagacgcccctaaagactgacacatttagggtgaaaaagtcgccaaaacggtctcctctctctgatccaccttcccaggaccccaccccagctgctacaccagaaacaccaccagtgatctctgcggtggtccacgccacagatgaggaaaagctggcggtcaccaaccagaagtggacgtgcatgacagtggacctagaggctgacaaacaggactacccgcagccctcggacctgtccacctttgtaaacgagaccaaattcagttcacccactgaggagttggattacagaaactcctatgaaattgaatatatggagaaaattggctcctccttacctcaggacgacgatgccccgaagaagcaggccttgtaccttatgtttgacacttctcaggagagccctgtcaagtcatctcccgtccgcatgtcagagtccccgacgccgtgttcagggtcaagttttgaagagactgaagcccttgtgaacactgctgcgaaaaaccagcatcctgtcccacgaggactggcccctaaccaagagtcacacttgcaggtgccagagaaatcctcccagaaggagctggaggccatgggcttgggcaccccttcagaagcgattgaaattacagctcccgagggctcctttgcctctgctgacgccctcctcagcaggctagctcaccccgtctctctctgtggtgcacttgactatctggagcccgacttagcagaaaagaaccccccactattcgctcagaaactccaggaggagttagagtttgccatcatgcggatagaagccctgaagctggccaggcagattgctttggcttcccgcagccaccaggatgccaagagagaggctgctcacccaacagacgtctccatctccaaaacagccttgtactcccgcatcgggaccgctgaggtggagaaacctgcaggccttctgttccagcagcccgacctggactctgccctccagatcgccagagcagagatcataaccaaggagagagaggtctcagaatggaaagataaatatgaagaaagcaggcgggaagtgatggaaatgaggaaaatagtggccgagtatgagaagaccatcgctcagatgatagaggacgaacagagagagaagtcagtctcccaccagacggtgcagcagctggttctggagaaggagcaagccctggccgacctgaactccgtggagaagtctctggccgacctcttcagaagatatgagaagatgaaggaggtcctagaaggcttccgcaagaatgaagaggtgttgaagagatgtgcgcaggagtacctgtcccgggtgaagaaggaggagcagaggtaccaggccctgaaggtgcacgcggaggagaaactggacagggccaatgctgagattgctcaggttcgaggcaaggcccagcaggagcaagccgcccaccaggccagcctgcggaaggagcagctgcgagtggacgccctggaaaggacgctggagcagaagaataaagaaatagaagaactcaccaagatttgtgacgaactgattgccaaaatggggaaaagctaactctgaaccgaatgttttggacttaactgttgcgtgcaatatgaccgtcggcacactgctgttcctccagttccatggacaggttctgttttcactttttcgtatgcactactgtatttcctttctaaataaaattgatttgattgtatgcagtactaaggagactatcagaatttcttgctattggtttgcattttcctagtataattcatagcaagttgacctcagagttcctgtatcagggagattgtctgattctctaataaaagacacattgctgaccttggccttgccctttgtacacaagttcccagggtgagcagcttttggatttaatatgaacatgtacagcgtgcatagggactcttgccttaaggagtgtaaacttgatctgcatttgctgatttgtttttaaaaaaacaagaaatgcatgtttcaaataaaattctctattgtaaataaaattttttctttggatcttggc

SEQ ID NO: 192627 - DNA, 3979 bp, Homo sapiens
  Payload ID: 18029
  Gene Name: transforming, acidic coiled-coil containing protein 2
  Uniprot ID: O95359
  ENST ID: ENST00000360561
  CDS Start-End: 500-3490
gcgggcggtcccggcgaggcgggaggggccggggcagagggagggtcttcgcctccccacccccagccccgtttccggagcccgcgatggagctttgtgaagatgcaggcgttggggctgctcggcgatgatgacatcatcgtgtcacacacaggagccggctgccggggggtttaagagaagagcctttcggaccacaccggcgctcacgctcatacccgcacgccccgggcagagccgcgcacgccggccacactcgggcgcgcgccggccacactcgcgcgcacacatacgcggcgctcgccccccggcccccggctcgggccgcgagtcgcagctccctgccgccgctcccgccgccacggatgcccgcagctgctcccctctgcagtgcagcaaccccggccgccggccggctcgccccggctcccggctgcaggaatcgcgccaggacgctggccccgctcgcggctagcttgcacgccagggcacagcgaggatgggagggtcgcagtccctgcagccagccccagccagcgacctgaacctggaggcttccgaggcaatgagttccgattctgaagaggcatttgagaccccggagtcaacgacccctgtcaaagctccgccagctccacccccaccaccccccgaagtcatcccagaacccgaggtcagcacacagccacccccggaagaaccaggatgtggttctgagacagtccctgtccctgatggcccacggagcgactcggtggaaggaagtcccttccgtcccccgtcacactccttctctgccgtcttcgatgaagacaagccgatagccagcagtgggacttacaacttggactttgacaacattgagcttgtggatacctttcagaccttggagcctcgtgcctcagacgctaagaatcaggagggcaaagtgaacacacggaggaagtccacggattccgtccccatctctaagtctacactgtcccggtcgctcagcctgcaagccagtgactttgatggtgcttcttcctcaggcaatcccgaggccgtggcccttgccccagatgcatatagcacgggttccagcagtgcttctagtacccttaagcgaactaaaaaaccgaggccgccttccttaaaaaagaaacagaccaccaagaaacccacagagacccccccagtgaaggagacgcaacaggagccagatgaagagagccttgtccccagtggggagaatctagcatctgagacgaaaacggaatctgccaagacggaaggtcctagcccagccttattggaggagacgccccttgagcccgctgtggggcccaaagctgcctgccctctggactcagagagtgcagaaggggttgtccccccggcttctggaggtggcagagtgcagaactcaccccctgtcgggaggaaaacgctgcctcttaccacggccccggaggcaggggaggtaaccccatcggatagcggggggcaagaggactctccagccaaagggctctccgtaaggctggagtttgactattctgaggacaagagtagttgggacaaccagcaggaaaacccccctcctaccaaaaagataggcaaaaagccagttgccaaaatgcccctgaggaggccaaagatgaaaaagacacccgagaaacttgacaacactcctgcctcacctcccagatcccctgctgaacccaatgacatccccattgctaaaggtacttacacctttgatattgacaagtgggatgaccccaattttaaccctttttcttccacctcaaaaatgcaggagtctcccaaactgccccaacaatcatacaactttgacccagacacctgtgatgagtccgttgacccctttaagacatcctctaagacccccagctcaccttctaaatccccagcctcctttgagatcccagccagtgctatggaagccaatggagtggacggggatgggctaaacaagcccgccaagaagaagaagacgcccctaaagactgacacatttagggtgaaaaagtcgccaaaacggtctcctctctctgatccaccttcccaggaccccaccccagctgctacaccagaaacaccaccagtgatctctgcggtggtccacgccacagatgaggaaaagctggcggtcaccaaccagaagtggacgtgcatgacagtggacctagaggctgacaaacaggactacccgcagccctcggacctgtccacctttgtaaacgagaccaaattcagttcacccactgaggagttggattacagaaactcctatgaaattgaatatatggagaaaattggctcctccttacctcaggacgacgatgccccgaagaagcaggccttgtaccttatgtttgacacttctcaggagagccctgtcaagtcatctcccgtccgcatgtcagagtccccgacgccgtgttcagggtcaagttttgaagagactgaagcccttgtgaacactgctgcgaaaaaccagcatcctgtcccacgaggactggcccctaaccaagagtcacacttgcaggtgccagagaaatcctcccagaaggagctggaggccatgggcttgggcaccccttcagaagcgattgaaattacagctcccgagggctcctttgcctctgctgacgccctcctcagcaggctagctcaccccgtctctctctgtggtgcacttgactatctggagcccgacttagcagaaaagaaccccccactattcgctcagaaactccagagagaggctgctcacccaacagacgtctccatctccaaaacagccttgtactcccgcatcgggaccgctgaggtggagaaacctgcaggccttctgttccagcagcccgacctggactctgccctccagatcgccagagcagagatcataaccaaggagagagaggtctcagaatggaaagataaatatgaagaaagcaggcgggaagtgatggaaatgaggaaaatagtggccgagtatgagaagaccatcgctcagatgatagaggacgaacagagagagaagtcagtctcccaccagacggtgcagcagctggttctggagaaggagcaagccctggccgacctgaactccgtggagaagtctctggccgacctcttcagaagatatgagaagatgaaggaggtcctagaaggcttccgcaagaatgaagaggtgttgaagagatgtgcgcaggagtacctgtcccgggtgaagaaggaggagcagaggtaccaggccctgaaggtgcacgcggaggagaaactggacagggccaatgctgagattgctcaggttcgaggcaaggcccagcaggagcaagccgcccaccaggccagcctgcggaaggagcagctgcgagtggacgccctggaaaggacgctggagcagaagaataaagaaatagaagaactcaccaagatttgtgacgaactgattgccaaaatggggaaaagctaactctgaaccgaatgttttggacttaactgttgcgtgcaatatgaccgtcggcacactgctgttcctccagttccatggacaggttctgttttcactttttcgtatgcactactgtatttcctttctaaataaaattgatttgattgtatgcagtactaaggagactatcagaatttcttgctattggtttgcattttcctagtataattcatagcaagttgacctcagagttcctgtatcagggagattgtctgattctctaataaaagacacattgctgaccttggccttgccctttgtacacaagttcccagggtgagcagcttttggatttaatatgaacatgtacagcgtgcatagggactcttgccttaaggagtgtaaacttgatctgcatttgctgatttgtttttaaaaaaacaagaaatgcatgtttcaaataaaattctctattgtaaataaaattttttctttggatcttggcaataa

SEQ ID NO: 192628 - DNA, 3879 bp, Homo sapiens
  Payload ID: 18029
  Gene Name: transforming, acidic coiled-coil containing protein 2
  ENST ID: ENST00000368999
  CDS Start-End: 336-3452
ccggggggtttaagagaagagcctttcggaccacaccggcgctcacgctcatacccgcacgccccgggcagagccgcgcacgccggccacactcgggcgcgcgccggccacactcgcgcgcacacatacgcggcgctcgccccccggcccccggctcgggccgcgagtcgcagctccctgccgccgctcccgccgccacggatgcccgcagctgctcccctctgcagtgcagcaaccccggccgccggccggctcgccccggctcccggctgcaggaatcgcgccaggacgctggccccgctcgcggctagcttgcacgccagggcacagcgaggatgggagggtcgcagtccctgcagccagccccagccagcgacctgaacctggaggcttccgaggcaatgagttccgattctgaagaggcatttgagaccccggagtcaacgacccctgtcaaagctccgccagctccacccccaccaccccccgaagtcatcccagaacccgaggtcagcacacagccacccccggaagaaccaggatgtggttctgagacagtccctgtccctgatggcccacggagcgactcggtggaaggaagtcccttccgtcccccgtcacactccttctctgccgtcttcgatgaagacaagccgatagccagcagtgggacttacaacttggactttgacaacattgagcttgtggatacctttcagaccttggagcctcgtgcctcagacgctaagaatcaggagggcaaagtgaacacacggaggaagtccacggattccgtccccatctctaagtctacactgtcccggtcgctcagcctgcaagccagtgactttgatggtgcttcttcctcaggcaatcccgaggccgtggcccttgccccagatgcatatagcacgggttccagcagtgcttctagtacccttaagcgaactaaaaaaccgaggccgccttccttaaaaaagaaacagaccaccaagaaacccacagagacccccccagtgaaggagacgcaacaggagccagatgaagagagccttgtccccagtggggagaatctagcatctgagacgaaaacggaatctgccaagacggaaggtcctagcccagccttattggaggagacgccccttgagcccgctgtggggcccaaagctgcctgccctctggactcagagagtgcagaaggggttgtccccccggcttctggaggtggcagagtgcagaactcaccccctgtcgggaggaaaacgctgcctcttaccacggccccggaggcaggggaggtaaccccatcggatagcggggggcaagaggactctccagccaaagggctctccgtaaggctggagtttgactattctgaggacaagagtagttgggacaaccagcaggaaaacccccctcctaccaaaaagataggcaaaaagccagttgccaaaatgcccctgaggaggccaaagatgaaaaagacacccgagaaacttgacaacactcctgcctcacctcccagatcccctgctgaacccaatgacatccccattgctaaaggtacttacacctttgatattgacaagtgggatgaccccaattttaaccctttttcttccacctcaaaaatgcaggagtctcccaaactgccccaacaatcatacaactttgacccagacacctgtgatgagtccgttgacccctttaagacatcctctaagacccccagctcaccttctaaatccccagcctcctttgagatcccagccagtgctatggaagccaatggagtggacggggatgggctaaacaagcccgccaagaagaagaagacgcccctaaagacgatggttgaagatgtgatgtctgtgtgttctctgtttgacacatttagggtgaaaaagtcgccaaaacggtctcctctctctgatccaccttcccaggaccccaccccagctgctacaccagaaacaccaccagtgatctctgcggtggtccacgccacagatgaggaaaagctggcggtcaccaaccagaagtggacgtgcatgacagtggacctagaggctgacaaacaggactacccgcagccctcggacctgtccacctttgtaaacgagaccaaattcagttcacccactgaggagttggattacagaaactcctatgaaattgaatatatggagaaaattggctcctccttacctcaggacgacgatgccccgaagaagcaggccttgtaccttatgtttgacacttctcaggagagccctgtcaagtcatctcccgtccgcatgtcagagtccccgacgccgtgttcagggtcaagttttgaagagactgaagcccttgtgaacactgctgcgaaaaaccagcatcctgtcccacgaggactggcccctaaccaagagtcacacttgcaggtgccagagaaatcctcccagaaggagctggaggccatgggcttgggcaccccttcagaagcgattgaaattacagctcccgagggctcctttgcctctgctgacgccctcctcagcaggctagctcaccccgtctctctctgtggtgcacttgactatctggagcccgacttagcagaaaagaaccccccactattcgctcagaaactccaggaggagttagagtttgccatcatgcggatagaagccctgaagctggccaggcagattgctttggcttcccgcagccaccaggatgccaagagagaggctgctcacccaacagacgtctccatctccaaaacagccttgtactcccgcatcgggaccgctgaggtggagaaacctgcaggccttctgttccagcagcccgacctggactctgccctccagatcgccagagcagagatcataaccaaggagagagaggtctcagaatggaaagataaatatgaagaaagcaggcgggaagtgatggaaatgaggaaaatagtggccgagtatgagaagaccatcgctcagatgatagaggacgaacagagagagaagtcagtctcccaccagacggtgcagcagctggttctggagaaggagcaagccctggccgacctgaactccgtggagaagtctctggccgacctcttcagaagatatgagaagatgaaggaggtcctagaaggcttccgcaagaatgaagaggtgttgaagagatgtgcgcaggagtacctgtcccgggtgaagaaggaggagcagaggtaccaggccctgaaggtgcacgcggaggagaaactggacagggccaatgctgagattgctcaggttcgaggcaaggcccagcaggagcaagccgcccaccaggccagcctgcggaaggagcagctgcgagtggacgccctggaaaggacgctggagcagaagaataaagaaatagaagaactcaccaagatttgtgacgaactgattgccaaaatggggaaaagctaactctgaaccgaatgttttggacttaactgttgcgtgcaatatgaccgtcggcacactgctgttcctccagttccatggacaggttctgttttcactttttcgtatgcactactgtatttcctttctaaataaaattgatttgattgtatgcagtactaaggagactatcagaatttcttgctattggtttgcattttcctagtataattcatagcaagttgacctcagagttcctgtatcagggagattgtctgattctctaataaaagacacattgctgaccttggccttgccctttgtacacaagttcccagggtgagcagcttttggatttaatatgaacatgtacagcgtgcatagggactcttgccttaaggagtgtaaacttgatctgcatttgctgatttgtttttaaaaaaacaagaaa

SEQ ID NO: 192629 - DNA, 3813 bp, Homo sapiens
  Payload ID: 18029
  Gene Name: transforming, acidic coiled-coil containing protein 2
  Uniprot ID: O95359
  ENST ID: ENST00000369000
  CDS Start-End: 1610-3325
ggaaagccctttgcacacatcggcctattgaagcactttgcttgattcagctattctcctctcaggacctgcctggatcatcccagcctgtagaatcctgggtttctgtggcagtttgttcttctggtatcacctgctatgctctgaatgtttgtatccctctcagccccgaaattcctgtgttgaaatcctaacccctaaggtgatggtatgaggaggtggggccttcgggaggtgattaggccataagggtggagcctttgtgaatgggattagtgcccttataaaaagaggccccacagcactgccttgcctcttctgccacgtgaagatgcagtgagaaggagctgtctgtgaactaggaaggggtcctcatgagacactgaacctgctggtgccttgatcttggacttcccagcctccagaactttcacctgtggcagatgatatcatccagcccgctgcccccgcagacctggaaagcccaaccttagctgcctcttcctaccacggtgatgttgttggccaggtctctacggatctgatagcccagaggagttccgattctgaagaggcatttgagaccccggagtcaacgacccctgtcaaagctccgccagctccacccccaccaccccccgaagtcatcccagaacccgaggtcagcacacagccacccccggaagaaccaggatgtggttctgagacagtccctgtccctgatggcccacggagcgactcggtggaaggaagtcccttccgtcccccgtcacactccttctctgccgtcttcgatgaagacaagccgatagccagcagtgggacttacaacttggactttgacaacattgagcttgtggatacctttcagaccttggagcctcgtgcctcagacgctaagaatcaggagggcaaagtgaacacacggaggaagtccacggattccgtccccatctctaagtctacactgtcccggtcgctcagcctgcaagccagtgactttgatggtgcttcttcctcaggcaatcccgaggccgtggcccttgccccagatgcatatagcacgggttccagcagtgcttctagtacccttaagcgaactaaaaaaccgaggccgccttccttaaaaaagaaacagaccaccaagaaacccacagagacccccccagtgaaggagacgcaacaggagccagatgaagagagccttgtccccagtggggagaatctagcatctgagacgaaaacggaatctgccaagacggaaggtcctagcccagccttattggaggagacgccccttgagcccgctgtggggcccaaagctgcctgccctctggactcagagagtgcagaaggggttgtccccccggcttctggaggtggcagagtgcagaactcaccccctgtcgggaggaaaacgctgcctcttaccacggccccggaggcaggggaggtaaccccatcggatagcggggggcaagaggactctccagccaaagggctctccgtaaggctggagtttgactattctgaggacaagagtagttgggacaaccagcaggaaaacccccctcctaccaaaaagataggcaaaaagccagttgccaaaatgcccctgaggaggccaaagatgaaaaagacacccgagaaacttgacaacactcctgcctcacctcccagatcccctgctgaacccaatgacatccccattgctaaaggtacttacacctttgatattgacaagtgggatgaccccaattttaaccctttttcttccacctcaaaaatgcaggagtctcccaaactgccccaacaatcatacaactttgacccagacacctgtgatgagtccgttgacccctttaagacatcctctaagacccccagctcaccttctaaatccccagcctcctttgagatcccagccagtgctatggaagccaatggagtggacggggatgggctaaacaagcccgccaagaagaagaagacgcccctaaagacggtgaaaaagtcgccaaaacggtctcctctctctgatccaccttcccaggaccccaccccagctgctacaccagaaacaccaccagtgatctctgcggtggtccacgccacagatgaggaaaagctggcggtcaccaaccagaagtggacgtgcatgacagtggacctagaggctgacaaacaggactacccgcagccctcggacctgtccacctttgtaaacgagaccaaattcagttcacccactgaggagttggattacagaaactcctatgaaattgaatatatggagaaaattggctcctccttacctcaggacgacgatgccccgaagaagcaggccttgtaccttatgtttgacacttctcaggagagccctgtcaagtcatctcccgtccgcatgtcagagtccccgacgccgtgttcagggtcaagttttgaagagactgaagcccttgtgaacactgctgcgaaaaaccagcatcctgtcccacgaggactggcccctaaccaagagtcacacttgcaggtgccagagaaatcctcccagaaggagctggaggccatgggcttgggcaccccttcagaagcgattgaaattagagaggctgctcacccaacagacgtctccatctccaaaacagccttgtactcccgcatcgggaccgctgaggtggagaaacctgcaggccttctgttccagcagcccgacctggactctgccctccagatcgccagagcagagatcataaccaaggagagagaggtctcagaatggaaagataaatatgaagaaagcaggcgggaagtgatggaaatgaggaaaatagtggccgagtatgagaagaccatcgctcagatgatagaggacgaacagagagagaagtcagtctcccaccagacggtgcagcagctggttctggagaaggagcaagccctggccgacctgaactccgtggagaagtctctggccgacctcttcagaagatatgagaagatgaaggaggtcctagaaggcttccgcaagaatgaagaggtgttgaagagatgtgcgcaggagtacctgtcccgggtgaagaaggaggagcagaggtaccaggccctgaaggtgcacgcggaggagaaactggacagggccaatgctgagattgctcaggttcgaggcaaggcccagcaggagcaagccgcccaccaggccagcctgcggaaggagcagctgcgagtggacgccctggaaaggacgctggagcagaagaataaagaaatagaagaactcaccaagatttgtgacgaactgattgccaaaatggggaaaagctaactctgaaccgaatgttttggacttaactgttgcgtgcaatatgaccgtcggcacactgctgttcctccagttccatggacaggttctgttttcactttttcgtatgcactactgtatttcctttctaaataaaattgatttgattgtatgcagtactaaggagactatcagaatttcttgctattggtttgcattttcctagtataattcatagcaagttgacctcagagttcctgtatcagggagattgtctgattctctaataaaagacacattgctgaccttggccttgccctttgtacacaagttcccagggtgagcagcttttggatttaatatgaacatgtacagcgtgcatagggactcttgccttaaggagtgtaaacttgatctgcatttgctgatttgtttttaaaaaaacaagaaatgcatgtttcaaataaaattctctattgtaaataaaattttttctttggatcttggcaata

SEQ ID NO: 192630 - DNA, 3685 bp, Homo sapiens
  Payload ID: 18029
  Gene Name: transforming, acidic coiled-coil containing protein 2
  ENST ID: ENST00000369001
  CDS Start-End: 1472-3199
gcctttcggggagccacgccggccctgcgccgttgtcccgggaaactttgcgtcccagggccgcaccggaccgtggtgaccccacgcgccgcgccgccaccgggctcggaaaacccagcgcccccgggctctttggcagttgcgactccgaacgaaggcggctccgtgcgggccatcccctatctccccgggcggttcacctgtggcagatgatatcatccagcccgctgcccccgcagacctggaaagcccaaccttagctgcctcttcctaccacggtgatgttgttggccaggtctctacggatctgatagcccagaggagttccgattctgaagaggcatttgagaccccggagtcaacgacccctgtcaaagctccgccagctccacccccaccaccccccgaagtcatcccagaacccgaggtcagcacacagccacccccggaagaaccagtagagactgggtttcaccatgatgaccaggctggtctcaaactcctgacctcaagtgatctgcctgcctcggcctcccaaagtgctgggattacaggatgtggttctgagacagtccctgtccctgatggcccacggagcgactcggtggaaggaagtcccttccgtcccccgtcacactccttctctgccgtcttcgatgaagacaagccgatagccagcagtgggacttacaacttggactttgacaacattgagcttgtggatacctttcagaccttggagcctcgtgcctcagacgctaagaatcaggagggcaaagtgaacacacggaggaagtccacggattccgtccccatctctaagtctacactgtcccggtcgctcagcctgcaagccagtgactttgatggtgcttcttcctcaggcaatcccgaggccgtggcccttgccccagatgcatatagcacgggttccagcagtgcttctagtacccttaagcgaactaaaaaaccgaggccgccttccttaaaaaagaaacagaccaccaagaaacccacagagacccccccagtgaaggagacgcaacaggagccagatgaagagagccttgtccccagtggggagaatctagcatctgagacgaaaacggaatctgccaagacggaaggtcctagcccagccttattggaggagacgccccttgagcccgctgtggggcccaaagctgcctgccctctggactcagagagtgcagaaggggttgtccccccggcttctggaggtggcagagtgcagaactcaccccctgtcgggaggaaaacgctgcctcttaccacggccccggaggcaggggaggtaaccccatcggatagcggggggcaagaggactctccagccaaagggctctccgtaaggctggagtttgactattctgaggacaagagtagttgggacaaccagcaggaaaacccccctcctaccaaaaagataggcaaaaagccagttgccaaaatgcccctgaggaggccaaagatgaaaaagacacccgagaaacttgacaacactcctgcctcacctcccagatcccctgctgaacccaatgacatccccattgctaaaggtacttacacctttgatattgacaagtgggatgaccccaattttaaccctttttcttccacctcaaaaatgcaggagtctcccaaactgccccaacaatcatacaactttgacccagacacctgtgatgagtccgttgacccctttaagacatcctctaagacccccagctcaccttctaaatccccagcctcctttgagatcccagccagtgctatggaagccaatggagtggacggggatgggctaaacaagcccgccaagaagaagaagacgcccctaaagactgacacatttagggtgaaaaagtcgccaaaacggtctcctctctctgatccaccttcccaggaccccaccccagctgctacaccagaaacaccaccagtgatctctgcggtggtccacgccacagatgaggaaaagctggcggtcaccaaccagaagtggacgtgcatgacagtggacctagaggctgacaaacaggactacccgcagccctcggacctgtccacctttgtaaacgagaccaaattcagttcacccactgaggagttggattacagaaactcctatgaaattgaatatatggagaaaattggctcctccttacctcaggacgacgatgccccgaagaagcaggccttgtaccttatgtttgacacttctcaggagagccctgtcaagtcatctcccgtccgcatgtcagagtccccgacgccgtgttcagggtcaagttttgaagagactgaagcccttgtgaacactgctgcgaaaaaccagcatcctgtcccacgaggactggcccctaaccaagagtcacacttgcaggtgccagagaaatcctcccagaaggagctggaggccatgggcttgggcaccccttcagaagcgattgaaattagagaggctgctcacccaacagacgtctccatctccaaaacagccttgtactcccgcatcgggaccgctgaggtggagaaacctgcaggccttctgttccagcagcccgacctggactctgccctccagatcgccagagcagagatcataaccaaggagagagaggtctcagaatggaaagataaatatgaagaaagcaggcgggaagtgatggaaatgaggaaaatagtggccgagtatgagaagaccatcgctcagatgatagaggacgaacagagagagaagtcagtctcccaccagacggtgcagcagctggttctggagaaggagcaagccctggccgacctgaactccgtggagaagtctctggccgacctcttcagaagatatgagaagatgaaggaggtcctagaaggcttccgcaagaatgaagaggtgttgaagagatgtgcgcaggagtacctgtcccgggtgaagaaggaggagcagaggtaccaggccctgaaggtgcacgcggaggagaaactggacagggccaatgctgagattgctcaggttcgaggcaaggcccagcaggagcaagccgcccaccaggccagcctgcggaaggagcagctgcgagtggacgccctggaaaggacgctggagcagaagaataaagaaatagaagaactcaccaagatttgtgacgaactgattgccaaaatggggaaaagctaactctgaaccgaatgttttggacttaactgttgcgtgcaatatgaccgtcggcacactgctgttcctccagttccatggacaggttctgttttcactttttcgtatgcactactgtatttcctttctaaataaaattgatttgattgtatgcagtactaaggagactatcagaatttcttgctattggtttgcattttcctagtataattcatagcaagttgacctcagagttcctgtatcagggagattgtctgattctctaataaaagacacattgctgaccttggccttgccctttgtacacaagttcccagggtgagcagcttttggatttaatatgaacatgtacagcgtgcatagggactcttgccttaaggagtgtaaacttgatctgcatttgctgatttgtttttaaaaaaacaagaaatgcatgtttcaaataaaattctctattgtaaataaaattttttctttggatcttggcaa

SEQ ID NO: 192631 - DNA, 9673 bp, Homo sapiens
  Payload ID: 18029
  Gene Name: transforming, acidic coiled-coil containing protein 2
  Uniprot ID: O95359
  ENST ID: ENST00000369005
  CDS Start-End: 341-9187
caggagagaagaaacgcaaatcccagaaccgtgccaacatataaaaccccacattaagggttgtacagtgcactgggatttctcaagtcacccgcttggtcctcttccaagtatactttacttcctttcattcctctctaaaacttttttaaaaactttcactcctgctctaaaagttatcttggtttcttactctaccttatgccccttgggcgaattttttcctctgaggagggaagaatagagttgctgctgcagacacatcagattccctactggtaacagctggagtgcgtcacctctgacaaaattctggggacgctgggaacactgaatcaacatgggcaatgagaacagcacctcggacaaccagaggactttatcagctcagactccaaggtccgcgcagccacccgggaacagtcagaatataaaaaggaagcagcaggacacgcccggaagccctgaccacagagacgcgtccagcattggcagcgttgggcttggaggcttctgcaccgcttctgagagttctgccagcctggatccatgccttgtgtccccagaggtgactgagccaaggaaggacccacagggagccagggggccagaaggttctttgctgcccagcccaccaccgtcccaggagcgagagcacccctcgtcctccatgccctttgccgagtgtcccccggaaggttgcttggcaagtccagcagcggcacctgaagatggtcctcagactcagtctcccaggagggaacctgccccaaatgccccaggagacatcgcggcggcatttcccgctgagagggacagctctactccataccaagagattgctgccgtccccagtgctggaagagagagacagccgaaggaagaaggacagaagtcctccttctccttctccagtggcatcgaccagtcacctggaatgtcgccagtacccctcagagagccaatgaaggcaccgctgtgtggagagggggaccagcctggtggttttgagtcccaagagaaagaggctgcaggtggctttccccctgcagagtccaggcagggggtggcttctgtgcaagtgacccctgaggcccctgctgcagcccagcagggcacagaaagctcagcggtcttggagaagtcccccctaaaacccatggccccgatcccacaagatccagccccaagagcctcagacagagaaagaggccaaggggaggcgccgcctcagtatttaacagatgacttggaattcctcagggcctgccatctccctaggagcaattcaggggctgccccagaagcagaagtgaatgccgcttcccaggagagctgccagcagccagtgggagcatatctgccgcacgcagagctgccctggggcttgccaagtcctgccctggtgccagaggctgggggctctgggaaggaggctctggacaccattgatgttcagggtcacccacagacagggatgcgaggaaccaagcccaatcaagttgtctgtgtggcagcaggcggccagcccgaagggggtttgcctgtgagccctgaaccttccctgctcactccgactgaggaagcacatccagcttcaagcctcgcttcattcccagctgctcagattcctattgctgtagaagaacctggatcatcatccagggaatcagtttccaaggctgggatgccagtttctgcagatgcagccaaagaggtggtggatgcagggttggtgggactggagaggcaggtgtcagatcttggaagcaagggagagcatccagaaggggaccctggagaggttcctgccccatcaccccaggagaggggagagcacttgaacacggagcaaagccatgaggtccaaccaggagtaccaccccctcctcttcccaaggagcaaagccatgaggtccaaccaggagcaccaccccctcctcttcccaaggcaccaagtgaaagtgccagagggccaccggggccaacggatggagccaaggtccatgaagattccacaagcccagccgtggctaaagaaggaagcagatcacctggtgacagccctggaggaaaggaggaagccccagagccacctgatggtggagacccagggaacctgcaaggagaggactctcaggctttcagcagcaagcgtgatccagaagtaggcaaagatgagctttcaaagccaagcagtgatgcagagagcagagaccatcccagctcacactcagcacagccacccagaaaggggggtgctgggcacacggacgggccccactctcagacagcagaggctgatgcatctggcctaccacacaagctgggtgaggaggaccccgtcctgccccctgtgccagatggagctggtgagcccactgttcccgaaggagccatctgggaggggtcaggattgcagcccaaatgtcctgacacccttcagagcagggaaggattgggaagaatggagtctttcctgactttagaatcagagaaatcagattttccaccaactcctgttgcagaggttgcacccaaagcccaggaaggtgagagcacattggaaataaggaagatgggcagctgtgatggggagggcttgctgacgtccccagatcaaccccgcgggccggcgtgtgatgcgtcgagacaggaatttcatgctggggtgccacatcccccccagggggagaacttggcagcagacctggggctcacggcactcatcctggaccaagatcagcagggaatcccatcctgcccaggggaaggctggataagaggagctgcatccgagtggcccctactatcttctgagaagcatctccagccatcccaggcacaaccagagacatccatctttgacgtgctcaaggagcaggcccagccacctgaaaatgggaaagagacttctccaagccatccaggttttaaggaccagggagcagattcttcccaaatccatgtacctgtggaacctcaggaagataacaacttgcccactcatggaggacaggagcaggctttgggatcagaacttcaaagtcagctccccaaaggcaccctgtctgatactccaacttcatctcccactgacatggtttgggagagttctctgacagaagagtcagaattgtcagcaccaacgagacagaagttgcctgcactaggggagaagcggccagagggagcatgcggtgatggtcagtcctcgagggtctcgcctccagcagcagatgtcttaaaagacttttctcttgcagggaacttcagcagaaaggaaacttgctgcactgggcaggggccaaacaagtctcaacaggcattggctgatgccttggaagaaggcagccagcatgaagaagcatgtcaaaggcatccaggagcttctgaagcagctgatggttgttccccactctggggcttgagtaagagggagatggcaagtggaaacacaggggaggccccaccttgtcagcctgactcagtagctctcctggatgcagttccctgcctgccagccctggcgcccgccagccccggagtcacacccacccaggatgccccagagacagaggcatgtgatgaaacccaggaaggcaggcagcaaccagtgccggccccgcagcagaaaatggagtgctgggccacttcggatgcagagtccccaaagcttcttgcaagtttcccatcagctggggagcaaggtggtgaagccggggctgctgagactggtggcagcgctggtgcaggagacccaggaaagcagcaggctccggagaaacctggagaagctactttgagttgtggcctccttcagactgagcactgccttacctccggggaggaagcttctacctctgccctacgtgagtcctgccaagctgagcaccccatggccagctgccaggatgccttgctgccagccagagagctgggtgggattcccaggagcaccatggatttttctacacaccaggctgtcccagacccaaaggagctcctgctgtctgggccaccagaagtggctgctcctgacaccccttacctgcatgtcgacagtgctgcccagagaggagcagaagacagtggagtgaaagctgtttcctctgcagaccccagagctcctggcgaaagcccctgtcctgtaggggagcccccacttgccttggaaaatgctgcctccttgaagctgtttgctggctccctcgcccccctgttgcaaccaggagctgcaggtggggaaatccctgcagtgcaagccagcagtggtagtcccaaagccagaaccactgagggaccagtggactccatgccatgcctggaccggatgccacttctggccaagggcaagcaggcaacaggggaagagaaagcagcaacagctccaggtgcaggtgccaaggccagtggggagggcatggcaggtgatgcagcaggagagacagagggcagcatggagaggatgggagagccttcccaggacccaaagcagggcacatcaggtggtgtggacacaagctctgagcaaatcgccaccctcactggcttcccagacttcagggagcacatcgccaagatcttcgagaagcctgtgctcggagccctggccacacctggagaaaaggcaggagctgggaggagtgcagtgggtaaagacctcaccaggccattgggcccagagaagcttctagatgggcctccaggagtggatgtcacccttctccctgcacctcctgctcgactccaggtggagaagaagcaacagttggctggagaggctgagatttcccatctggctctgcaagatccagcttcagacaagcttctgggtccagcagggctgacctgggagcggaacttgccaggtgccggtgtggggaaggagatggcaggtgtcccacccacactgagggaagacgagaggccagaggggcctggggcagcctggccaggcctggaaggccaggcttactcacagctggagaggagcaggcaggaattagcttcaggtcttccttcaccagcagctactcaggagctccctgtggagagagctgctgccttccaggtggctccccatagccatggagaagaggccgtggcccaagacagaattccttctggaaagcagcaccaggaaacatctgcctgcgacagtccacatggagaagatggtcccggggactttgctcacacaggggttccaggacatgtgccaaggtccacgtgtgccccttctcctcagagggaggttttgactgtgcctgaggccaacagtgagccctggacccttgacacgcttgggggtgaaaggagacccggagtcactgctggcatcttggaaatgcgaaatgccctgggcaaccagagcacccctgcaccaccaactggagaagtggcagacactcccctggagcctggcaaggtggcaggcgctgctggggaagcagagggtgacatcaccctgagcacagctgagacacaggcatgtgcgtccggtgatctgcctgaagcaggtactacgaggacattctccgttgtggcaggtgacttggtgctgccaggaagctgtcaggacccagcctgctctgacaaggctccggggatggagggtacagctgcccttcatggggacagcccagccaggccccagcaggctaaggagcagccagggcctgagcgccccattccagctggggatgggaaggtgtgcgtctcctcacctccagagcctgacgaaactcacgacccgaagctgcaacatttggctccagaagagctccacactgacagagagagccccaggcctggcccatccatgttaccttcggttcctaagaaggatgctccaagagtcatggataaagtcacttcagatgagaccagaggtgcggaaggaacagaaagttcacctgtggcagatgatatcatccagcccgctgcccccgcagacctggaaagcccaaccttagctgcctcttcctaccacggtgatgttgttggccaggtctctacggatctgatagcccagagcatctccccagctgctgcccatgcgggtcttcctccctcggctgcagaacacatagtttcgccatctgccccagctggtgacagagtagaagcttccactccctcctgcccagatccggccaaggacctcagcaggagttccgattctgaagaggcatttgagaccccggagtcaacgacccctgtcaaagctccgccagctccacccccaccaccccccgaagtcatcccagaacccgaggtcagcacacagccacccccggaagaaccaggatgtggttctgagacagtccctgtccctgatggcccacggagcgactcggtggaaggaagtcccttccgtcccccgtcacactccttctctgccgtcttcgatgaagacaagccgatagccagcagtgggacttacaacttggactttgacaacattgagcttgtggatacctttcagaccttggagcctcgtgcctcagacgctaagaatcaggagggcaaagtgaacacacggaggaagtccacggattccgtccccatctctaagtctacactgtcccggtcgctcagcctgcaagccagtgactttgatggtgcttcttcctcaggcaatcccgaggccgtggcccttgccccagatgcatatagcacgggttccagcagtgcttctagtacccttaagcgaactaaaaaaccgaggccgccttccttaaaaaagaaacagaccaccaagaaacccacagagacccccccagtgaaggagacgcaacaggagccagatgaagagagccttgtccccagtggggagaatctagcatctgagacgaaaacggaatctgccaagacggaaggtcctagcccagccttattggaggagacgccccttgagcccgctgtggggcccaaagctgcctgccctctggactcagagagtgcagaaggggttgtccccccggcttctggaggtggcagagtgcagaactcaccccctgtcgggaggaaaacgctgcctcttaccacggccccggaggcaggggaggtaaccccatcggatagcggggggcaagaggactctccagccaaagggctctccgtaaggctggagtttgactattctgaggacaagagtagttgggacaaccagcaggaaaacccccctcctaccaaaaagataggcaaaaagccagttgccaaaatgcccctgaggaggccaaagatgaaaaagacacccgagaaacttgacaacactcctgcctcacctcccagatcccctgctgaacccaatgacatccccattgctaaaggtacttacacctttgatattgacaagtgggatgaccccaattttaaccctttttcttccacctcaaaaatgcaggagtctcccaaactgccccaacaatcatacaactttgacccagacacctgtgatgagtccgttgacccctttaagacatcctctaagacccccagctcaccttctaaatccccagcctcctttgagatcccagccagtgctatggaagccaatggagtggacggggatgggctaaacaagcccgccaagaagaagaagacgcccctaaagactgacacatttagggtgaaaaagtcgccaaaacggtctcctctctctgatccaccttcccaggaccccaccccagctgctacaccagaaacaccaccagtgatctctgcggtggtccacgccacagatgaggaaaagctggcggtcaccaaccagaagtggacgtgcatgacagtggacctagaggctgacaaacaggactacccgcagccctcggacctgtccacctttgtaaacgagaccaaattcagttcacccactgaggagttggattacagaaactcctatgaaattgaatatatggagaaaattggctcctccttacctcaggacgacgatgccccgaagaagcaggccttgtaccttatgtttgacacttctcaggagagccctgtcaagtcatctcccgtccgcatgtcagagtccccgacgccgtgttcagggtcaagttttgaagagactgaagcccttgtgaacactgctgcgaaaaaccagcatcctgtcccacgaggactggcccctaaccaagagtcacacttgcaggtgccagagaaatcctcccagaaggagctggaggccatgggcttgggcaccccttcagaagcgattgaaattacagctcccgagggctcctttgcctctgctgacgccctcctcagcaggctagctcaccccgtctctctctgtggtgcacttgactatctggagcccgacttagcagaaaagaaccccccactattcgctcagaaactccaggaggagttagagtttgccatcatgcggatagaagccctgaagctggccaggcagattgctttggcttcccgcagccaccaggatgccaagagagaggctgctcacccaacagacgtctccatctccaaaacagccttgtactcccgcatcgggaccgctgaggtggagaaacctgcaggccttctgttccagcagcccgacctggactctgccctccagatcgccagagcagagatcataaccaaggagagagaggtctcagaatggaaagataaatatgaagaaagcaggcgggaagtgatggaaatgaggaaaatagtggccgagtatgagaagaccatcgctcagatgatagaggacgaacagagagagaagtcagtctcccaccagacggtgcagcagctggttctggagaaggagcaagccctggccgacctgaactccgtggagaagtctctggccgacctcttcagaagatatgagaagatgaaggaggtcctagaaggcttccgcaagaatgaagaggtgttgaagagatgtgcgcaggagtacctgtcccgggtgaagaaggaggagcagaggtaccaggccctgaaggtgcacgcggaggagaaactggacagggccaatgctgagattgctcaggttcgaggcaaggcccagcaggagcaagccgcccaccaggccagcctgcggaaggagcagctgcgagtggacgccctggaaaggacgctggagcagaagaataaagaaatagaagaactcaccaagatttgtgacgaactgattgccaaaatggggaaaagctaactctgaaccgaatgttttggacttaactgttgcgtgcaatatgaccgtcggcacactgctgttcctccagttccatggacaggttctgttttcactttttcgtatgcactactgtatttcctttctaaataaaattgatttgattgtatgcagtactaaggagactatcagaatttcttgctattggtttgcattttcctagtataattcatagcaagttgacctcagagttcctgtatcagggagattgtctgattctctaataaaagacacattgctgaccttggccttgccctttgtacacaagttcccagggtgagcagcttttggatttaatatgaacatgtacagcgtgcatagggactcttgccttaaggagtgtaaacttgatctgcatttgctgatttgtttttaaaaaaacaagaaatgcatgtttcaaataaaattctctattgtaaataaaattttttctttggatcttggcaa

SEQ ID NO: 192632 - DNA, 9158 bp, Homo sapiens
  Payload ID: 18029
  Gene Name: transforming, acidic coiled-coil containing protein 2
  ENST ID: ENST00000453444
  CDS Start-End: 47-8674
gtcacctctgacaaaattctggggacgctgggaacactgaatcaacatgggcaatgagaacagcacctcggacaaccagaggactttatcagctcagactccaaggtccgcgcagccacccgggaacagtcagaatataaaaaggaagcagcaggacacgcccggaagccctgaccacagagacgcgtccagcattggcagcgttgggcttggaggcttctgcaccgcttctgagagttctgccagcctggatccatgccttgtgtccccagaggtgactgagccaaggaaggacccacagggagccagggggccagaaggttctttgctgcccagcccaccaccgtcccaggagcgagagcacccctcgtcctccatgccctttgccgagtgtcccccggaaggttgcttggcaagtccagcagcggcacctgaagatggtcctcagactcagtctcccaggagggaacctgccccaaatgccccaggagacatcgcggcggcatttcccgctgagagggacagctctactccataccaagagattgctgccgtccccagtgctggaagagagagacagccgaaggaagaaggacagaagtcctccttctccttctccagtggcatcgaccagtcacctggaatgtcgccagtacccctcagagagccaatgaaggcaccgctgtgtggagagggggaccagcctggtggttttgagtcccaagagaaagaggctgcaggtggctttccccctgcagagtccaggcagggggtggcttctgtgcaagtgacccctgaggcccctgctgcagcccagcagggcacagaaagctcagcggtcttggagaagtcccccctaaaacccatggccccgatcccacaagatccagccccaagagcctcagacagagaaagaggccaaggggaggcgccgcctcagtatttaacagatgacttggaattcctcagggcctgccatctccctaggagcaattcaggggctgccccagaagcagaagtgaatgccgcttcccaggagagctgccagcagccagtgggagcatatctgccgcacgcagagctgccctggggcttgccaagtcctgccctggtgccagaggctgggggctctgggaaggaggctctggacaccattgatgttcagggtcacccacagacagggatgcgaggaaccaagcccaatcaagttgtctgtgtggcagcaggcggccagcccgaagggggtttgcctgtgagccctgaaccttccctgctcactccgactgaggaagcacatccagcttcaagcctcgcttcattcccagctgctcagattcctattgctgtagaagaacctggatcatcatccagggaatcagtttccaaggctgggatgccagtttctgcagatgcagccaaagaggtggtggatgcagggttggtgggactggagaggcaggtgtcagatcttggaagcaagggagagcatccagaaggggaccctggagaggttcctgccccatcaccccaggagaggggagagcacttgaacacggagcaaagccatgaggtccaaccaggagtaccaccccctcctcttcccaaggagcaaagccatgaggtccaaccaggagcaccaccccctcctcttcccaaggcaccaagtgaaagtgccagagggccaccggggccaacggatggagccaaggtccatgaagattccacaagcccagccgtggctaaagaaggaagcagatcacctggtgacagccctggaggaaaggaggaagccccagagccacctgatggtggagacccagggaacctgcaaggagaggactctcaggctttcagcagcaagcgtgatccagaagtaggcaaagatgagctttcaaagccaagcagtgatgcagagagcagagaccatcccagctcacactcagcacagccacccagaaaggggggtgctgggcacacggacgggccccactctcagacagcagaggctgatgcatctggcctaccacacaagctgggtgaggaggaccccgtcctgccccctgtgccagatggagctggtgagcccactgttcccgaaggagccatctgggaggggtcaggattgcagcccaaatgtcctgacacccttcagagcagggaaggattgggaagaatggagtctttcctgactttagaatcagagaaatcagattttccaccaactcctgttgcagaggttgcacccaaagcccaggaaggtgagagcacattggaaataaggaagatgggcagctgtgatggggagggcttgctgacgtccccagatcaaccccgcgggccggcgtgtgatgcgtcgagacaggaatttcatgctggggtgccacatcccccccagggggagaacttggcagcagacctggggctcacggcactcatcctggaccaagatcagcagggaatcccatcctgcccaggggaaggctggataagaggagctgcatccgagtggcccctactatcttctgagaagcatctccagccatcccaggcacaaccagagacatccatctttgacgtgctcaaggagcaggcccagccacctgaaaatgggaaagagacttctccaagccatccaggttttaaggaccagggagcagattcttcccaaatccatgtacctgtggaacctcaggaagataacaacttgcccactcatggaggacaggagcaggctttgggatcagaacttcaaagtcagctccccaaaggcaccctgtctgatactccaacttcatctcccactgacatggtttgggagagttctctgacagaagagtcagaattgtcagcaccaacgagacagaagttgcctgcactaggggagaagcggccagagggagcatgcggtgatggtcagtcctcgagggtctcgcctccagcagcagatgtcttaaaagacttttctcttgcagggaacttcagcagaaaggaaacttgctgcactgggcaggggccaaacaagtctcaacaggcattggctgatgccttggaagaaggcagccagcatgaagaagcatgtcaaaggcatccaggagcttctgaagcagctgatggttgttccccactctggggcttgagtaagagggagatggcaagtggaaacacaggggaggccccaccttgtcagcctgactcagtagctctcctggatgcagttccctgcctgccagccctggcgcccgccagccccggagtcacacccacccaggatgccccagagacagaggcatgtgatgaaacccaggaaggcaggcagcaaccagtgccggccccgcagcagaaaatggagtgctgggccacttcggatgcagagtccccaaagcttcttgcaagtttcccatcagctggggagcaaggtggtgaagccggggctgctgagactggtggcagcgctggtgcaggagacccaggaaagcagcaggctccggagaaacctggagaagctactttgagttgtggcctccttcagactgagcactgccttacctccggggaggaagcttctacctctgccctacgtgagtcctgccaagctgagcaccccatggccagctgccaggatgccttgctgccagccagagagctgggtgggattcccaggagcaccatggatttttctacacaccaggctgtcccagacccaaaggagctcctgctgtctgggccaccagaagtggctgctcctgacaccccttacctgcatgtcgacagtgctgcccagagaggagcagaagacagtggagtgaaagctgtttcctctgcagaccccagagctcctggcgaaagcccctgtcctgtaggggagcccccacttgccttggaaaatgctgcctccttgaagctgtttgctggctccctcgcccccctgttgcaaccaggagctgcaggtggggaaatccctgcagtgcaagccagcagtggtagtcccaaagccagaaccactgagggaccagtggactccatgccatgcctggaccggatgccacttctggccaagggcaagcaggcaacaggggaagagaaagcagcaacagctccaggtgcaggtgccaaggccagtggggagggcatggcaggtgatgcagcaggagagacagagggcagcatggagaggatgggagagccttcccaggacccaaagcagggcacatcaggtggtgtggacacaagctctgagcaaatcgccaccctcactggcttcccagacttcagggagcacatcgccaagatcttcgagaagcctgtgctcggagccctggccacacctggagaaaaggcaggagctgggaggagtgcagtgggtaaagacctcaccaggccattgggcccagagaagcttctagatgggcctccaggagtggatgtcacccttctccctgcacctcctgctcgactccaggtggagaagaagcaacagttggctggagaggctgagatttcccatctggctctgcaagatccagcttcagacaagcttctgggtccagcagggctgacctgggagcggaacttgccaggtgccggtgtggggaaggagatggcaggtgtcccacccacactgagggaagacgagaggccagaggggcctggggcagcctggccaggcctggaaggccaggcttactcacagctggagaggagcaggcaggaattagcttcaggtcttccttcaccagcagctactcaggagctccctgtggagagagctgctgccttccaggtggctccccatagccatggagaagaggccgtggcccaagacagaattccttctggaaagcagcaccaggaaacatctgcctgcgacagtccacatggagaagatggtcccggggactttgctcacacaggggttccaggacatgtgccaaggtccacgtgtgccccttctcctcagagggaggttttgactgtgcctgaggccaacagtgagccctggacccttgacacgcttgggggtgaaaggagacccggagtcactgctggcatcttggaaatgcgaaatgccctgggcaaccagagcacccctgcaccaccaactggagaagtggcagacactcccctggagcctggcaaggtggcaggcgctgctggggaagcagagggtgacatcaccctgagcacagctgagacacaggcatgtgcgtccggtgatctgcctgaagcaggtactacgaggacattctccgttgtggcaggtgacttggtgctgccaggaagctgtcaggacccagcctgctctgacaaggctccggggatggagggtacagctgcccttcatggggacagcccagccaggccccagcaggctaaggagcagccagggcctgagcgccccattccagctggggatgggaaggtgtgcgtctcctcacctccagagcctgacgaaactcacgacccgaagctgcaacatttggctccagaagagctccacactgacagagagagccccaggcctggcccatccatgttaccttcggttcctaagaaggatgctccaagagtcatggataaagtcacttcagatgagaccagaggtgcggaaggaacagaaaggtcagcgaaagatattggtctttggaaggccatgatgccttccttagatacagacacactggatgttttggaaaggagagtagtccttatacagcatgagttcctacataagaaagaagcaaatggccattcccgttttatgtacagttcacctgtggcagatgatatcatccagcccgctgcccccgcagacctggaaagcccaaccttagctgcctcttcctaccacggtgatgttgttggccaggtctctacggatctgatagcccagaggagttccgattctgaagaggcatttgagaccccggagtcaacgacccctgtcaaagctccgccagctccacccccaccaccccccgaagtcatcccagaacccgaggtcagcacacagccacccccggaagaaccaggatgtggttctgagacagtccctgtccctgatggcccacggagcgactcggtggaaggaagtcccttccgtcccccgtcacactccttctctgccgtcttcgatgaagacaagccgatagccagcagtgggacttacaacttggactttgacaacattgagcttgtggatacctttcagaccttggagcctcgtgcctcagacgctaagaatcaggagggcaaagtgaacacacggaggaagtccacggattccgtccccatctctaagtctacactgtcccggtcgctcagcctgcaagccagtgactttgatggtgcttcttcctcaggcaatcccgaggccgtggcccttgccccagatgcatatagcacgggttccagcagtgcttctagtacccttaagcgaactaaaaaaccgaggccgccttccttaaaaaagaaacagaccaccaagaaacccacagagacccccccagtgaaggagacgcaacaggagccagatgaagagagccttgtccccagtggggagaatctagcatctgagacgaaaacggaatctgccaagacggaaggtcctagcccagccttattggaggagacgccccttgagcccgctgtggggcccaaagctgcctgccctctggactcagagagtgcagaaggggttgtccccccggcttctggaggtggcagagtgcagaactcaccccctgtcgggaggaaaacgctgcctcttaccacggccccggaggcaggggaggtaaccccatcggatagcggggggcaagaggactctccagccaaagggctctccgtaaggctggagtttgactattctgaggacaagagtagttgggacaaccagcaggaaaacccccctcctaccaaaaagataggcaaaaagccagttgccaaaatgcccctgaggaggccaaagatgaaaaagacacccgagaaacttgacaacactcctgcctcacctcccagatcccctgctgaacccaatgacatccccattgctaaaggtacttacacctttgatattgacaagtgggatgaccccaattttaaccctttttcttccacctcaaaaatgcaggagtctcccaaactgccccaacaatcatacaactttgacccagacacctgtgatgagtccgttgacccctttaagacatcctctaagacccccagctcaccttctaaatccccagcctcctttgagatcccagccagtgctatggaagccaatggagtggacggggatgggctaaacaagcccgccaagaagaagaagacgcccctaaagactgacacatttagggtgaaaaagtcgccaaaacggtctcctctctctgatccaccttcccaggaccccaccccagctgctacaccagaaacaccaccagtgatctctgcggtggtccacgccacagatgaggaaaagctggcggtcaccaaccagaagtggacgtgcatgacagtggacctagaggctgacaaacaggactacccgcagccctcggacctgtccacctttgtaaacgagaccaaattcagttcacccactgaggagttggattacagaaactcctatgaaattgaatatatggagaaaattggctcctccttacctcaggacgacgatgccccgaagaagcaggccttgtaccttatgtttgacacttctcaggagagccctgtcaagtcatctcccgtccgcatgtcagagtccccgacgccgtgttcagggtcaagttttgaagagactgaagcccttgtgaacactgctgcgaaaaaccagcatcctgtcccacgaggactggcccctaaccaagagtcacacttgcaggtgccagagaaatcctcccagaaggagctggaggccatgggcttgggcaccccttcagaagcgattgaaattagagaggctgctcacccaacagacgtctccatctccaaaacagccttgtactcccgcatcgggaccgctgaggtggagaaacctgcaggccttctgttccagcagcccgacctggactctgccctccagatcgccagagcagagatcataaccaaggagagagaggtctcagaatggaaagataaatatgaagaaagcaggcgggaagtgatggaaatgaggaaaatagtggccgagtatgagaagaccatcgctcagatgatagaggacgaacagagagagaagtcagtctcccaccagacggtgcagcagctggttctggagaaggagcaagccctggccgacctgaactccgtggagaagtctctggccgacctcttcagaagatatgagaagatgaaggaggtcctagaaggcttccgcaagaatgaagaggtgttgaagagatgtgcgcaggagtacctgtcccgggtgaagaaggaggagcagaggtaccaggccctgaaggtgcacgcggaggagaaactggacagggccaatgctgagattgctcaggttcgaggcaaggcccagcaggagcaagccgcccaccaggccagcctgcggaaggagcagctgcgagtggacgccctggaaaggacgctggagcagaagaataaagaaatagaagaactcaccaagatttgtgacgaactgattgccaaaatggggaaaagctaactctgaaccgaatgttttggacttaactgttgcgtgcaatatgaccgtcggcacactgctgttcctccagttccatggacaggttctgttttcactttttcgtatgcactactgtatttcctttctaaataaaattgatttgattgtatgcagtactaaggagactatcagaatttcttgctattggtttgcattttcctagtataattcatagcaagttgacctcagagttcctgtatcagggagattgtctgattctctaataaaagacacattgctgaccttggccttgccctttgtacacaagttcccagggtgagcagcttttggatttaatatgaacatgtacagcgtgcatagggactcttgccttaaggagtgtaaacttgatctgcatttgctgatttgtttttaaaaaaacaagaaatgcatgtttcaaataaaattctctattgtaaataaaattttttctttggatcttggc

SEQ ID NO: 192633 - DNA, 2239 bp, Homo sapiens
  Payload ID: 18029
  Gene Name: transforming, acidic coiled-coil containing protein 2
  ENST ID: ENST00000514539
  CDS Start-End: 232-2239
agtgcccaggaatgcagaagccaggggatggacgagtactcaggctttcctcgaatctctgcttgagtggggcagcctcggggcctccggacgctggagaagctcacagcatctgtggccggtggtgcagctaacttttttggtgacattgaaagagatttaggtccaagagatacgagcaggggaattaggggtgggaatttgggggacagaggctgttcttcagcggaaatggcctatgcctcctggcagaggtggtccccagtggaatgggcccggtggatgtggacagcggtgaccagcagtggggactccagtctgctggtgcttcagggagactctggaaaaaggagttccgattctgaagaggcatttgagaccccggagtcaacgacccctgtcaaagctccgccagctccacccccaccaccccccgaagtcatcccagaacccgaggtcagcacacagccacccccggaagaaccaggatgtggttctgagacagtccctgtccctgatggcccacggagcgactcggtggaaggaagtcccttccgtcccccgtcacactccttctctgccgtcttcgatgaagacaagccgatagccagcagtgggacttacaacttggactttgacaacattgagcttgtggatacctttcagaccttggagcctcgtgcctcagacgctaagaatcaggagggcaaagtgaacacacggaggaagtccacggattccgtccccatctctaagtctacactgtcccggtcgctcagcctgcaagccagtgactttgatggtgcttcttcctcaggcaatcccgaggccgtggcccttgccccagatgcatatagcacgggttccagcagtgcttctagtacccttaagcgaactaaaaaaccgaggccgccttccttaaaaaagaaacagaccaccaagaaacccacagagacccccccagtgaaggagacgcaacaggagccagatgaagagagccttgtccccagtggggagaatctagcatctgagacgaaaacggaatctgccaagacggaaggtcctagcccagccttattggaggagacgccccttgagcccgctgtggggcccaaagctgcctgccctctggactcagagagtgcagaaggggttgtccccccggcttctggaggtggcagagtgcagaactcaccccctgtcgggaggaaaacgctgcctcttaccacggccccggaggcaggggaggtaaccccatcggatagcggggggcaagaggactctccagccaaagggctctccgtaaggctggagtttgactattctgaggacaagagtagttgggacaaccagcaggaaaacccccctcctaccaaaaagataggcaaaaagccagttgccaaaatgcccctgaggaggccaaagatgaaaaagacacccgagaaacttgacaacactcctgcctcacctcccagatcccctgctgaacccaatgacatccccattgctaaaggtacttacacctttgatattgacaagtgggatgaccccaattttaaccctttttcttccacctcaaaaatgcaggagtctcccaaactgccccaacaatcatacaactttgacccagacacctgtgatgagtccgttgacccctttaagacatcctctaagacccccagctcaccttctaaatccccagcctcctttgagatcccagccagtgctatggaagccaatggagtggacggggatgggctaaacaagcccgccaagaagaagaagacgcccctaaagactgacacatttagggtgaaaaagtcgccaaaacggtctcctctctctgatccaccttcccaggaccccaccccagctgctacaccagaaacaccaccagtgatctctgcggtggtccacgccacagatgaggaaaagctggcggtcaccaaccagaagtggacgtgcatgacagtggacctagaggctgacaaacaggactacccgcagccctcggacctgtccacctttgtaaacgagaccaaattcagttcacccactgaggagttggattacagaaactcctatgaaattgaatatatggagaaaattggctcctccttacctcaggacgacgatgccccgaagaagcaggccttgtaccttatgtttgacacttctcaggagagccctgtcaagtcatctcccgtccgcatgtcagagtccccgacgccgtgttcag

SEQ ID NO: 192634 - DNA, 1048 bp, Homo sapiens
  Payload ID: 18029
  Gene Name: transforming, acidic coiled-coil containing protein 2
  ENST ID: ENST00000440764
  CDS Start-End: 1-554
aacaggagccagatgaagagagccttgtccccagtggggagaatctagcatctgagacgaaaacggaatctgccaagacggaaggtcctagcccagccttattggaggagacgccccttgagcccgctgtggggcccaaagctgcctgccctctggactcagagagtgcagaaggggttgtccccccggcttctggaggtggcagagtgcagaactcaccccctgtcgggaggaaaacgctgcctcttaccacggccccggaggcaggggaggtaaccccatcggatagcggggggcaagaggactctccagccaaagggctctccgtaaggctggagtttgactattctgaggacaagagtagttgggacaaccagcaggaaaacccccctcctaccaaaaagataggcaaaaagccagttgccaaaatgcccctgaggaggccaaagatgaaaaagacacccgagaaacttgacaacactcctgcctcacctcccagatcccctgctgaacccaatgacatccccattgctaaagtgacacatttagggtgaaaaagtcgccaaaacggtctcctctctctgatccaccttcccaggaccccaccccagctgctacaccagaaacaccaccagtgatctctgcggtggtccacgccacagatgaggaaaagctggcggtcaccaaccagaagtggacgtgcatgacagtggacctagaggctgacaaacaggactacccgcagccctcggacctgtccacctttgtaaacgagaccaaattcagttcacccactgaggagttggattacagaaactcctatgaaattgaatatatggagaaaattggctcctccttacctcaggacgacgatgccccgaagaagcaggccttgtaccttatgtttgacacttctcaggagagccctgtcaagtcatctcccgtccgcatgtcagagtccccgacgccgtgttcagggtcaagttttgaagagactgaagcccttgtgaacactgctgcgaaaaaccagcatcctgtcccacgagga

SEQ ID NO: 192635 - DNA, 1229 bp, Homo sapiens
  Payload ID: 18029
  Gene Name: transforming, acidic coiled-coil containing protein 2
  ENST ID: ENST00000496913
  CDS Start-End: 1-1229
tccgtaaggctggagtttgactattctgaggacaagagtagttgggacaaccagcaggaaaacccccctcctaccaaaaagataggcaaaaagccagttgccaaaatgcccctgaggaggccaaagatgaaaaagacacccgagaaacttgacaacactcctgcctcacctcccagatcccctgctgaacccaatgacatccccattgctaaaggtacttacacctttgatattgacaagtgggatgaccccaattttaaccctttttcttccacctcaaaaatgcaggagtctcccaaactgccccaacaatcatacaactttgacccagacacctgtgatgagtccgttgacccctttaagacatcctctaagacccccagctcaccttctaaatccccagcctcctttgagatcccagccagtgctatggaagccaatggagtggacggggatgggctaaacaagcccgccaagaagaagaagacgcccctaaagacggtgaaaaagtcgccaaaacggtctcctctctctgatccaccttcccaggaccccaccccagctgctacaccagaaacaccaccagtgatctctgcggtggtccacgccacagatgaggaaaagctggcggtcaccaaccagaagtggacgtgcatgacagtggacctagaggctgacaaacaggactacccgcagccctcggacctgtccacctttgtaaacgagaccaaattcagttcacccactgaggagttggattacagaaactcctatgaaattgaatatatggagaaaattggctcctccttacctcaggacgacgatgccccgaagaagcaggccttgtaccttatgtttgacacttctcaggagagccctgtcaagtcatctcccgtccgcatgtcagagtccccgacgccgtgttcagggtcaagttttgaagagactgaagcccttgtgaacactgctgcgaaaaaccagcatcctgtcccacgaggactggcccctaaccaagagtcacacttgcaggtgccagagaaatcctcccagaaggagctggaggccatgggcttgggcaccccttcagaagcgattgaaattagagaggctgctcacccaacagacgtctccatctccaaaacagccttgtactcccgcatcgggaccgctgaggtggagaaacctgcaggccttctgttccagcagcccgacctggactctgccctcca

SEQ ID NO: 192636 - DNA, 3667 bp, Homo sapiens
  Payload ID: 18029
  Gene Name: transforming, acidic coiled-coil containing protein 2
  ENST ID: ENST00000369004
  CDS Start-End: 152-3178
cgctcccgccgccacggatgcccgcagctgctcccctctgcagtgcagcaaccccggccgccggccggctcgccccggctcccggctgcaggaatcgcgccaggacgctggccccgctcgcggctagcttgcacgccagggcacagcgaggatgggagggtcgcagtccctgcagccagccccagccagcgacctgaacctggaggcttccgaggcaatgagttccgattctgaagaggcatttgagaccccggagtcaacgacccctgtcaaagctccgccagctccacccccaccaccccccgaagtcatcccagaacccgaggtcagcacacagccacccccggaagaaccaggatgtggttctgagacagtccctgtccctgatggcccacggagcgactcggtggaaggaagtcccttccgtcccccgtcacactccttctctgccgtcttcgatgaagacaagccgatagccagcagtgggacttacaacttggactttgacaacattgagcttgtggatacctttcagaccttggagcctcgtgcctcagacgctaagaatcaggagggcaaagtgaacacacggaggaagtccacggattccgtccccatctctaagtctacactgtcccggtcgctcagcctgcaagccagtgactttgatggtgcttcttcctcaggcaatcccgaggccgtggcccttgccccagatgcatatagcacgggttccagcagtgcttctagtacccttaagcgaactaaaaaaccgaggccgccttccttaaaaaagaaacagaccaccaagaaacccacagagacccccccagtgaaggagacgcaacaggagccagatgaagagagccttgtccccagtggggagaatctagcatctgagacgaaaacggaatctgccaagacggaaggtcctagcccagccttattggaggagacgccccttgagcccgctgtggggcccaaagctgcctgccctctggactcagagagtgcagaaggggttgtccccccggcttctggaggtggcagagtgcagaactcaccccctgtcgggaggaaaacgctgcctcttaccacggccccggaggcaggggaggtaaccccatcggatagcggggggcaagaggactctccagccaaagggctctccgtaaggctggagtttgactattctgaggacaagagtagttgggacaaccagcaggaaaacccccctcctaccaaaaagataggcaaaaagccagttgccaaaatgcccctgaggaggccaaagatgaaaaagacacccgagaaacttgacaacactcctgcctcacctcccagatcccctgctgaacccaatgacatccccattgctaaaggtacttacacctttgatattgacaagtgggatgaccccaattttaaccctttttcttccacctcaaaaatgcaggagtctcccaaactgccccaacaatcatacaactttgacccagacacctgtgatgagtccgttgacccctttaagacatcctctaagacccccagctcaccttctaaatccccagcctcctttgagatcccagccagtgctatggaagccaatggagtggacggggatgggctaaacaagcccgccaagaagaagaagacgcccctaaagacgatggttgaagatgtgatgtctgtgtgttctctgtttgacacatttagggtgaaaaagtcgccaaaacggtctcctctctctgatccaccttcccaggaccccaccccagctgctacaccagaaacaccaccagtgatctctgcggtggtccacgccacagatgaggaaaagctggcggtcaccaaccagaagtggacgtgcatgacagtggacctagaggctgacaaacaggactacccgcagccctcggacctgtccacctttgtaaacgagaccaaattcagttcacccactgaggagttggattacagaaactcctatgaaattgaatatatggagaaaattggctcctccttacctcaggacgacgatgccccgaagaagcaggccttgtaccttatgtttgacacttctcaggagagccctgtcaagtcatctcccgtccgcatgtcagagtccccgacgccgtgttcagggtcaagttttgaagagactgaagcccttgtgaacactgctgcgaaaaaccagcatcctgtcccacgaggactggcccctaaccaagagtcacacttgcaggtgccagagaaatcctcccagaaggagctggaggccatgggcttgggcaccccttcagaagcgattgaaattacagctcccgagggctcctttgcctctgctgacgccctcctcagcaggctagctcaccccgtctctctctgtggtgcacttgactatctggagcccgacttagcagaaaagaaccccccactattcgctcagaaactccagagagaggctgctcacccaacagacgtctccatctccaaaacagccttgtactcccgcatcgggaccgctgaggtggagaaacctgcaggccttctgttccagcagcccgacctggactctgccctccagatcgccagagcagagatcataaccaaggagagagaggtctcagaatggaaagataaatatgaagaaagcaggcgggaagtgatggaaatgaggaaaatagtggccgagtatgagaagaccatcgctcagatgatagaggacgaacagagagagaagtcagtctcccaccagacggtgcagcagctggttctggagaaggagcaagccctggccgacctgaactccgtggagaagtctctggccgacctcttcagaagatatgagaagatgaaggaggtcctagaaggcttccgcaagaatgaagaggtgttgaagagatgtgcgcaggagtacctgtcccgggtgaagaaggaggagcagaggtaccaggccctgaaggtgcacgcggaggagaaactggacagggccaatgctgagattgctcaggttcgaggcaaggcccagcaggagcaagccgcccaccaggccagcctgcggaaggagcagctgcgagtggacgccctggaaaggacgctggagcagaagaataaagaaatagaagaactcaccaagatttgtgacgaactgattgccaaaatggggaaaagctaactctgaaccgaatgttttggacttaactgttgcgtgcaatatgaccgtcggcacactgctgttcctccagttccatggacaggttctgttttcactttttcgtatgcactactgtatttcctttctaaataaaattgatttgattgtatgcagtactaaggagactatcagaatttcttgctattggtttgcattttcctagtataattcatagcaagttgacctcagagttcctgtatcagggagattgtctgattctctaataaaagacacattgctgaccttggccttgccctttgtacacaagttcccagggtgagcagcttttggatttaatatgaacatgtacagcgtgcatagggactcttgccttaaggagtgtaaacttgatctgcatttgctgatttgtttttaaaaaaacaagaaatgcatgtttcaaataaaattctctattgtaaataaaattttttctttggatcttggcaataa

SEQ ID NO: 192637 - DNA, 547 bp, Homo sapiens
  Payload ID: 18029
  Gene Name: transforming, acidic coiled-coil containing protein 2
  ENST ID: ENST00000491540
  CDS Start-End: 1-547
gaacagcacctcggacaaccagcaggaggactccgtcttgcataacgtcattctgtggcctccaaaccctgagcccacacagaggactttatcagctcagactccaaggtccgcgcagccacccgggaacagtcagaatataaaaaggaagcagcaggacacgcccggaagccctgaccacagagacgcgtccagcgttgggcttggaggcttctgcaccgcttctgagagttctgccagcctggatccatgccttgtgtccccagaggtgactgagccaaggaaggacccacagggagccagggggccagaaggttctttgctgcccagcccaccaccgtcccaggagcgagagcacccctcgtcctccatgccctttgccgagtgtcccccggaaggttgcttggcaagtccagcagcggcacctgaagatggtcctcagactcagtctcccaggagggaacctgccccaaatgccccaggagacatcgcggcggcatttcccgctgagagggacagctctactccataccaagagattgctgcc

SEQ ID NO: 192638 - DNA, 741 bp, Homo sapiens
  Payload ID: 18029
  Gene Name: transforming, acidic coiled-coil containing protein 2
  ENST ID: ENST00000490979
  CDS Start-End: 1-461
agatcataaccaaggagagagaggtctcagaatggaaagataaatatgaagaaagcaggcgggaagtgatggaaatgaggaaaatagtggccgagtatgagaagaccatcgctcagatgatagaggacgaacagagagagaagtcagtctcccaccagacggtgcagcagctggttctggagaaggagcaagccctggccgacctgaactccgtggagaagtctctggccgacctcttcagaagatatgagaagatgaaggaggtcctagaaggcttccgcaagaatgaagaggtgttgaagagatgtgcgcaggagtacctgtcccggttccatggacaggttctgttttcactttttcgtatgcactactgtatttcctttctaaataaaattgatttgattgtatgcagtactaaggagactatcagaatttcttgctattggtttgcattttcctagtataattcatagcaagttgacctcagagttcctgtatcagggagattgtctgattctctaataaaagacacattgctgaccttggccttgccctttgtacacaagttcccagggtgagcagcttttggatttaatatgaacatgtacagcgtgcatagggactcttgccttaaggagtgtaaacttgatctgcatttgctgatttgtttttaaaaaaacaagaaatgcatgtttcaaataaaattctctattgtaaataaaattttttctttggatcttg

SEQ ID NO: 192639 - DNA, 9245 bp, Homo sapiens
  Payload ID: 18029
  Gene Name: transforming, acidic coiled-coil containing protein 2
  ENST ID: ENST00000515273
  CDS Start-End: 329-8956
aacgcaaatcccagaaccgtgccaacatataaaaccccacattaagggttgtacagtgcactgggatttctcaagtcacccgcttggtcctcttccaagtatactttacttcctttcattcctctctaaaacttttttaaaaactttcactcctgctctaaaagttatcttggtttcttactctaccttatgccccttgggcgaattttttcctctgaggagggaagaatagagttgctgctgcagacacatcagattccctactggtaacagctggagtgcgtcacctctgacaaaattctggggacgctgggaacactgaatcaacatgggcaatgagaacagcacctcggacaaccagaggactttatcagctcagactccaaggtccgcgcagccacccgggaacagtcagaatataaaaaggaagcagcaggacacgcccggaagccctgaccacagagacgcgtccagcattggcagcgttgggcttggaggcttctgcaccgcttctgagagttctgccagcctggatccatgccttgtgtccccagaggtgactgagccaaggaaggacccacagggagccagggggccagaaggttctttgctgcccagcccaccaccgtcccaggagcgagagcacccctcgtcctccatgccctttgccgagtgtcccccggaaggttgcttggcaagtccagcagcggcacctgaagatggtcctcagactcagtctcccaggagggaacctgccccaaatgccccaggagacatcgcggcggcatttcccgctgagagggacagctctactccataccaagagattgctgccgtccccagtgctggaagagagagacagccgaaggaagaaggacagaagtcctccttctccttctccagtggcatcgaccagtcacctggaatgtcgccagtacccctcagagagccaatgaaggcaccgctgtgtggagagggggaccagcctggtggttttgagtcccaagagaaagaggctgcaggtggctttccccctgcagagtccaggcagggggtggcttctgtgcaagtgacccctgaggcccctgctgcagcccagcagggcacagaaagctcagcggtcttggagaagtcccccctaaaacccatggccccgatcccacaagatccagccccaagagcctcagacagagaaagaggccaaggggaggcgccgcctcagtatttaacagatgacttggaattcctcagggcctgccatctccctaggagcaattcaggggctgccccagaagcagaagtgaatgccgcttcccaggagagctgccagcagccagtgggagcatatctgccgcacgcagagctgccctggggcttgccaagtcctgccctggtgccagaggctgggggctctgggaaggaggctctggacaccattgatgttcagggtcacccacagacagggatgcgaggaaccaagcccaatcaagttgtctgtgtggcagcaggcggccagcccgaagggggtttgcctgtgagccctgaaccttccctgctcactccgactgaggaagcacatccagcttcaagcctcgcttcattcccagctgctcagattcctattgctgtagaagaacctggatcatcatccagggaatcagtttccaaggctgggatgccagtttctgcagatgcagccaaagaggtggtggatgcagggttggtgggactggagaggcaggtgtcagatcttggaagcaagggagagcatccagaaggggaccctggagaggttcctgccccatcaccccaggagaggggagagcacttgaacacggagcaaagccatgaggtccaaccaggagtaccaccccctcctcttcccaaggagcaaagccatgaggtccaaccaggagcaccaccccctcctcttcccaaggcaccaagtgaaagtgccagagggccaccggggccaacggatggagccaaggtccatgaagattccacaagcccagccgtggctaaagaaggaagcagatcacctggtgacagccctggaggaaaggaggaagccccagagccacctgatggtggagacccagggaacctgcaaggagaggactctcaggctttcagcagcaagcgtgatccagaagtaggcaaagatgagctttcaaagccaagcagtgatgcagagagcagagaccatcccagctcacactcagcacagccacccagaaaggggggtgctgggcacacggacgggccccactctcagacagcagaggctgatgcatctggcctaccacacaagctgggtgaggaggaccccgtcctgccccctgtgccagatggagctggtgagcccactgttcccgaaggagccatctgggaggggtcaggattgcagcccaaatgtcctgacacccttcagagcagggaaggattgggaagaatggagtctttcctgactttagaatcagagaaatcagattttccaccaactcctgttgcagaggttgcacccaaagcccaggaaggtgagagcacattggaaataaggaagatgggcagctgtgatggggagggcttgctgacgtccccagatcaaccccgcgggccggcgtgtgatgcgtcgagacaggaatttcatgctggggtgccacatcccccccagggggagaacttggcagcagacctggggctcacggcactcatcctggaccaagatcagcagggaatcccatcctgcccaggggaaggctggataagaggagctgcatccgagtggcccctactatcttctgagaagcatctccagccatcccaggcacaaccagagacatccatctttgacgtgctcaaggagcaggcccagccacctgaaaatgggaaagagacttctccaagccatccaggttttaaggaccagggagcagattcttcccaaatccatgtacctgtggaacctcaggaagataacaacttgcccactcatggaggacaggagcaggctttgggatcagaacttcaaagtcagctccccaaaggcaccctgtctgatactccaacttcatctcccactgacatggtttgggagagttctctgacagaagagtcagaattgtcagcaccaacgagacagaagttgcctgcactaggggagaagcggccagagggagcatgcggtgatggtcagtcctcgagggtctcgcctccagcagcagatgtcttaaaagacttttctcttgcagggaacttcagcagaaaggaaacttgctgcactgggcaggggccaaacaagtctcaacaggcattggctgatgccttggaagaaggcagccagcatgaagaagcatgtcaaaggcatccaggagcttctgaagcagctgatggttgttccccactctggggcttgagtaagagggagatggcaagtggaaacacaggggaggccccaccttgtcagcctgactcagtagctctcctggatgcagttccctgcctgccagccctggcgcccgccagccccggagtcacacccacccaggatgccccagagacagaggcatgtgatgaaacccaggaaggcaggcagcaaccagtgccggccccgcagcagaaaatggagtgctgggccacttcggatgcagagtccccaaagcttcttgcaagtttcccatcagctggggagcaaggtggtgaagccggggctgctgagactggtggcagcgctggtgcaggagacccaggaaagcagcaggctccggagaaacctggagaagctactttgagttgtggcctccttcagactgagcactgccttacctccggggaggaagcttctacctctgccctacgtgagtcctgccaagctgagcaccccatggccagctgccaggatgccttgctgccagccagagagctgggtgggattcccaggagcaccatggatttttctacacaccaggctgtcccagacccaaaggagctcctgctgtctgggccaccagaagtggctgctcctgacaccccttacctgcatgtcgacagtgctgcccagagaggagcagaagacagtggagtgaaagctgtttcctctgcagaccccagagctcctggcgaaagcccctgtcctgtaggggagcccccacttgccttggaaaatgctgcctccttgaagctgtttgctggctccctcgcccccctgttgcaaccaggagctgcaggtggggaaatccctgcagtgcaagccagcagtggtagtcccaaagccagaaccactgagggaccagtggactccatgccatgcctggaccggatgccacttctggccaagggcaagcaggcaacaggggaagagaaagcagcaacagctccaggtgcaggtgccaaggccagtggggagggcatggcaggtgatgcagcaggagagacagagggcagcatggagaggatgggagagccttcccaggacccaaagcagggcacatcaggtggtgtggacacaagctctgagcaaatcgccaccctcactggcttcccagacttcagggagcacatcgccaagatcttcgagaagcctgtgctcggagccctggccacacctggagaaaaggcaggagctgggaggagtgcagtgggtaaagacctcaccaggccattgggcccagagaagcttctagatgggcctccaggagtggatgtcacccttctccctgcacctcctgctcgactccaggtggagaagaagcaacagttggctggagaggctgagatttcccatctggctctgcaagatccagcttcagacaagcttctgggtccagcagggctgacctgggagcggaacttgccaggtgccggtgtggggaaggagatggcaggtgtcccacccacactgagggaagacgagaggccagaggggcctggggcagcctggccaggcctggaaggccaggcttactcacagctggagaggagcaggcaggaattagcttcaggtcttccttcaccagcagctactcaggagctccctgtggagagagctgctgccttccaggtggctccccatagccatggagaagaggccgtggcccaagacagaattccttctggaaagcagcaccaggaaacatctgcctgcgacagtccacatggagaagatggtcccggggactttgctcacacaggggttccaggacatgtgccaaggtccacgtgtgccccttctcctcagagggaggttttgactgtgcctgaggccaacagtgagccctggacccttgacacgcttgggggtgaaaggagacccggagtcactgctggcatcttggaaatgcgaaatgccctgggcaaccagagcacccctgcaccaccaactggagaagtggcagacactcccctggagcctggcaaggtggcaggcgctgctggggaagcagagggtgacatcaccctgagcacagctgagacacaggcatgtgcgtccggtgatctgcctgaagcaggtactacgaggacattctccgttgtggcaggtgacttggtgctgccaggaagctgtcaggacccagcctgctctgacaaggctccggggatggagggtacagctgcccttcatggggacagcccagccaggccccagcaggctaaggagcagccagggcctgagcgccccattccagctggggatgggaaggtgtgcgtctcctcacctccagagcctgacgaaactcacgacccgaagctgcaacatttggctccagaagagctccacactgacagagagagccccaggcctggcccatccatgttaccttcggttcctaagaaggatgctccaagagtcatggataaagtcacttcagatgagaccagaggtgcggaaggaacagaaaggtcagcgaaagatattggtctttggaaggccatgatgccttccttagatacagacacactggatgttttggaaaggagagtagtccttatacagcatgagttcctacataagaaagaagcaaatggccattcccgttttatgtacagttcacctgtggcagatgatatcatccagcccgctgcccccgcagacctggaaagcccaaccttagctgcctcttcctaccacggtgatgttgttggccaggtctctacggatctgatagcccagaggagttccgattctgaagaggcatttgagaccccggagtcaacgacccctgtcaaagctccgccagctccacccccaccaccccccgaagtcatcccagaacccgaggtcagcacacagccacccccggaagaaccaggatgtggttctgagacagtccctgtccctgatggcccacggagcgactcggtggaaggaagtcccttccgtcccccgtcacactccttctctgccgtcttcgatgaagacaagccgatagccagcagtgggacttacaacttggactttgacaacattgagcttgtggatacctttcagaccttggagcctcgtgcctcagacgctaagaatcaggagggcaaagtgaacacacggaggaagtccacggattccgtccccatctctaagtctacactgtcccggtcgctcagcctgcaagccagtgactttgatggtgcttcttcctcaggcaatcccgaggccgtggcccttgccccagatgcatatagcacgggttccagcagtgcttctagtacccttaagcgaactaaaaaaccgaggccgccttccttaaaaaagaaacagaccaccaagaaacccacagagacccccccagtgaaggagacgcaacaggagccagatgaagagagccttgtccccagtggggagaatctagcatctgagacgaaaacggaatctgccaagacggaaggtcctagcccagccttattggaggagacgccccttgagcccgctgtggggcccaaagctgcctgccctctggactcagagagtgcagaaggggttgtccccccggcttctggaggtggcagagtgcagaactcaccccctgtcgggaggaaaacgctgcctcttaccacggccccggaggcaggggaggtaaccccatcggatagcggggggcaagaggactctccagccaaagggctctccgtaaggctggagtttgactattctgaggacaagagtagttgggacaaccagcaggaaaacccccctcctaccaaaaagataggcaaaaagccagttgccaaaatgcccctgaggaggccaaagatgaaaaagacacccgagaaacttgacaacactcctgcctcacctcccagatcccctgctgaacccaatgacatccccattgctaaaggtacttacacctttgatattgacaagtgggatgaccccaattttaaccctttttcttccacctcaaaaatgcaggagtctcccaaactgccccaacaatcatacaactttgacccagacacctgtgatgagtccgttgacccctttaagacatcctctaagacccccagctcaccttctaaatccccagcctcctttgagatcccagccagtgctatggaagccaatggagtggacggggatgggctaaacaagcccgccaagaagaagaagacgcccctaaagactgacacatttagggtgaaaaagtcgccaaaacggtctcctctctctgatccaccttcccaggaccccaccccagctgctacaccagaaacaccaccagtgatctctgcggtggtccacgccacagatgaggaaaagctggcggtcaccaaccagaagtggacgtgcatgacagtggacctagaggctgacaaacaggactacccgcagccctcggacctgtccacctttgtaaacgagaccaaattcagttcacccactgaggagttggattacagaaactcctatgaaattgaatatatggagaaaattggctcctccttacctcaggacgacgatgccccgaagaagcaggccttgtaccttatgtttgacacttctcaggagagccctgtcaagtcatctcccgtccgcatgtcagagtccccgacgccgtgttcagggtcaagttttgaagagactgaagcccttgtgaacactgctgcgaaaaaccagcatcctgtcccacgaggactggcccctaaccaagagtcacacttgcaggtgccagagaaatcctcccagaaggagctggaggccatgggcttgggcaccccttcagaagcgattgaaattagagaggctgctcacccaacagacgtctccatctccaaaacagccttgtactcccgcatcgggaccgctgaggtggagaaacctgcaggccttctgttccagcagcccgacctggactctgccctccagatcgccagagcagagatcataaccaaggagagagaggtctcagaatggaaagataaatatgaagaaagcaggcgggaagtgatggaaatgaggaaaatagtggccgagtatgagaagaccatcgctcagatgatagaggacgaacagagagagaagtcagtctcccaccagacggtgcagcagctggttctggagaaggagcaagccctggccgacctgaactccgtggagaagtctctggccgacctcttcagaagatatgagaagatgaaggaggtcctagaaggcttccgcaagaatgaagaggtgttgaagagatgtgcgcaggagtacctgtcccgggtgaagaaggaggagcagaggtaccaggccctgaaggtgcacgcggaggagaaactggacagggccaatgctgagattgctcaggttcgaggcaaggcccagcaggagcaagccgcccaccaggccagcctgcggaaggagcagctgcgagtggacgccctggaaaggacgctggagcagaagaataaagaaatagaagaactcaccaagatttgtgacgaactgattgccaaaatggggaaaagctaactctgaaccgaatgttttggacttaactgttgcgtgcaatatgaccgtcggcacactgctgttcctccagttccatggacaggttctgttttcactttttcgtatgcactactgtatttcctttctaaataaaattgatttgattgtatgcagtactaaggagactatcagaatttcttgctattggtttgcattttcctagtataattcatagcaagttgacctcagagttcctgtatcagggagattgtctgattctctaataaaagacacattgctgaccttggcc

SEQ ID NO: 192640 - DNA, 4114 bp, Homo sapiens
  Payload ID: 18029
  Gene Name: transforming, acidic coiled-coil containing protein 2
  Uniprot ID: O95359
  ENST ID: ENST00000513429
  CDS Start-End: 341-3625
caggagagaagaaacgcaaatcccagaaccgtgccaacatataaaaccccacattaagggttgtacagtgcactgggatttctcaagtcacccgcttggtcctcttccaagtatactttacttcctttcattcctctctaaaacttttttaaaaactttcactcctgctctaaaagttatcttggtttcttactctaccttatgccccttgggcgaattttttcctctgaggagggaagaatagagttgctgctgcagacacatcagattccctactggtaacagctggagtgcgtcacctctgacaaaattctggggacgctgggaacactgaatcaacatgggcaatgagaacagcacctcggacaaccagaggactttatcagctcagactccaaggtccgcgcagccacccgggaacagtcagaatataaaaaggaagcagcaggacacgcccggaagccctgaccacagagacgcgtccagttcacctgtggcagatgatatcatccagcccgctgcccccgcagacctggaaagcccaaccttagctgcctcttcctaccacggtgatgttgttggccaggtctctacggatctgatagcccagaggagttccgattctgaagaggcatttgagaccccggagtcaacgacccctgtcaaagctccgccagctccacccccaccaccccccgaagtcatcccagaacccgaggtcagcacacagccacccccggaagaaccaggatgtggttctgagacagtccctgtccctgatggcccacggagcgactcggtggaaggaagtcccttccgtcccccgtcacactccttctctgccgtcttcgatgaagacaagccgatagccagcagtgggacttacaacttggactttgacaacattgagcttgtggatacctttcagaccttggagcctcgtgcctcagacgctaagaatcaggagggcaaagtgaacacacggaggaagtccacggattccgtccccatctctaagtctacactgtcccggtcgctcagcctgcaagccagtgactttgatggtgcttcttcctcaggcaatcccgaggccgtggcccttgccccagatgcatatagcacgggttccagcagtgcttctagtacccttaagcgaactaaaaaaccgaggccgccttccttaaaaaagaaacagaccaccaagaaacccacagagacccccccagtgaaggagacgcaacaggagccagatgaagagagccttgtccccagtggggagaatctagcatctgagacgaaaacggaatctgccaagacggaaggtcctagcccagccttattggaggagacgccccttgagcccgctgtggggcccaaagctgcctgccctctggactcagagagtgcagaaggggttgtccccccggcttctggaggtggcagagtgcagaactcaccccctgtcgggaggaaaacgctgcctcttaccacggccccggaggcaggggaggtaaccccatcggatagcggggggcaagaggactctccagccaaagggctctccgtaaggctggagtttgactattctgaggacaagagtagttgggacaaccagcaggaaaacccccctcctaccaaaaagataggcaaaaagccagttgccaaaatgcccctgaggaggccaaagatgaaaaagacacccgagaaacttgacaacactcctgcctcacctcccagatcccctgctgaacccaatgacatccccattgctaaaggtacttacacctttgatattgacaagtgggatgaccccaattttaaccctttttcttccacctcaaaaatgcaggagtctcccaaactgccccaacaatcatacaactttgacccagacacctgtgatgagtccgttgacccctttaagacatcctctaagacccccagctcaccttctaaatccccagcctcctttgagatcccagccagtgctatggaagccaatggagtggacggggatgggctaaacaagcccgccaagaagaagaagacgcccctaaagactgacacatttagggtgaaaaagtcgccaaaacggtctcctctctctgatccaccttcccaggaccccaccccagctgctacaccagaaacaccaccagtgatctctgcggtggtccacgccacagatgaggaaaagctggcggtcaccaaccagaagtggacgtgcatgacagtggacctagaggctgacaaacaggactacccgcagccctcggacctgtccacctttgtaaacgagaccaaattcagttcacccactgaggagttggattacagaaactcctatgaaattgaatatatggagaaaattggctcctccttacctcaggacgacgatgccccgaagaagcaggccttgtaccttatgtttgacacttctcaggagagccctgtcaagtcatctcccgtccgcatgtcagagtccccgacgccgtgttcagggtcaagttttgaagagactgaagcccttgtgaacactgctgcgaaaaaccagcatcctgtcccacgaggactggcccctaaccaagagtcacacttgcaggtgccagagaaatcctcccagaaggagctggaggccatgggcttgggcaccccttcagaagcgattgaaattacagctcccgagggctcctttgcctctgctgacgccctcctcagcaggctagctcaccccgtctctctctgtggtgcacttgactatctggagcccgacttagcagaaaagaaccccccactattcgctcagaaactccaggaggagttagagtttgccatcatgcggatagaagccctgaagctggccaggcagattgctttggcttcccgcagccaccaggatgccaagagagaggctgctcacccaacagacgtctccatctccaaaacagccttgtactcccgcatcgggaccgctgaggtggagaaacctgcaggccttctgttccagcagcccgacctggactctgccctccagatcgccagagcagagatcataaccaaggagagagaggtctcagaatggaaagataaatatgaagaaagcaggcgggaagtgatggaaatgaggaaaatagtggccgagtatgagaagaccatcgctcagatgatagaggacgaacagagagagaagtcagtctcccaccagacggtgcagcagctggttctggagaaggagcaagccctggccgacctgaactccgtggagaagtctctggccgacctcttcagaagatatgagaagatgaaggaggtcctagaaggcttccgcaagaatgaagaggtgttgaagagatgtgcgcaggagtacctgtcccgggtgaagaaggaggagcagaggtaccaggccctgaaggtgcacgcggaggagaaactggacagggccaatgctgagattgctcaggttcgaggcaaggcccagcaggagcaagccgcccaccaggccagcctgcggaaggagcagctgcgagtggacgccctggaaaggacgctggagcagaagaataaagaaatagaagaactcaccaagatttgtgacgaactgattgccaaaatggggaaaagctaactctgaaccgaatgttttggacttaactgttgcgtgcaatatgaccgtcggcacactgctgttcctccagttccatggacaggttctgttttcactttttcgtatgcactactgtatttcctttctaaataaaattgatttgattgtatgcagtactaaggagactatcagaatttcttgctattggtttgcattttcctagtataattcatagcaagttgacctcagagttcctgtatcagggagattgtctgattctctaataaaagacacattgctgaccttggccttgccctttgtacacaagttcccagggtgagcagcttttggatttaatatgaacatgtacagcgtgcatagggactcttgccttaaggagtgtaaacttgatctgcatttgctgatttgtttttaaaaaaacaagaaatgcatgtttcaaataaaattctctattgtaaataaaattttttctttggatcttggcaataa

SEQ ID NO: 192641 - DNA, 497 bp, Homo sapiens
  Payload ID: 18029
  Gene Name: transforming, acidic coiled-coil containing protein 2
  ENST ID: ENST00000508411
  CDS Start-End: 1-497
aagaagaagacgcccctaaagactgacacatttagggtgaaaaagtcgccaaaacggtctcctctctctgatccaccttcccaggaccccaccccagctgctacaccagaaacaccaccagtgatctctgcggtggtccacgccacagatgaggaaaagctggcggtcaccaaccagaagtggacgtgcatgacagtggacctagaggctgacaaacaggactacccgcagccctcggacctgtccacctttgtaaacgagaccaaattcagttcacccactgagggtaagcaactctgtagccagctggacccccactctgcctcggagaatcctgcccctagggagccaaaggccaggagagaaacttctcagccagagttggattacagaaactcctatgaaattgaatatatggagaaaattggctcctccttacctcaggacgacgatgccccgaagaagcaggccttgtaccttatgtttgacacttctca

SEQ ID NO: 192642 - DNA, 567 bp, Homo sapiens
  Payload ID: 18029
  Gene Name: transforming, acidic coiled-coil containing protein 2
  ENST ID: ENST00000505639
  CDS Start-End: 1-567
gagagccttgtccccagtggggagaatctagcatctgagacgaaaacggaatctgccaagacggaaggtcctagcccagccttattggaggagacgccccttgagcccgctgtggggcccaaagctgcctgccctctggactcagagagtgcagaaggggttgtccccccggcttctggaggtggcagagtgcagaactcaccccctgtcgggaggaaaacgctgcctcttaccacggccccggaggcaggggaggagtctcccaaactgccccaacaatcatacaactttgacccagacacctgtgatgagtccgttgacccctttaagacatcctctaagacccccagctcaccttctaaatccccagcctcctttgagatcccagccagtgctatggaagccaatggagtggacggggatgggctaaacaagcccgccaagaagaagaagacgcccctaaagactgacacatttagggtgaaaaagtcgccaaaacggtctcctctctctgatccaccttcccaggaccccaccccagctgctacaccagaaacaccaccagtg

SEQ ID NO: 192643 - DNA, 9101 bp, Homo sapiens
  Payload ID: 18029
  Gene Name: transforming, acidic coiled-coil containing protein 2
  ENST ID: ENST00000515603
  CDS Start-End: 329-8809
aacgcaaatcccagaaccgtgccaacatataaaaccccacattaagggttgtacagtgcactgggatttctcaagtcacccgcttggtcctcttccaagtatactttacttcctttcattcctctctaaaacttttttaaaaactttcactcctgctctaaaagttatcttggtttcttactctaccttatgccccttgggcgaattttttcctctgaggagggaagaatagagttgctgctgcagacacatcagattccctactggtaacagctggagtgcgtcacctctgacaaaattctggggacgctgggaacactgaatcaacatgggcaatgagaacagcacctcggacaaccagaggactttatcagctcagactccaaggtccgcgcagccacccgggaacagtcagaatataaaaaggaagcagcaggacacgcccggaagccctgaccacagagacgcgtccagcattggcagcgttgggcttggaggcttctgcaccgcttctgagagttctgccagcctggatccatgccttgtgtccccagaggtgactgagccaaggaaggacccacagggagccagggggccagaaggttctttgctgcccagcccaccaccgtcccaggagcgagagcacccctcgtcctccatgccctttgccgagtgtcccccggaaggttgcttggcaagtccagcagcggcacctgaagatggtcctcagactcagtctcccaggagggaacctgccccaaatgccccaggagacatcgcggcggcatttcccgctgagagggacagctctactccataccaagagattgctgccgtccccagtgctggaagagagagacagccgaaggaagaaggacagaagtcctccttctccttctccagtggcatcgaccagtcacctggaatgtcgccagtacccctcagagagccaatgaaggcaccgctgtgtggagagggggaccagcctggtggttttgagtcccaagagaaagaggctgcaggtggctttccccctgcagagtccaggcagggggtggcttctgtgcaagtgacccctgaggcccctgctgcagcccagcagggcacagaaagctcagcggtcttggagaagtcccccctaaaacccatggccccgatcccacaagatccagccccaagagcctcagacagagaaagaggccaaggggaggcgccgcctcagtatttaacagatgacttggaattcctcagggcctgccatctccctaggagcaattcaggggctgccccagaagcagaagtgaatgccgcttcccaggagagctgccagcagccagtgggagcatatctgccgcacgcagagctgccctggggcttgccaagtcctgccctggtgccagaggctgggggctctgggaaggaggctctggacaccattgatgttcagggtcacccacagacagggatgcgaggaaccaagcccaatcaagttgtctgtgtggcagcaggcggccagcccgaagggggtttgcctgtgagccctgaaccttccctgctcactccgactgaggaagcacatccagcttcaagcctcgcttcattcccagctgctcagattcctattgctgtagaagaacctggatcatcatccagggaatcagtttccaaggctgggatgccagtttctgcagatgcagccaaagaggtggtggatgcagggttggtgggactggagaggcaggtgtcagatcttggaagcaagggagagcatccagaaggggaccctggagaggttcctgccccatcaccccaggagaggggagagcacttgaacacggagcaaagccatgaggtccaaccaggagtaccaccccctcctcttcccaaggagcaaagccatgaggtccaaccaggagcaccaccccctcctcttcccaaggcaccaagtgaaagtgccagagggccaccggggccaacggatggagccaaggtccatgaagattccacaagcccagccgtggctaaagaaggaagcagatcacctggtgacagccctggaggaaaggaggaagccccagagccacctgatggtggagacccagggaacctgcaaggagaggactctcaggctttcagcagcaagcgtgatccagaagtaggcaaagatgagctttcaaagccaagcagtgatgcagagagcagagaccatcccagctcacactcagcacagccacccagaaaggggggtgctgggcacacggacgggccccactctcagacagcagaggctgatgcatctggcctaccacacaagctgggtgaggaggaccccgtcctgccccctgtgccagatggagctggtgagcccactgttcccgaaggagccatctgggaggggtcaggattgcagcccaaatgtcctgacacccttcagagcagggaaggattgggaagaatggagtctttcctgactttagaatcagagaaatcagattttccaccaactcctgttgcagaggttgcacccaaagcccaggaaggtgagagcacattggaaataaggaagatgggcagctgtgatggggagggcttgctgacgtccccagatcaaccccgcgggccggcgtgtgatgcgtcgagacaggaatttcatgctggggtgccacatcccccccagggggagaacttggcagcagacctggggctcacggcactcatcctggaccaagatcagcagggaatcccatcctgcccaggggaaggctggataagaggagctgcatccgagtggcccctactatcttctgagaagcatctccagccatcccaggcacaaccagagacatccatctttgacgtgctcaaggagcaggcccagccacctgaaaatgggaaagagacttctccaagccatccaggttttaaggaccagggagcagattcttcccaaatccatgtacctgtggaacctcaggaagataacaacttgcccactcatggaggacaggagcaggctttgggatcagaacttcaaagtcagctccccaaaggcaccctgtctgatactccaacttcatctcccactgacatggtttgggagagttctctgacagaagagtcagaattgtcagcaccaacgagacagaagttgcctgcactaggggagaagcggccagagggagcatgcggtgatggtcagtcctcgagggtctcgcctccagcagcagatgtcttaaaagacttttctcttgcagggaacttcagcagaaaggaaacttgctgcactgggcaggggccaaacaagtctcaacaggcattggctgatgccttggaagaaggcagccagcatgaagaagcatgtcaaaggcatccaggagcttctgaagcagctgatggttgttccccactctggggcttgagtaagagggagatggcaagtggaaacacaggggaggccccaccttgtcagcctgactcagtagctctcctggatgcagttccctgcctgccagccctggcgcccgccagccccggagtcacacccacccaggatgccccagagacagaggcatgtgatgaaacccaggaaggcaggcagcaaccagtgccggccccgcagcagaaaatggagtgctgggccacttcggatgcagagtccccaaagcttcttgcaagtttcccatcagctggggagcaaggtggtgaagccggggctgctgagactggtggcagcgctggtgcaggagacccaggaaagcagcaggctccggagaaacctggagaagctactttgagttgtggcctccttcagactgagcactgccttacctccggggaggaagcttctacctctgccctacgtgagtcctgccaagctgagcaccccatggccagctgccaggatgccttgctgccagccagagagctgggtgggattcccaggagcaccatggatttttctacacaccaggctgtcccagacccaaaggagctcctgctgtctgggccaccagaagtggctgctcctgacaccccttacctgcatgtcgacagtgctgcccagagaggagcagaagacagtggagtgaaagctgtttcctctgcagaccccagagctcctggcgaaagcccctgtcctgtaggggagcccccacttgccttggaaaatgctgcctccttgaagctgtttgctggctccctcgcccccctgttgcaaccaggagctgcaggtggggaaatccctgcagtgcaagccagcagtggtagtcccaaagccagaaccactgagggaccagtggactccatgccatgcctggaccggatgccacttctggccaagggcaagcaggcaacaggggaagagaaagcagcaacagctccaggtgcaggtgccaaggccagtggggagggcatggcaggtgatgcagcaggagagacagagggcagcatggagaggatgggagagccttcccaggacccaaagcagggcacatcaggtggtgtggacacaagctctgagcaaatcgccaccctcactggcttcccagacttcagggagcacatcgccaagatcttcgagaagcctgtgctcggagccctggccacacctggagaaaaggcaggagctgggaggagtgcagtgggtaaagacctcaccaggccattgggcccagagaagcttctagatgggcctccaggagtggatgtcacccttctccctgcacctcctgctcgactccaggtggagaagaagcaacagttggctggagaggctgagatttcccatctggctctgcaagatccagcttcagacaagcttctgggtccagcagggctgacctgggagcggaacttgccaggtgccggtgtggggaaggagatggcaggtgtcccacccacactgagggaagacgagaggccagaggggcctggggcagcctggccaggcctggaaggccaggcttactcacagctggagaggagcaggcaggaattagcttcaggtcttccttcaccagcagctactcaggagctccctgtggagagagctgctgccttccaggtggctccccatagccatggagaagaggccgtggcccaagacagaattccttctggaaagcagcaccaggaaacatctgcctgcgacagtccacatggagaagatggtcccggggactttgctcacacaggggttccaggacatgtgccaaggtccacgtgtgccccttctcctcagagggaggttttgactgtgcctgaggccaacagtgagccctggacccttgacacgcttgggggtgaaaggagacccggagtcactgctggcatcttggaaatgcgaaatgccctgggcaaccagagcacccctgcaccaccaactggagaagtggcagacactcccctggagcctggcaaggtggcaggcgctgctggggaagcagagggtgacatcaccctgagcacagctgagacacaggcatgtgcgtccggtgatctgcctgaagcaggtactacgaggacattctccgttgtggcaggtgacttggtgctgccaggaagctgtcaggacccagcctgctctgacaaggctccggggatggagggtacagctgcccttcatggggacagcccagccaggccccagcaggctaaggagcagccagggcctgagcgccccattccagctggggatgggaaggtgtgcgtctcctcacctccagagcctgacgaaactcacgacccgaagctgcaacatttggctccagaagagctccacactgacagagagagccccaggcctggcccatccatgttaccttcggttcctaagaaggatgctccaagagtcatggataaagtcacttcagatgagaccagaggtgcggaaggaacagaaagttcacctgtggcagatgatatcatccagcccgctgcccccgcagacctggaaagcccaaccttagctgcctcttcctaccacggtgatgttgttggccaggtctctacggatctgatagcccagaggagttccgattctgaagaggcatttgagaccccggagtcaacgacccctgtcaaagctccgccagctccacccccaccaccccccgaagtcatcccagaacccgaggtcagcacacagccacccccggaagaaccaggatgtggttctgagacagtccctgtccctgatggcccacggagcgactcggtggaaggaagtcccttccgtcccccgtcacactccttctctgccgtcttcgatgaagacaagccgatagccagcagtgggacttacaacttggactttgacaacattgagcttgtggatacctttcagaccttggagcctcgtgcctcagacgctaagaatcaggagggcaaagtgaacacacggaggaagtccacggattccgtccccatctctaagtctacactgtcccggtcgctcagcctgcaagccagtgactttgatggtgcttcttcctcaggcaatcccgaggccgtggcccttgccccagatgcatatagcacgggttccagcagtgcttctagtacccttaagcgaactaaaaaaccgaggccgccttccttaaaaaagaaacagaccaccaagaaacccacagagacccccccagtgaaggagacgcaacaggagccagatgaagagagccttgtccccagtggggagaatctagcatctgagacgaaaacggaatctgccaagacggaaggtcctagcccagccttattggaggagacgccccttgagcccgctgtggggcccaaagctgcctgccctctggactcagagagtgcagaaggggttgtccccccggcttctggaggtggcagagtgcagaactcaccccctgtcgggaggaaaacgctgcctcttaccacggccccggaggcaggggaggtaaccccatcggatagcggggggcaagaggactctccagccaaagggctctccgtaaggctggagtttgactattctgaggacaagagtagttgggacaaccagcaggaaaacccccctcctaccaaaaagataggcaaaaagccagttgccaaaatgcccctgaggaggccaaagatgaaaaagacacccgagaaacttgacaacactcctgcctcacctcccagatcccctgctgaacccaatgacatccccattgctaaaggtacttacacctttgatattgacaagtgggatgaccccaattttaaccctttttcttccacctcaaaaatgcaggagtctcccaaactgccccaacaatcatacaactttgacccagacacctgtgatgagtccgttgacccctttaagacatcctctaagacccccagctcaccttctaaatccccagcctcctttgagatcccagccagtgctatggaagccaatggagtggacggggatgggctaaacaagcccgccaagaagaagaagacgcccctaaagactgacacatttagggtgaaaaagtcgccaaaacggtctcctctctctgatccaccttcccaggaccccaccccagctgctacaccagaaacaccaccagtgatctctgcggtggtccacgccacagatgaggaaaagctggcggtcaccaaccagaagtggacgtgcatgacagtggacctagaggctgacaaacaggactacccgcagccctcggacctgtccacctttgtaaacgagaccaaattcagttcacccactgaggagttggattacagaaactcctatgaaattgaatatatggagaaaattggctcctccttacctcaggacgacgatgccccgaagaagcaggccttgtaccttatgtttgacacttctcaggagagccctgtcaagtcatctcccgtccgcatgtcagagtccccgacgccgtgttcagggtcaagttttgaagagactgaagcccttgtgaacactgctgcgaaaaaccagcatcctgtcccacgaggactggcccctaaccaagagtcacacttgcaggtgccagagaaatcctcccagaaggagctggaggccatgggcttgggcaccccttcagaagcgattgaaattagagaggctgctcacccaacagacgtctccatctccaaaacagccttgtactcccgcatcgggaccgctgaggtggagaaacctgcaggccttctgttccagcagcccgacctggactctgccctccagatcgccagagcagagatcataaccaaggagagagaggtctcagaatggaaagataaatatgaagaaagcaggcgggaagtgatggaaatgaggaaaatagtggccgagtatgagaagaccatcgctcagatgatagaggacgaacagagagagaagtcagtctcccaccagacggtgcagcagctggttctggagaaggagcaagccctggccgacctgaactccgtggagaagtctctggccgacctcttcagaagatatgagaagatgaaggaggtcctagaaggcttccgcaagaatgaagaggtgttgaagagatgtgcgcaggagtacctgtcccgggtgaagaaggaggagcagaggtaccaggccctgaaggtgcacgcggaggagaaactggacagggccaatgctgagattgctcaggttcgaggcaaggcccagcaggagcaagccgcccaccaggccagcctgcggaaggagcagctgcgagtggacgccctggaaaggacgctggagcagaagaataaagaaatagaagaactcaccaagatttgtgacgaactgattgccaaaatggggaaaagctaactctgaaccgaatgttttggacttaactgttgcgtgcaatatgaccgtcggcacactgctgttcctccagttccatggacaggttctgttttcactttttcgtatgcactactgtatttcctttctaaataaaattgatttgattgtatgcagtactaaggagactatcagaatttcttgctattggtttgcattttcctagtataattcatagcaagttgacctcagagttcctgtatcagggagattgtctgattctctaataaaagacacattgctgaccttggccttg

SEQ ID NO: 192644 - DNA, 964 bp, Homo sapiens
  Payload ID: 18029
  Gene Name: transforming, acidic coiled-coil containing protein 2
  ENST ID: ENST00000635597
  CDS Start-End: 1-527
gggaagtgatggaaatgaggaaaatagtggccgagtatgagaagaccatcgctcagatgataggcaagcctgaggacgaacagagagagaagtcagtctcccaccagacggtgcagcagctggttctggagaaggagcaagccctggccgacctgaactccgtggagaagtctctggccgacctcttcagaagatatgagaagatgaaggaggtcctagaaggcttccgcaagaatgaagaggtgttgaagagatgtgcgcaggagtacctgtcccgggtgaagaaggaggagcagaggtaccaggccctgaaggtgcacgcggaggagaaactggacagggccaatgctgagattgctcaggttcgaggcaaggcccagcaggagcaagccgcccaccaggccagcctgcggaaggagcagctgcgagtggacgccctggaaaggacgctggagcagaagaataaagaaatagaagaactcaccaagatttgtgacgaactgattgccaaaatggggaaaagctaactctgaaccgaatgttttggacttaactgttgcgtgcaatatgaccgtcggcacactgctgttcctccagttccatggacaggttctgttttcactttttcgtatgcactactgtatttcctttctaaataaaattgatttgattgtatgcagtactaaggagactatcagaatttcttgctattggtttgcattttcctagtataattcatagcaagttgacctcagagttcctgtatcagggagattgtctgattctctaataaaagacacattgctgaccttggccttgccctttgtacacaagttcccagggtgagcagcttttggatttaatatgaacatgtacagcgtgcatagggactcttgccttaaggagtgtaaacttgatctgcatttgctgatttgtttttaaaaaaacaagaaatgcatgtttc

SEQ ID NO: 192645 - DNA, 2781 bp, Homo sapiens
  Payload ID: 18030
  Gene Name: transforming, acidic coiled-coil containing protein 3
  Uniprot ID: Q9Y6A5
  ENST ID: ENST00000313288
  CDS Start-End: 107-2623
cggcggtagcagctaggcttggcccccggcgtggagcagacgcggacccctccttcctggcggcggcggcgcgggctcagagcccggcaacgggcgggcgggcagaatgagtctgcaggtcttaaacgacaaaaatgtcagcaatgaaaaaaatacagaaaattgcgacttcctgttttcgccaccagaagttaccggaagatcgtctgttcttcgtgtgtcacagaaagaaaatgtgccacccaagaacctggccaaagctatgaaggtgacttttcagacacctctgcgggatccacagacgcacaggattctaagtcctagcatggccagcaaacttgaggctcctttcactcaggatgacacccttggactggaaaactcacacccggtctggacacagaaagagaaccaacagctcatcaaggaagtggatgccaaaactactcatggaattctacagaaaccagtggaggctgacaccgacctcctgggggatgcaagcccagcctttgggagtggcagctccagcgagtctggcccaggtgccctggctgacctggactgctcaagctcttcccagagcccaggaagttctgagaaccaaatggtgtctccaggaaaagtgtctggcagccctgagcaagccgtggaggaaaaccttagttcctattccttagacagaagagtgacacccgcctctgagaccctagaagacccttgcaggacagagtcccagcacaaagcggagactccgcacggagccgaggaagaatgcaaagcggagactccgcacggagccgaggaggaatgccggcacggtggggtctgtgctcccgcagcagtggccacttcgcctcctggtgcaatccctaaggaagcctgcggaggagcacccctgcagggtctgcctggcgaagccctgggctgccctgcgggtgtgggcacccccgtgccagcagatggcactcagacccttacctgtgcacacacctctgctcctgagagcacagccccaaccaaccacctggtggctggcagggccatgaccctgagtcctcaggaagaagtggctgcaggccaaatggccagctcctcgaggagcggacctgtaaaactagaatttgatgtatctgatggcgccaccagcaaaagggcacccccaccaaggagactgggagagaggtccggcctcaagcctcccttgaggaaagcagcagtgaggcagcaaaaggccccgcaggaggtggaggaggacgacggtaggagcggagcaggagaggacccccccatgccagcttctcggggctcttaccacctcgactgggacaaaatggatgacccaaacttcatcccgttcggaggtgacaccaagtctggttgcagtgaggcccagcccccagaaagccctgagaccaggctgggccagccagcggctgaacagttgcatgctgggcctgccacggaggagccaggtccctgtctgagccagcagctgcattcagcctcagcggaggacacgcctgtggtgcagttggcagccgagaccccaacagcagagagcaaggagagagccttgaactctgccagcacctcgcttcccacaagctgtccaggcagtgagccagtgcccacccatcagcaggggcagcctgccttggagctgaaagaggagagcttcagagaccccgctgaggttctaggcacgggcgcggaggtggattacctggagcagtttggaacttcctcgtttaaggagtcggccttgaggaagcagtccttatacctcaagttcgaccccctcctgagggacagtcctggtagaccagtgcccgtggccaccgagaccagcagcatgcacggtgcaaatgagactccctcaggacgtccgcgggaagccaagcttgtggagttcgatttcttgggagcactggacattcctgtgccaggcccacccccaggtgttcccgcgcctgggggcccacccctgtccaccggacctatagtggacctgctccagtacagccagaaggacctggatgcagtggtaaaggcgacacaggaggagaaccgggagctgaggagcaggtgtgaggagctccacgggaagaacctggaactggggaagatcatggacaggttcgaagaggttgtgtaccaggccatggaggaagttcagaagcagaaggaactttccaaagctgaaatccagaaagttctaaaagaaaaagaccaacttaccacagatctgaactccatggagaagtccttctccgacctcttcaagcgttttgagaaacagaaagaggtgatcgagggctaccgcaagaacgaagagtcactgaagaagtgcgtggaggattacctggcaaggatcacccaggagggccagaggtaccaagccctgaaggcccacgcggaggagaagctgcagctggcaaacgaggagatcgcccaggtccggagcaaggcccaggcggaagcgttggccctccaggccagcctgaggaaggagcagatgcgcatccagtcgctggagaagacagtggagcagaagactaaagagaacgaggagctgaccaggatctgcgacgacctcatctccaagatggagaagatctgacctccacggagccgctgtccccgcccccctgctcccgtctgtctgtcctgtctgattctcttaggtgtcatgttcttttttctgtcttgtcttcaacttttttaaaaactagattgctttgaaaacatgactcaataaaagtttcctttcaatttaaa

SEQ ID NO: 192646 - DNA, 778 bp, Homo sapiens
  Payload ID: 18030
  Gene Name: transforming, acidic coiled-coil containing protein 3
  ENST ID: ENST00000458173
  CDS Start-End: 115-778
agagattatgcaggcttgggttttctttctcaccatctcagcctgaaggccctttagctcttggtcccaggaagcagcagtgctgcccatggctccccctgccaggctggagaaatgagtctgcaggtcttaaacgacaaaaatgtcagcaatgaaaaaaatacagaaaattgcgacttcctgttttcgccaccagaagttaccggaagatcgtctgttcttcgtgtgtcacagaaagaaaatgtgccacccaagaacctggccaaagctatgaaggtgacttttcagacacctctgcgggatccacagacgcacaggattctaagtcctagcatggccagcaaacttgaggctcctttcactcaggatgacacccttggactggaaaactcacacccggtctggacacagaaagagaaccaacagctcatcaaggaagtggatgccaaaactactcatggaattctacagaaaccagtggaggctgacaccgacctcctgggggatgcaagcccagcctttgggagtggcagctccagcgagtctggcccaggtgccctggctgacctggactgctcaagctcttcccagagcccaggaagttctgagaaccaaatggtgtctccaggaaaagtgtctggcagccctgagcaagccgtggaggaaaaccttagttcctattccttagacagaagagtgacacccgcctctgagaccctagaagacccttgcaggacagagtcccagcacaaagcggagactccgcacggagccgagg

SEQ ID NO: 192647 - DNA, 825 bp, Homo sapiens
  Payload ID: 18030
  Gene Name: transforming, acidic coiled-coil containing protein 3
  ENST ID: ENST00000493975
  CDS Start-End: 134-825
ccgccgccagaacctgtaccgcgccctgtcatgggacccggccctagaccgaccgccgggctgggccccctggatggtggccaggggcggctagagctgggccaagaccgacggcggagcgggcgccccgagaatgagtctgcaggtcttaaacgacaaaaatgtcagcaatgaaaaaaatacagaaaattgcgacttcctgttttcgccaccagaagttaccggaagatcgtctgttcttcgtgtgtcacagaaagaaaatgtgccacccaagaacctggccaaagctatgaaggtgacttttcagacacctctgcgggatccacagacgcacaggattctaagtcctagcatggccagcaaacttgaggctcctttcactcaggatgacacccttggactggaaaactcacacccggtctggacacagaaagagaaccaacagctcatcaaggaagtggatgccaaaactactcatggaattctacagaaaccagtggaggctgacaccgacctcctgggggatgcaagcccagcctttgggagtggcagctccagcgagtctggcccaggtgccctggctgacctggactgctcaagctcttcccagagcccaggaagttctgagaaccaaatggtgtctccaggaaaagtgtctggcagccctgagcaagccgtggaggaaaaccttagttcctattccttagacagaagagtgacacccgcctctgagaccctagaagacccttgcaggacagagtcccagcacaaagcggagactccgcacggagccgaggaagaatgcaaagcggagactccgcacgg

SEQ ID NO: 192648 - DNA, 966 bp, Homo sapiens
  Payload ID: 18030
  Gene Name: transforming, acidic coiled-coil containing protein 3
  ENST ID: ENST00000467746
  CDS Start-End: 111-302
gcgacggcggtagcagctaggcttggcccccggcgtggagcagacgcggacccctccttcctggcggcggcggcgcgggctcagagcccggcaacgggcgggcgggcagaatgagtctgcaggtcttaaacgacaaaaatgtcagcaatgaaaaaaatacagaaaattgcgacttcctgttttcgccaccagaagttaccggaagatcgtctgttcttcgtgtgtcacagaaagaaaatgtgccacccaagaacctggccaaagctatgaaggtgctctcctcctcactccgcaacaggtgacttttcagacacctctgcgggatccacagacgcacaggattctaagtcctagcatggccagcaaacttgaggctcctttcactcaggatgacacccttggactggaaaactcacacccggtctggacacagaaagagaaccaacagctcatcaaggaagtggatgccaaaactactcatggaattctacagaaaccagtggaggctgacaccgacctcctgggggatgcaagcccagcctttgggagtggcagctccagcgagtctggcccaggtgccctggctgacctggactgctcaagctcttcccagagcccaggaagttctgagaaccaaatggtgtctccaggaaaagtgtctggcagccctgagcaagccgtggaggaaaaccttagttcctattccttagacagaagagtgacacccgcctctgagaccctagaagacccttgcaggacagagtcccagcacaaagcggagactccgcacggagccgaggaagaatgcaaagcggagactccgcacggagccgaggaggaatgccggcacggtggggtctgtgctcccgcagcagtggccacttcgcctcctggtgcaatccctaaggaagcctgcggaggagcacccctgcagggtctgcctggcgaagccctgggctgccctgc

SEQ ID NO: 192649 - DNA, 726 bp, Homo sapiens
  Payload ID: 18030
  Gene Name: transforming, acidic coiled-coil containing protein 3
  ENST ID: ENST00000485989
  CDS Start-End: 146-726
ctccggcgcgccggcggccatcaagggctagaagcgcgacggcggtagcagctaggcttggcccccggcgtggagcagacgcggacccctccttcctggcggcggcggcgcgggctcagagcccggcaacgggcgggcgggcagaatgagtctgcaggtcttaaacgacaaaaatgtcagcaatgaaaaaaatacagaaaattgcgacttcctgttttcgccaccagaagttaccggaagatcgtctgttcttcgtgtgtcacagaaagaaaatgtgccacccaagaacctggccaaagctatgaaggtgacttttcagacacctctgcgggatccacagacgcacaggattctaagtcctagcatggccagcaaacttgaggctcctttcactcaggatgacacccttggactggaaaactcacacccggtctggacacagaaagagaagcagctgcattcagcctcagcggaggacacgcctgtggtgcagttggcagccgagaccccaacagcagagagcaaggagagagccttgaactctgccagcacctcgcttcccacaagctgtccaggcagtgagccagtgcccacccatcagcaggggcagcctgccttggagctgaaagaggagagcttcagagaccccgctgaggttctaggcacgggcgcggaggtggattacctggagcagtttggaacttcctcgtttaaggagtcggcctt

SEQ ID NO: 192650 - DNA, 650 bp, Homo sapiens
  Payload ID: 18030
  Gene Name: transforming, acidic coiled-coil containing protein 3
  ENST ID: ENST00000470136
  CDS Start-End: 1-650
acctgtaaaactagaatttgatgtatctgatggcgccaccagcaaaagggcacccccaccaaggagactgggagagaggtccggcctcaagcctcccttgaggaaagcagcagtgaggcagcaaaaggccccgcaggaggtggaggaggacgacggtaggagcggagcaggagaggacccccccatgccagcttctcggggctcttaccacctcgactgggacaaaatggatgacccaaacttcatcccgttcggaggtgacaccaagtctggttgcagtgaggcccagcccccagaaagccctgagaccaggctgggccagccagcggctgaacagttgcatgctgggcctgccacggaggagccaggtccctgtctgagccagcagctgcattcagcctcagcggaggacacgcctgtggtgcagttggcagccgagaccccaacagcagagagcaaggagagagccttgaactctgccagcacctcgcttcccacaagctgtccaggcagtgagccagtggattacctggagcagtttggaacttcctcgtttaaggagtcggccttgaggaagcagtccttatacctcaagttcgaccccctcctgagggacagtcctggtagaccagtgcccgtggccaccgaga

SEQ ID NO: 192651 - DNA, 1756 bp, Homo sapiens
  Payload ID: 18030
  Gene Name: transforming, acidic coiled-coil containing protein 3
  ENST ID: ENST00000612220
  CDS Start-End: 156-593
gcgtttgaaactccggcgcgccggcggccatcaagggctagaagcgcgacggcggtagcagctaggcttggcccccggcgtggagcagacgcggacccctccttcctggcggcggcggcgcgggctcagagcccggcaacgggcgggcgggcagaatgagtctgcaggtcttaaacgacaaaaatgtcagcaatgaaaaaaatacagaaaattgcgacttcctgttttcgccaccagaagttaccggaagatcgtctgttcttcgtgtgtcacagaaagaaaatgtgccacccaagaacctggccaaagctatgaaggtgacttttcagacacctctgcgggatccacagacgcacaggattctaagtcctagcatggccagcaaacttgaggctcctttcactcaggatgacacccttggactggaaaactcacacccggtctggacacagaaagagaaagcagctgcattcagcctcagcggaggacacgcctgtggtgcagttggcagccgagaccccaacagcagagagcaaggagagagccttgaactctgccagcacctcgcttcccacaagctgtccaggcagtgagccagtgcccacccatcagcaggggcagcctgccttggagctgaaagaggagagcttcagagaccccgctgaggttctaggcacgggcgcggaggtggattacctggagcagtttggaacttcctcgtttaaggagtcggccttgaggaagcagtccttatacctcaagttcgaccccctcctgagggacagtcctggtagaccagtgcccgtggccaccgagaccagcagcatgcacggtgcaaatgagactccctcaggacgtccgcgggaagccaagcttgtggagttcgatttcttgggagcactggacattcctgtgccaggcccacccccaggtgttcccgcgcctgggggcccacccctgtccaccggacctatagtggacctgctccagtacagccagaaggacctggatgcagtggtaaaggcgacacaggaggagaaccgggagctgaggagcaggtgtgaggagctccacgggaagaacctggaactggggaagatcatggacaggttcgaagaggttgtgtaccaggccatggaggaagttcagaagcagaaggaactttccaaagctgaaatccagaaagttctaaaagaaaaagaccaacttaccacagatctgaactccatggagaagtccttctccgacctcttcaagcgttttgagaaacagaaagaggtgatcgagggctaccgcaagaacgaagagtcactgaagaagtgcgtggaggattacctggcaaggatcacccaggagggccagaggtaccaagccctgaaggcccacgcggaggagaagctgcagctggcaaacgaggagatcgcccaggtccggagcaaggcccaggcggaagcgttggccctccaggccagcctgaggaaggagcagatgcgcatccagtcgctggagaagacagtggagcagaagactaaagagaacgaggagctgaccaggatctgcgacgacctcatctccaagatggagaagatctgacctccacggagccgctgtccccgcccccctgctcccgtctgtctgtcctgtctgattctcttaggtgtcatgttcttttttctgtcttgtcttcaacttttttaaaaactagattgctttgaaaacatgactcaataaaagtttcctttcaatttaaacactg

SEQ ID NO: 192652 - DNA, 1693 bp, Homo sapiens
  Payload ID: 18030
  Gene Name: transforming, acidic coiled-coil containing protein 3
  ENST ID: ENST00000617535
  CDS Start-End: 101-538
tagcagctaggcttggcccccggcgtggagcagacgcggacccctccttcctggcggcggcggcgcgggctcagagcccggcaacgggcgggcgggcagaatgagtctgcaggtcttaaacgacaaaaatgtcagcaatgaaaaaaatacagaaaattgcgacttcctgttttcgccaccagaagttaccggaagatcgtctgttcttcgtgtgtcacagaaagaaaatgtgccacccaagaacctggccaaagctatgaaggtgacttttcagacacctctgcgggatccacagacgcacaggattctaagtcctagcatggccagcaaacttgaggctcctttcactcaggatgacacccttggactggaaaactcacacccggtctggacacagaaagagaaggcagctgcattcagcctcagcggaggacacgcctgtggtgcagttggcagccgagaccccaacagcagagagcaaggagagagccttgaactctgccagcacctcgcttcccacaagctgtccaggcagtgagccagtgcccacccatcagcaggggcagcctgccttggagctgaaagaggagagcttcagagaccccgctgaggttctaggcacgggcgcggaggtggattacctggagcagtttggaacttcctcgtttaaggagtcggccttgaggaagcagtccttatacctcaagttcgaccccctcctgagggacagtcctggtagaccagtgcccgtggccaccgagaccagcagcatgcacggtgcaaatgagactccctcaggacgtccgcgggaagccaagcttgtggagttcgatttcttgggagcactggacattcctgtgccaggcccacccccaggtgttcccgcgcctgggggcccacccctgtccaccggacctatagtggacctgctccagtacagccagaaggacctggatgcagtggtaaaggcgacacaggaggagaaccgggagctgaggagcaggtgtgaggagctccacgggaagaacctggaactggggaagatcatggacaggttcgaagaggttgtgtaccaggccatggaggaagttcagaagcagaaggaactttccaaagctgaaatccagaaagttctaaaagaaaaagaccaacttaccacagatctgaactccatggagaagtccttctccgacctcttcaagcgttttgagaaacagaaagaggtgatcgagggctaccgcaagaacgaagagtcactgaagaagtgcgtggaggattacctggcaaggatcacccaggagggccagaggtaccaagccctgaaggcccacgcggaggagaagctgcagctggcaaacgaggagatcgcccaggtccggagcaaggcccaggcggaagcgttggccctccaggccagcctgaggaaggagcagatgcgcatccagtcgctggagaagacagtggagcagaagactaaagagaacgaggagctgaccaggatctgcgacgacctcatctccaagatggagaagatctgacctccacggagccgctgtccccgcccccctgctcccgtctgtctgtcctgtctgattctcttaggtgtcatgttcttttttctgtcttgtcttcaacttttttaaaaactagattgctttgaaaacatgactcaataaaagtttcctttcaattt

SEQ ID NO: 192653 - DNA, 1477 bp, Homo sapiens
  Payload ID: 18031
  Gene Name: transgelin
  Uniprot ID: Q01995
  ENST ID: ENST00000278968
  CDS Start-End: 449-1054
caagtcttcactccttcctgcgagccctgaggaagccttgtgagtgcattggctggggcttggagggaagttgggctggagctggacaggagcagtgggtgcatttcaggcaggctctcctgaggtcccaggcgccagctccagctccctggctagggaaacccaccctctcagtcagcatgggggcccaagctccaggcagggtgggctggatcactagcgtcctggatctctctcagactgggcagccccgggctcattgaaatgccccggatgacttggctagtgcagaggaattgatggaaaccaccggggtgagagggaggctccccatctcagccagccacatccacaaggtgtgtgtaagggtgcaggcgccggccggttaggccaaggctctactgtctgttgcccctccaggagaacttccaaggagctttccccagacatggccaacaagggtccttcctatggcatgagccgcgaagtgcagtccaaaatcgagaagaagtatgacgaggagctggaggagcggctggtggagtggatcatagtgcagtgtggccctgatgtgggccgcccagaccgtgggcgcttgggcttccaggtctggctgaagaatggcgtgattctgagcaagctggtgaacagcctgtaccctgatggctccaagccggtgaaggtgcccgagaacccaccctccatggtcttcaagcagatggagcaggtggctcagttcctgaaggcggctgaggactatggggtcatcaagactgacatgttccagactgttgacctctttgaaggcaaagacatggcagcagtgcagaggaccctgatggctttgggcagcttggcagtgaccaagaatgatgggcactaccgtggagatcccaactggtttatgaagaaagcgcaggagcataagagggaattcacagagagccagctgcaggagggaaagcatgtcattggccttcagatgggcagcaacagaggggcctcccaggccggcatgacaggctacggacgacctcggcagatcatcagttagagcggagagggctagccctgagcccggccctcccccagctccttggctgcagccatcccgcttagcctgcctcacccacacccgtgtggtaccttcagccctggccaagctttgaggctctgtcactgagcaatggtaactgcacctgggcagctcctccctgtgcccccagcctcagcccaacttcttacccgaaagcatcactgccttggcccctccctcccggctgcccccatcacctctactgtctcctccctgggctaagcaggggagaagcgggctgggggtagcctggatgtgggccaagtccactgtcctccttggcggcaaaagcccattgaagaagaaccagcccagcctgccccctatcttgtcctggaatatttttggggttggaactcaaaaaaaaaaaaaaaaaatcaa

SEQ ID NO: 192654 - DNA, 928 bp, Homo sapiens
  Payload ID: 18031
  Gene Name: transgelin
  Uniprot ID: Q01995
  ENST ID: ENST00000392951
  CDS Start-End: 125-730
acatcaccacggcggcagccctttaaacccctcacccagccagcgccccatcctgtctgtccgaacccagacacaagtcttcactccttcctgcgagccctgaggaagccttctttccccagacatggccaacaagggtccttcctatggcatgagccgcgaagtgcagtccaaaatcgagaagaagtatgacgaggagctggaggagcggctggtggagtggatcatagtgcagtgtggccctgatgtgggccgcccagaccgtgggcgcttgggcttccaggtctggctgaagaatggcgtgattctgagcaagctggtgaacagcctgtaccctgatggctccaagccggtgaaggtgcccgagaacccaccctccatggtcttcaagcagatggagcaggtggctcagttcctgaaggcggctgaggactatggggtcatcaagactgacatgttccagactgttgacctctttgaaggcaaagacatggcagcagtgcagaggaccctgatggctttgggcagcttggcagtgaccaagaatgatgggcactaccgtggagatcccaactggtttatgaagaaagcgcaggagcataagagggaattcacagagagccagctgcaggagggaaagcatgtcattggccttcagatgggcagcaacagaggggcctcccaggccggcatgacaggctacggacgacctcggcagatcatcagttagagcggagagggctagccctgagcccggccctcccccagctccttggctgcagccatcccgcttagcctgcctcacccacacccgtgtggtaccttcagccctggccaagctttgaggctctgtcactgagcaatggtaactgcacctgggcagctcctccctgtgcccccagcctcagcccaacttcttacccgaaag

SEQ ID NO: 192655 - DNA, 375 bp, Homo sapiens
  Payload ID: 18031
  Gene Name: transgelin
  ENST ID: ENST00000529792
  CDS Start-End: 101-375
gtgtgctcactcctatttgggaagagagaaggggcacagcagccctgcaggggcccctggctctgctcgtgtttctgggcttctgctgctttccccagacatggccaacaagggtccttcctatggcatgagccgcgaagtgcagtccaaaatcgagaagaagtatgacgaggagctggaggagcggctggtggagtggatcatagtgcagtgtggccctgatgtgggccgcccagaccgtgggcgcttgggcttccaggtctggctgaagaatggcgtgattctgagcaagctggtgaacagcctgtaccctgatggctccaagccggtgaaggtgcccgagaacccaccctccatggtcttcaagcagatgga

SEQ ID NO: 192656 - DNA, 1227 bp, Homo sapiens
  Payload ID: 18031
  Gene Name: transgelin
  Uniprot ID: Q01995
  ENST ID: ENST00000530649
  CDS Start-End: 205-810
aggggtctcaccagagagggagccgggggagtgcgctcctgcgtccatcctcagaccagcgtgtccctcccaacctctgacccctctgaggccaggggatgggttcggcttcctttggtacctcttttggaagtctcttcagacaaacactggagagaaggcacagcaccctagggtgacatcagtggacagctttccccagacatggccaacaagggtccttcctatggcatgagccgcgaagtgcagtccaaaatcgagaagaagtatgacgaggagctggaggagcggctggtggagtggatcatagtgcagtgtggccctgatgtgggccgcccagaccgtgggcgcttgggcttccaggtctggctgaagaatggcgtgattctgagcaagctggtgaacagcctgtaccctgatggctccaagccggtgaaggtgcccgagaacccaccctccatggtcttcaagcagatggagcaggtggctcagttcctgaaggcggctgaggactatggggtcatcaagactgacatgttccagactgttgacctctttgaaggcaaagacatggcagcagtgcagaggaccctgatggctttgggcagcttggcagtgaccaagaatgatgggcactaccgtggagatcccaactggtttatgaagaaagcgcaggagcataagagggaattcacagagagccagctgcaggagggaaagcatgtcattggccttcagatgggcagcaacagaggggcctcccaggccggcatgacaggctacggacgacctcggcagatcatcagttagagcggagagggctagccctgagcccggccctcccccagctccttggctgcagccatcccgcttagcctgcctcacccacacccgtgtggtaccttcagccctggccaagctttgaggctctgtcactgagcaatggtaactgcacctgggcagctcctccctgtgcccccagcctcagcccaacttcttacccgaaagcatcactgccttggcccctccctcccggctgcccccatcacctctactgtctcctccctgggctaagcaggggagaagcgggctgggggtagcctggatgtgggccaagtccactgtcctccttggcggcaaaagcccattgaagaagaaccagcccagcctgccccctatcttgtcctggaatatttttggggttggaactcaaaaaaaaaaaaaaaa

SEQ ID NO: 192657 - DNA, 1048 bp, Homo sapiens
  Payload ID: 18031
  Gene Name: transgelin
  Uniprot ID: Q01995
  ENST ID: ENST00000525531
  CDS Start-End: 261-866
cgaacccagacacaagtcttcactccttcctgcgagccctgaggaagccttactgggcagccccgggctcattgaaatgccccggatgacttggctagtgcagaggaattgatggaaaccaccggggtgagagggaggctccccatctcagccagccacatccacaaggtgtgtgtaagggtgcaggcgccggccggttaggccaaggctctactgtctgttgcccctccaggagaacttccaaggagctttccccagacatggccaacaagggtccttcctatggcatgagccgcgaagtgcagtccaaaatcgagaagaagtatgacgaggagctggaggagcggctggtggagtggatcatagtgcagtgtggccctgatgtgggccgcccagaccgtgggcgcttgggcttccaggtctggctgaagaatggcgtgattctgagcaagctggtgaacagcctgtaccctgatggctccaagccggtgaaggtgcccgagaacccaccctccatggtcttcaagcagatggagcaggtggctcagttcctgaaggcggctgaggactatggggtcatcaagactgacatgttccagactgttgacctctttgaaggcaaagacatggcagcagtgcagaggaccctgatggctttgggcagcttggcagtgaccaagaatgatgggcactaccgtggagatcccaactggtttatgaagaaagcgcaggagcataagagggaattcacagagagccagctgcaggagggaaagcatgtcattggccttcagatgggcagcaacagaggggcctcccaggccggcatgacaggctacggacgacctcggcagatcatcagttagagcggagagggctagccctgagcccggccctcccccagctccttggctgcagccatcccgcttagcctgcctcacccacacccgtgtggtaccttcagccctggccaagctttgaggctctgtcactgagcaatggtaactgcacctgggcagctcctccctgtgcccccagcctcagccca

SEQ ID NO: 192658 - DNA, 2166 bp, Homo sapiens
  Payload ID: 18031
  Gene Name: transgelin
  Uniprot ID: Q01995
  ENST ID: ENST00000532870
  CDS Start-End: 1142-1747
cttttggaagtctcttcagacaaacactggagagaaggcacagcaccctagggtgacatcagtggacaggtcagtttcctgttcctgttcccagccacccctgtctgtctgcccagggacctacctgcctggcccactcctgctgccacccctctccatgagtgggactcctgagcagtgccaggcccaggccctcagggtggcagttgctggatggggccaggcttcccattccctggcaggcagactcttggctctggaagatccctgggggactctgacttcttggttactcaggctactccgtaagggtagccttacgagagcgtaagggcatgaggggaagtcgatgggtagaccaggtgtctctgatttctctgaggaaatgcagcttctttgccaagaactcttgggctttggtggcttcgtcgcccttgcctggggtgggcgagttttagtctcttcagctgcagaccagaagctgagctgacctgaaaagagctggagttctggagttcgggcttccaggccagggcctgcttctgggtgagagtgggaggtaatggttgcttgaggcagaggcagtaaaccctcacacccgcagctggacaaaggcaccagctggctgtattctgtgggggcaatgtggcttctggaaggtctctccagtggctctgtagctggtcttggcaaagaatgttctagaccaagggttgtcaaactacagctcatgggccaaatccagcctgctgtctgcttttgtaagtaaagttttattggaacaaagccatgttcatttgttacatattgtctatggctgctttcacactgcaacagcagagaccatgtgtcctgcaaagcctaaaatatgttctgtcttatcctttacaaaaacagtttactgacccctgctctagacctccaaagacctggtatcctctttcctggtgttcaagttcagagaggtgtctggagtaggggctgagcctggcctggatgggcagtgctgtgacaagtgtctaggatggccgggtatcctgcacagagctagaaggctgcctggcacgggtgaaagcagagctgctccctgaccctctgcccctccctcctccaccctggcctgctttagctttccccagacatggccaacaagggtccttcctatggcatgagccgcgaagtgcagtccaaaatcgagaagaagtatgacgaggagctggaggagcggctggtggagtggatcatagtgcagtgtggccctgatgtgggccgcccagaccgtgggcgcttgggcttccaggtctggctgaagaatggcgtgattctgagcaagctggtgaacagcctgtaccctgatggctccaagccggtgaaggtgcccgagaacccaccctccatggtcttcaagcagatggagcaggtggctcagttcctgaaggcggctgaggactatggggtcatcaagactgacatgttccagactgttgacctctttgaaggcaaagacatggcagcagtgcagaggaccctgatggctttgggcagcttggcagtgaccaagaatgatgggcactaccgtggagatcccaactggtttatgaagaaagcgcaggagcataagagggaattcacagagagccagctgcaggagggaaagcatgtcattggccttcagatgggcagcaacagaggggcctcccaggccggcatgacaggctacggacgacctcggcagatcatcagttagagcggagagggctagccctgagcccggccctcccccagctccttggctgcagccatcccgcttagcctgcctcacccacacccgtgtggtaccttcagccctggccaagctttgaggctctgtcactgagcaatggtaactgcacctgggcagctcctccctgtgcccccagcctcagcccaacttcttacccgaaagcatcactgccttggcccctccctcccggctgcccccatcacctctactgtctcctccctgggctaagcaggggagaagcgggctgggggtagcctggatgtgggccaagtccactgtcctccttggcggcaaaagcccattgaagaagaaccagcccagcctgccccctatcttgtcctggaatatttttggggttggaactcaaaaaaaaaaaaaaaaaa

SEQ ID NO: 192659 - DNA, 501 bp, Homo sapiens
  Payload ID: 18031
  Gene Name: transgelin
  ENST ID: ENST00000529622
  CDS Start-End: 1-455
gcccagaccgtgggcgcttgggcttccagattctgagcaagctggtgaacagcctgtaccctgatggctccaagccggtgaaggtgcccgagaacccaccctccatggtcttcaagcagatggagcaggtggctcagttcctgaaggcggctgaggactatggggtcatcaagactgacatgttccagactgttgacctctttgaaggcaaagacatggcagcagtgcagaggaccctgatggctttgggcagcttggcagtgaccaagaatgatgggcactaccgtggagatcccaactggtttatgaagaaagcgcaggagcataagagggaattcacagagagccagctgcaggagggaaagcatgtcattggccttcagatgggcagcaacagaggggcctcccaggccggcatgacaggctacggacgacctcggcagatcatcagttagagcggagagggctagccctgagcccggccctcccccagctccttgg

SEQ ID NO: 192660 - DNA, 709 bp, Homo sapiens
  Payload ID: 18032
  Gene Name: transgelin 2
  Uniprot ID: P37802
  ENST ID: ENST00000320307
  CDS Start-End: 87-686
cctccccccgcgccctgtgcctcctggggctacctgaagccggtgtcctgggagatctctccccgcagccaccgccacccattggaatggccaacaggggacctgcatatggcctgagccgggaggtgcagcagaagattgagaaacaatatgatgcagatctggagcagatcctgatccagtggatcaccacccagtgccgaaaggatgtgggccggccccagcctggacgcgagaacttccagaactggctcaaggatggcacggtgctatgtgagctcattaatgcactgtaccccgaggggcaggccccagtaaagaagatccaggcctccaccatggccttcaagcagatggagcagatctctcagttcctgcaagcagctgagcgctatggcattaacaccactgacatcttccaaactgtggacctctgggaaggaaagaacatggcctgtgtgcagcggacgctgatgaatctgggtgggctggcagtagcccgagatgatgggctcttctctggggatcccaactggttccctaagaaatccaaggagaatcctcggaacttctcggataaccagctgcaagagggcaagaacgtgatcgggttacagatgggcaccaaccgcggggcgtctcaggcaggcatgactggctacgggatgccacgccagatcctctgatcccaccccaggccttgcccctg

SEQ ID NO: 192661 - DNA, 1603 bp, Homo sapiens
  Payload ID: 18032
  Gene Name: transgelin 2
  Uniprot ID: P37802
  ENST ID: ENST00000368096
  CDS Start-End: 248-910
cggtggtgaggggctgccctacggtggttcccttaattgtgggccgccccccatccttgctgctggctgtggcacctcgctctgtgggctggtgccctcactgtgctgctctttgagaacactccctgtcccaaatctgagttgggaagttctcctgtgttccatctgcacggtggatggagagtccctttgtcttcccaattaaacaccctagccaagaaccctgaagtcctccctgcccccacccatgtccgccttttctttggctttggctttggtgagctccccgcagccaccgccacccattggaatggccaacaggggacctgcatatggcctgagccgggaggtgcagcagaagattgagaaacaatatgatgcagatctggagcagatcctgatccagtggatcaccacccagtgccgaaaggatgtgggccggccccagcctggacgcgagaacttccagaactggctcaaggatggcacggtgctatgtgagctcattaatgcactgtaccccgaggggcaggccccagtaaagaagatccaggcctccaccatggccttcaagcagatggagcagatctctcagttcctgcaagcagctgagcgctatggcattaacaccactgacatcttccaaactgtggacctctgggaaggaaagaacatggcctgtgtgcagcggacgctgatgaatctgggtgggctggcagtagcccgagatgatgggctcttctctggggatcccaactggttccctaagaaatccaaggagaatcctcggaacttctcggataaccagctgcaagagggcaagaacgtgatcgggttacagatgggcaccaaccgcggggcgtctcaggcaggcatgactggctacgggatgccacgccagatcctctgatcccaccccaggccttgcccctgccctcccacgaatggttaatatatatgtagatatatattttagcagtgacattcccagagagccccagagctctcaagctcctttctgtcagggtggggggttcagcctgtcctgtcacctctgaggtgcctgctggcatcctctcccccatgcttactaatacattcccttccccatagccatcaaaactggaccaactggcctcttcctttcccctgggaccaaaatttaggggcctcagtccctcaccgccatgccctggcctattctgtctctccttcttccccctggcctgttctgtctctgagctctgtgtcctccgttcattccatggctgggagtcactgatgctgcctctgccttctgatgctggactggccttgcttctacaagtatgcttctcccacagctgtggctgcaggaacttaatttatagggaggagcctgtggcagctgctgccccagccacagctgcactgactgtgctcaccacacatctggggcagccttccctggcaggggccctcgtggcttctcattttccattcccttcactgtggctaaggggtggggtgaggggatggagagggagggctgcctaccatggtctggggcttgaggaagatgagtttgttgatttaaataaagaatttgtcatttttgaatgga

SEQ ID NO: 192662 - DNA, 1604 bp, Homo sapiens
  Payload ID: 18032
  Gene Name: transgelin 2
  Uniprot ID: P37802
  ENST ID: ENST00000368097
  CDS Start-End: 312-911
tggaggctgaggtactcacgggtggagaccactgcagccgcctttgtagattcagactccccgaacctttaacccttgctctggtctactgtccctctgtctcaagcagtcctccctccttctgcgctgcggcgcctttaaaccttcttggcccttgccccgccccgggtccgccccgtctgaggcgggaccctcctgaaaatccccggctgggcagggcgcaccacttgcagctgcagcccttgccttgagtcagtgcgccgctctccagcccgcttgaacgctccccgcagccaccgccacccattggaatggccaacaggggacctgcatatggcctgagccgggaggtgcagcagaagattgagaaacaatatgatgcagatctggagcagatcctgatccagtggatcaccacccagtgccgaaaggatgtgggccggccccagcctggacgcgagaacttccagaactggctcaaggatggcacggtgctatgtgagctcattaatgcactgtaccccgaggggcaggccccagtaaagaagatccaggcctccaccatggccttcaagcagatggagcagatctctcagttcctgcaagcagctgagcgctatggcattaacaccactgacatcttccaaactgtggacctctgggaaggaaagaacatggcctgtgtgcagcggacgctgatgaatctgggtgggctggcagtagcccgagatgatgggctcttctctggggatcccaactggttccctaagaaatccaaggagaatcctcggaacttctcggataaccagctgcaagagggcaagaacgtgatcgggttacagatgggcaccaaccgcggggcgtctcaggcaggcatgactggctacgggatgccacgccagatcctctgatcccaccccaggccttgcccctgccctcccacgaatggttaatatatatgtagatatatattttagcagtgacattcccagagagccccagagctctcaagctcctttctgtcagggtggggggttcagcctgtcctgtcacctctgaggtgcctgctggcatcctctcccccatgcttactaatacattcccttccccatagccatcaaaactggaccaactggcctcttcctttcccctgggaccaaaatttaggggcctcagtccctcaccgccatgccctggcctattctgtctctccttcttccccctggcctgttctgtctctgagctctgtgtcctccgttcattccatggctgggagtcactgatgctgcctctgccttctgatgctggactggccttgcttctacaagtatgcttctcccacagctgtggctgcaggaacttaatttatagggaggagcctgtggcagctgctgccccagccacagctgcactgactgtgctcaccacacatctggggcagccttccctggcaggggccctcgtggcttctcattttccattcccttcactgtggctaaggggtggggtgaggggatggagagggagggctgcctaccatggtctggggcttgaggaagatgagtttgttgatttaaataaagaatttgtcatttttgaatgga

SEQ ID NO: 192663 - DNA, 801 bp, Homo sapiens
  Payload ID: 18032
  Gene Name: transgelin 2
  ENST ID: ENST00000397334
  CDS Start-End: 240-801
agacagggcgtccgtctggagcagggactcagggactgagccccacccgcgggctccatcgctgagtcctcactggggcgaggggaaaaaagggcgtcggactttagctggctggccccgagtgaccccgggtcgtggcgccggccctgggccagctcgtgctcctgggctttcccgcgcgacccttcacttcctggttccaggagcacgtctccccgcagccaccgccacccattggaatggccaacaggggacctgcatatggcctgagccgggaggtgcagcagaagattgagaaacaatatgatgcagatctggagcagatcctgatccagtggatcaccacccagtgccgaaaggatgtgggccggccccagcctggacgcgagaacttccagaactggctcaaggatggcacggtgctatgtgagctcattaatgcactgtaccccgaggggcaggccccagtaaagaagatccaggcctccaccatggccttcaagcagatggagcagatctctcagttcctgcaagcagctgagcgctatggcattaacaccactgacatcttccaaactgtggacctctgggaaggaaagaacatggcctgtgtgcagcggacgctgatgaatctgggtgggctggcagtagcccgagatgatgggctcttctctggggatcccaactggttccctaagaaatccaaggagaatcctcggaacttctcggataaccagctgcaagagggcaagaacgtgatcgggttacagatgggcaccaaccgcggggcgtctcaggcag

SEQ ID NO: 192664 - DNA, 1349 bp, Homo sapiens
  Payload ID: 18033
  Gene Name: transgelin 3
  Uniprot ID: Q9UI15
  ENST ID: ENST00000273368
  CDS Start-End: 418-1017
gtgcagatgagaaagaggctctcagcgggagggaggcaggcgggcttgattgacacaggagagggctggctttttggagggctcttagcaacggccctggttgagccccctcagccatgagaaaatcaaatcaatgtgccattcttccaggcgcgaggcagcagcggctgcagttcaacatgaaaggaggcttcctccctgcctgctaattacctgctcttcccgatctcatcgtttctgcctttgcaaagtgctactgagaagggggaagaaacgtccgccacccatcccccttgctgcctgggggttcagacttgattgttgcccagccatatcccagccccgtctgcagggagccggaggctgctgctgctgctattgtgtggatgccgcgcgtgtcttctcttctttccagagatggctaacaggggcccgagctatggcttaagccgagaggtgcaggagaagatcgagcagaagtatgatgcggacctggagaacaagctggtggactggatcatcctgcagtgcgccgaggacatagagcacccgccccccggcagggcccattttcagaaatggttaatggacgggacggtcctgtgcaagctgataaatagtttatacccaccaggacaagagcccatacccaagatctcagagtcaaagatggcttttaagcagatggagcaaatctcccagttcctaaaagctgcggagacctatggtgtcagaaccaccgacatctttcagacggtggatctatgggaagggaaggacatggcagctgtgcagaggaccctgatggctttaggcagcgttgcagtcaccaaggatgatggctgctatcggggagagccatcctggtttcacaggaaagcccagcagaatcggagaggcttttccgaggagcagcttcgccagggacagaacgtaataggcctgcagatgggcagcaacaagggagcctcccaggcgggcatgacagggtacgggatgcccaggcagatcatgtaggacgcggcatcctgcccctggtagagaggacgaatgttccacaccatggtctctacgaaaaagaaatagttagtcaccttctgaccttctcctctttctcaaagccttctgtccctggtttttgcaagtgctgcatttccgccgagaatccgcgttgcctactgctgccacctcctgttcatttagaactatgcaaagactccgcttccgttttcctgagctcctcgggccccagagtctctgtttgattatttatttatttatttatttatttgccaaaaattctcctcttcaacttatagaatgcacctaataaagtaattagtcttgtg

SEQ ID NO: 192665 - DNA, 1488 bp, Homo sapiens
  Payload ID: 18033
  Gene Name: transgelin 3
  Uniprot ID: Q9UI15
  ENST ID: ENST00000393917
  CDS Start-End: 553-1152
gtgcagctgctggcctcgtagacaatcggctgtctccccagaagagggaaagaattgtgcagatgagaaagaggctctcagcgggagggaggcaggcgggcttgattgacacaggagagggctggctttttggagggctcttagcaacggccctggttgagccccctcagccatgagaaaatcaaatcaatgtgccattcttccaggcgcgaggcagcagcggctgcagttcaacatgaaaggaggcttcctccctgcctgctaattacctgctcttcccgatctcatcgtttctgcctttgcaaagtgctactgagaagggggaagaaacgtccgccacccatcccccttgctgcctgggggttcagacttgattgtgaaaccccattggcttcattggctccttgatttaaaccacgcccggctttctgccctctttgctgctgctgggccaggttgcccagccatatcccagccccgtctgcagggagccggaggctgctgctgctgctattgtgtggatgccgcgcgtgtcttctcttctttccagagatggctaacaggggcccgagctatggcttaagccgagaggtgcaggagaagatcgagcagaagtatgatgcggacctggagaacaagctggtggactggatcatcctgcagtgcgccgaggacatagagcacccgccccccggcagggcccattttcagaaatggttaatggacgggacggtcctgtgcaagctgataaatagtttatacccaccaggacaagagcccatacccaagatctcagagtcaaagatggcttttaagcagatggagcaaatctcccagttcctaaaagctgcggagacctatggtgtcagaaccaccgacatctttcagacggtggatctatgggaagggaaggacatggcagctgtgcagaggaccctgatggctttaggcagcgttgcagtcaccaaggatgatggctgctatcggggagagccatcctggtttcacaggaaagcccagcagaatcggagaggcttttccgaggagcagcttcgccagggacagaacgtaataggcctgcagatgggcagcaacaagggagcctcccaggcgggcatgacagggtacgggatgcccaggcagatcatgtaggacgcggcatcctgcccctggtagagaggacgaatgttccacaccatggtctctacgaaaaagaaatagttagtcaccttctgaccttctcctctttctcaaagccttctgtccctggtttttgcaagtgctgcatttccgccgagaatccgcgttgcctactgctgccacctcctgttcatttagaactatgcaaagactccgcttccgttttcctgagctcctcgggccccagagtctctgtttgattatttatttatttatttatttatttgccaaaaattctcctcttcaacttatagaatgcacctaataaagtaattagtcttgtgtctt

SEQ ID NO: 192666 - DNA, 1164 bp, Homo sapiens
  Payload ID: 18033
  Gene Name: transgelin 3
  Uniprot ID: Q9UI15
  ENST ID: ENST00000455401
  CDS Start-End: 235-834
ccggaggtttattctagagttactggcgggtagctgtgcttttctttcccgtttgtaggtgaaaccccattggcttcattggctccttgatttaaaccacgcccggctttctgccctctttgctgctgctgggccaggttgcccagccatatcccagccccgtctgcagggagccggaggctgctgctgctgctattgtgtggatgccgcgcgtgtcttctcttctttccagagatggctaacaggggcccgagctatggcttaagccgagaggtgcaggagaagatcgagcagaagtatgatgcggacctggagaacaagctggtggactggatcatcctgcagtgcgccgaggacatagagcacccgccccccggcagggcccattttcagaaatggttaatggacgggacggtcctgtgcaagctgataaatagtttatacccaccaggacaagagcccatacccaagatctcagagtcaaagatggcttttaagcagatggagcaaatctcccagttcctaaaagctgcggagacctatggtgtcagaaccaccgacatctttcagacggtggatctatgggaagggaaggacatggcagctgtgcagaggaccctgatggctttaggcagcgttgcagtcaccaaggatgatggctgctatcggggagagccatcctggtttcacaggaaagcccagcagaatcggagaggcttttccgaggagcagcttcgccagggacagaacgtaataggcctgcagatgggcagcaacaagggagcctcccaggcgggcatgacagggtacgggatgcccaggcagatcatgtaggacgcggcatcctgcccctggtagagaggacgaatgttccacaccatggtctctacgaaaaagaaatagttagtcaccttctgaccttctcctctttctcaaagccttctgtccctggtttttgcaagtgctgcatttccgccgagaatccgcgttgcctactgctgccacctcctgttcatttagaactatgcaaagactccgcttccgttttcctgagctcctcgggccccagagtctctgtttgattatttatttatttatttatttatttgccaaaaattctcctcttcaacttatagaatgcacctaataaagtaattagtcttg

SEQ ID NO: 192667 - DNA, 920 bp, Homo sapiens
  Payload ID: 18033
  Gene Name: transgelin 3
  ENST ID: ENST00000486460
  CDS Start-End: 243-590
ggaatggcgctcccaggctacaggaatctctgtagtaaggagcagcattaggaatggggtcctctgggtctttggggcttagtataggagcctggctacacagcccagagcccgtgccttcctagggcccatgacttgctcctgcccaaactggatgagcagtgtcccacgtcctgtgcaagctgataaatagtttatacccaccaggacaagagcccatacccaagatctcagagtcaaagatggcttttaagcagatggagcaaatctcccagttcctaaaagctgcggagacctatggtgtcagaaccaccgacatctttcagacggtggatctatgggaagggaaggacatggcagctgtgcagaggaccctgatggctttaggcagcgttgcagtcaccaaggatgatggctgctatcggggagagccatcctggtttcacaggaaagcccagcagaatcggagaggcttttccgaggagcagcttcgccagggacagaacgtaataggcctgcagatgggcagcaacaagggagcctcccaggcgggcatgacagggtacgggatgcccaggcagatcatgtaggacgcggcatcctgcccctggtagagaggacgaatgttccacaccatggtctctacgaaaaagaaatagttagtcaccttctgaccttctcctctttctcaaagccttctgtccctggtttttgcaagtgctgcatttccgccgagaatccgcgttgcctactgctgccacctcctgttcatttagaactatgcaaagactccgcttccgttttcctgagctcctcgggccccagagtctctgtttgattatttatttatttatttatttatttgccaaaaattctcctcttcaacttatagaatgcacctaataaagtaattagtcttg

SEQ ID NO: 192668 - DNA, 1301 bp, Homo sapiens
  Payload ID: 18033
  Gene Name: transgelin 3
  Uniprot ID: Q9UI15
  ENST ID: ENST00000478951
  CDS Start-End: 454-1053
ggggaaagtagcttggctattcccgacagatggacagttggtagaacggaccctcccacaggccctcatccccttgtgcagctgctggcctcgtagacaatcggctgtctccccagaagagggaaagaattgtgcagatgagaaagaggctctcagcgggagggaggcaggcgggcttgattgacacaggagagggctggctttttggagggctcttagcaacggccctggttgagccccctcagccatgagaaaatcaaatcaatgtgccattcttccaggcgcgaggcagcagcggctgcagttcaacatgaaaggaggcttcctccctgcctgctaattacctgctcttcccgatctcatcgtttctgcctttgcaaagtgctactgagaagggggaagaaacgtccgccacccatcccccttgctgcctgggggttcagacttgattagatggctaacaggggcccgagctatggcttaagccgagaggtgcaggagaagatcgagcagaagtatgatgcggacctggagaacaagctggtggactggatcatcctgcagtgcgccgaggacatagagcacccgccccccggcagggcccattttcagaaatggttaatggacgggacggtcctgtgcaagctgataaatagtttatacccaccaggacaagagcccatacccaagatctcagagtcaaagatggcttttaagcagatggagcaaatctcccagttcctaaaagctgcggagacctatggtgtcagaaccaccgacatctttcagacggtggatctatgggaagggaaggacatggcagctgtgcagaggaccctgatggctttaggcagcgttgcagtcaccaaggatgatggctgctatcggggagagccatcctggtttcacaggaaagcccagcagaatcggagaggcttttccgaggagcagcttcgccagggacagaacgtaataggcctgcagatgggcagcaacaagggagcctcccaggcgggcatgacagggtacgggatgcccaggcagatcatgtaggacgcggcatcctgcccctggtagagaggacgaatgttccacaccatggtctctacgaaaaagaaatagttagtcaccttctgaccttctcctctttctcaaagccttctgtccctggtttttgcaagtgctgcatttccgccgagaatccgcgttgcctactgctgccacctcctgttcatttagaactatgcaaagactccgcttccgttttcctgagctcctcgggccccagagtctctgtttga

SEQ ID NO: 192669 - DNA, 648 bp, Homo sapiens
  Payload ID: 18033
  Gene Name: transgelin 3
  ENST ID: ENST00000469385
  CDS Start-End: 1-237
gtcctgtgcaagctgataaatagtttatacccaccaggacaagagcccatacccaagatctcagagtcaaagatggcttttaagcagatggagcaaatctcccagttcctaaaagctgcggagacctatggtgtcagaaccaccgacatctttcagacggtggatctatgggaaggaaagcccagcagaatcggagaggcttttccgaggagcagcttcgccagggacagaacgtaataggcctgcagatgggcagcaacaagggagcctcccaggcgggcatgacagggtacgggatgcccaggcagatcatgtaggacgcggcatcctgcccctggtagagaggacgaatgttccacaccatggtctctacgaaaaagaaatagttagtcaccttctgaccttctcctctttctcaaagccttctgtccctggtttttgcaagtgctgcatttccgccgagaatccgcgttgcctactgctgccacctcctgttcatttagaactatgcaaagactccgcttccgttttcctgagctcctcgggccccagagtctctgtttgattatttatttatttatttatttatttgccaaaaattctcctcttcaacttatagaatgcacctaataaagtaattagtcttgt

SEQ ID NO: 192670 - DNA, 566 bp, Homo sapiens
  Payload ID: 18033
  Gene Name: transgelin 3
  ENST ID: ENST00000494932
  CDS Start-End: 76-566
ccgtctgcagggagccggaggctgctgctgctgctattgtgtggatgccgcgcgtgtcttctcttctttccagagatggctaacaggggcccgagctatggcttaagccgagaggtgcaggagaagatcgagcagaagtatgatgcggacctggagaacaagctggtggactggatcatcctgcagtgcgccgaggacatagagcacccgccccccggcagggcccattttcagaaatggttaatggacgggacggaaagcccagcagaatcggagaggcttttccgaggagcagcttcgccagggacagaacgtaataggcctgcagatgggcagcaacaagggagcctcccaggcgggcatgacagggtacgggatgcccaggcagatcatgtaggacgcggcatcctgcccctggtagagaggacgaatgttccacaccatggtctctacgaaaaagaaatagttagtcaccttctgaccttctcctctttctcaaagccttctgtccctggtttttgcaagtgctgcatttccgccgagaatccgcgttgcctactgctgcc

SEQ ID NO: 192671 - DNA, 1177 bp, Homo sapiens
  Payload ID: 18033
  Gene Name: transgelin 3
  ENST ID: ENST00000617143
  CDS Start-End: 247-912
gagggctcttagcaacggccctggttgagccccctcagccatgagaaaatcaaatcaatgtgccattcttccaggcgcgaggcagcagcggctgcagttcaacatgaaaggaggcttcctccctgcctgctaattacctgctcttcccgatctcatcgtttctgcctttgcaaagtgctactgagaagggggaagaaacgtccgccacccatcccccttgctgcctgggggttcagacttgattagatggctaacaggggcccgagctatggcttaagccgagaggtgcaggagaagatcgagcagaagtatgatgcggacctggagaacaagctggtggactggatcatcctgcagtgcgccgaggacatagagcacccgccccccggcagggcccattttcagaaatggttaatggacgggacggtcctgtgcaagctgataaatagtttatacccaccaggacaagagcccatacccaagatctcagagtcaaagatggcttttaagcagatggagcaaatctcccagttcctaaaagctgcggagacctatggtgtcagaaccaccgacatctttcagacggtggatctatgggaagggaaggacatggcagctgtgcagaggaccctgatggctttaggcagcgttgcagtcaccaaggatgatggctgctatcggggagagccatcctggtttcacaggaaagcccagcagaatcggagaggcttttccgaggagcagcttcgccagggacagaacgtaataggcctgcagatgggcagcaacaagggagcctcccaggcgggcatgacagggtacgggatgccaggcagatcatgtaggacgcggcatctgcccctggtagagaggacgaatgttccacaccatggtctctacgaaaagaaatagttagtcaccttctgaccttctcctctttctcaaagccttctgtccctggtttttgcaagtgctgcatttccgccgagaatccgcgttgcctactgctgccacctcctgttcatttagaactatgcaaagactccgcttccgttttcctgagctcctcgggccccagagtctctgtttgattatttatttatttatttatttatttgccaaaaattctcctcttcaacttatagaatgcacctaataaagtaattagtcttgtgtc

SEQ ID NO: 192672 - DNA, 2777 bp, Homo sapiens
  Payload ID: 18034
  Gene Name: transglutaminase 1
  Uniprot ID: P22735
  ENST ID: ENST00000206765
  CDS Start-End: 125-2578
acataagtcacttaccaggtctgtccctgcggcatccagtctgtgggtcctgtcccatccatcctgacctgttccatctcagccccaggactcagtactgcggttgccaacactgctgccaggcatgatggatgggccacgttccgatgtgggccgttggggtggcaaccccttgcagccccctaccacgccatctccagagccagagccagagccagacggacgctctcgcagaggaggaggccgttccttctgggctcgctgctgtggctgctgttcatgccgaaatgcggcagatgacgactggggacctgaaccctctgactccaggggtcgagggtccagctctggcactcgaagacctggctcccggggctcagactcccgccggcctgtatcccggggcagcggtgtcaatgcagctggagatggcaccatccgagagggcatgctagtagtgaacggtgtggacttgctgagctcgcgctcggaccagaaccgccgagagcaccacacagacgagtatgagtacgacgagctgatagtgcgccgcgggcagcctttccatatgctcctcctcctgtcccggacctatgaatcctctgatcgcatcacccttgagttactcatcggaaacaaccccgaggtgggcaagggcacgcacgtgatcatcccagtgggcaaggggggcagtggaggctggaaagcccaggtggtcaaggccagtgggcagaatctgaacctgcgggtccacacttcccccaacgccatcatcggcaagtttcagttcacagtccgcacacaatcagacgctggggagttccagttgccctttgacccccgcaatgagatctacatcctcttcaacccctggtgcccagaggacattgtgtacgtggaccatgaggattggcggcaggagtatgttcttaatgagtctgggagaatttactacgggaccgaagcacagattggtgagcggacctggaactacggccagtttgaccacggggtgctggatgcctgcttatacatcctggaccggcgggggatgccatatggaggccgtggagacccagtcaatgtctcccgggtcatctctgccatggtgaactccctggatgacaatggagtcctgattgggaactggtctggtgattactcccgaggcaccaacccatcagcgtgggtgggcagcgtggagatcctgcttagctacctacgcacgggatattccgtcccctatggccagtgctgggtctttgctggcgtgaccaccacagtgctgcgctgcctgggtctggccacccgtactgtcaccaacttcaactccgcccacgacacagacacatcccttaccatggacatctacttcgacgagaacatgaagcccctggagcacctgaaccatgattctgtctggaacttccatgtgtggaacgactgctggatgaagaggccggatctgccctcgggctttgatgggtggcaggtggtggatgccacaccccaagagactagcagtggcatcttctgctgcggcccctgctctgtggagtccatcaagaatggcctggtctacatgaagtacgacacgcctttcatttttgctgaggtgaatagtgacaaggtgtactggcagcggcaggatgatggcagcttcaagattgtttatgtggaggagaaggccatcggcacactcattgtcacaaaggccatcagctccaacatgcgggaggacatcacctacctctataagcacccagaaggctcagacgcagagcggaaggcagtagagacagcagcagcccacggcagcaaacccaatgtgtatgccaaccggggctcagcggaggatgtggccatgcaggtggaggcacaggacgcggtgatggggcaggatctgatggtctctgtgatgctgatcaatcacagcagcagccgccgcacagtgaaactgcacctctacctctcagtcactttctatactggtgtcagtggtaccatcttcaaggagaccaagaaggaagtggagctggcaccaggggcctcggaccgtgtgaccatgccagtggcctacaaggaataccggccccatcttgtggaccagggggccatgctgctcaatgtctcaggccacgtcaaggagagcgggcaggtgctggccaagcagcacaccttccgtctgcgcaccccagacctctccctcacgttactgggagcagcagtggttggccaggagtgtgaagtacagattgtcttcaagaacccccttcccgtcaccctcaccaatgtcgtcttccggctcgaaggctctgggttacagaggcccaagatcctcaacgttggggacattggaggcaatgaaacagtgacactgcgccagtcgtttgtgcctgtgcgaccaggcccccgccagctcattgccagcttggacagcccacagctctcccaggtgcacggtgtcatccaggtggatgtggccccagcccctggggatgggggcttcttctcagacgctggaggtgacagtcacttaggagagaccatccctatggcatctcgaggtggagcttagccccgtgccaggagcaatgggactggagtcagatgagcaaggacattgccccaagataggggcacactacagagcagctccccaggagctcaggtggggagtccagggctcccggagggggagtccagggctcccggagagggagtcagtcttcacttgcactgggggaacagatgctaataaactgttttttaatgaa

SEQ ID NO: 192673 - DNA, 1581 bp, Homo sapiens
  Payload ID: 18034
  Gene Name: transglutaminase 1
  Uniprot ID: P22735
  ENST ID: ENST00000544573
  CDS Start-End: 349-1476
ggcatccagtctgtgggtcctgtcccatccatcctgacctgttccatctcagccccaggactcagtactgcggttgccaacactgctgccaggcatgatggatgggccacgttccgatgtgggccgttggggtggcaaccccttgcagccccctaccacgccatctccagagccagagccagagccagacggacgctctcgcagaggaggaggccgttccttctgggctcgctgctgtggctgctgttcatgccgaaatgcggcagatgacgactggggacctgaaccctctgactccaggggtcgagggtccagctctggaacttccatgtgtggaacgactgctggatgaagaggccggatctgccctcgggctttgatgggtggcaggtggtggatgccacaccccaagagactagcagtggcatcttctgctgcggcccctgctctgtggagtccatcaagaatggcctggtctacatgaagtacgacacgcctttcatttttgctgaggtgaatagtgacaaggtgtactggcagcggcaggatgatggcagcttcaagattgtttatgtggaggagaaggccatcggcacactcattgtcacaaaggccatcagctccaacatgcgggaggacatcacctacctctataagcacccagaaggctcagacgcagagcggaaggcagtagagacagcagcagcccacggcagcaaacccaatgtgtatgccaaccggggctcagcggaggatgtggccatgcaggtggaggcacaggacgcggtgatggggcaggatctgatggtctctgtgatgctgatcaatcacagcagcagccgccgcacagtgaaactgcacctctacctctcagtcactttctatactggtgtcagtggtaccatcttcaaggagaccaagaaggaagtggagctggcaccaggggcctcggaccgtgtgaccatgccagtggcctacaaggaataccggccccatcttgtggaccagggggccatgctgctcaatgtctcaggccacgtcaaggagagcgggcaggtgctggccaagcagcacaccttccgtctgcgcaccccagacctctccctcacgttactgggagcagcagtggttggccaggagtgtgaagtacagattgtcttcaagaacccccttcccgtcaccctcaccaatgtcgtcttccggctcgaaggctctgggttacagaggcccaagatcctcaacgttggggacattggaggcaatgaaacagtgacactgcgccagtcgtttgtgcctgtgcgaccaggcccccgccagctcattgccagcttggacagcccacagctctcccaggtgcacggtgtcatccaggtggatgtggccccagcccctggggatgggggcttcttctcagacgctggaggtgacagtcacttaggagagaccatccctatggcatctcgaggtggagcttagccccgtgccaggagcaatgggactggagtcagatgagcaaggacattgccccaagataggggcacactacagagcagctccccaggagctcaggtggggagtcca

SEQ ID NO: 192674 - DNA, 469 bp, Homo sapiens
  Payload ID: 18034
  Gene Name: transglutaminase 1
  ENST ID: ENST00000561067
  CDS Start-End: 442-469
acccccgggcaggttctggtgcttggagctggacaagaaaaggcagtgtgggtgtggagggctccctgccagttcctggggcctctctgtccccactccccacggcacctccctgcctgatgcatcaccaaacagcccctcctggattctgtttccttgtgtcttcttgtcggcctgtttttactgtcttctgctaggcggcccatgggcagagctgggacactagtgggaaggaaggaaagaaggaagaaggccctggctgacgggcctgaggacaagacccaaggagagcctccctgaagatgcctagcctcctcctctctaccttgggatcgccttggtgccatcctcagtgtttccccagtgacggggtggagtaaggatgcacacagcacaggtgcctgagccggttggtctggattcccaggaagaattccaggcatgatggatgggccacgttccgatgtgg

SEQ ID NO: 192675 - DNA, 527 bp, Homo sapiens
  Payload ID: 18034
  Gene Name: transglutaminase 1
  ENST ID: ENST00000560443
  CDS Start-End: 334-527
gtcggcctgtttttactgtcttctgctaggcggcccatgggcagagctgggacactagtgggaaggaaggaaagaaggaagaaggccctggctgacgggcctgaggacaagacccaaggagagcctccctgaagatgcctagcctcctcctctctaccttgggatcgccttggtgccatcctcagtgtttccccagtgacggggtggagtaaggatgcacacagcacaggtgcctgagccggttggtctggattcccaggaagaattccaggttggagaaaagggaatcctctagtccaactgagcagagactcctctcagtgagagaaaggcatgatggatgggccacgttccgatgtgggccgttggggtggcaaccccttgcagccccctaccacgccatctccagagccagagccagagccagacggacgctctcgcagaggaggaggccgttccttctgggctcgctgctgtggctgctgttcatgccgaaatgcggcagatgacgactggggacctgaacc

SEQ ID NO: 192676 - DNA, 562 bp, Homo sapiens
  Payload ID: 18034
  Gene Name: transglutaminase 1
  ENST ID: ENST00000560478
  CDS Start-End: 412-562
taggcggcccatgggcagagctgggacactagtgggaaggaaggaaagaaggaagaaggccctggctgacgggcctgaggacaagacccaaggagagcctccctgaagatgcctagcctcctcctctctaccttgggatcgccttggtgccatcctcagtgtttccccagtgacggggtggagtaaggatgcacacagcacaggtgcctgagccggttggtctggattcccaggaagaattccaggttggagaaaagggaatcctctagtccaactgagcagagactcctctcagtgagagaaaggtctgtccctgcggcatccagtctgtgggtcctgtcccatccatcctgacctgttccatctcagccccaggactcagtactgcggttgccaacactgctgccaggcatgatggatgggccacgttccgatgtgggccgttggggtggcaaccccttgcagccccctaccacgccatctccagagccagagccagagccagacggacgctctcgcagaggaggaggccgttccttctgggctcgctgctgtggctgct

SEQ ID NO: 192677 - DNA, 898 bp, Homo sapiens
  Payload ID: 18034
  Gene Name: transglutaminase 1
  ENST ID: ENST00000559136
  CDS Start-End: 271-898
ttttcttctgtggacatgagtcctgcagaactggccagaagtaggtgaggcccagggagagaactggagggaaccagttttgtgtgttctggggacacagaggacattgtgtacgtggaccatgaggattggcggcaggagtatgttcttaatgagtctgggagaatttactacgggaccgaagcacagattggtgagcggacctggaactacggccagtttgaccacggggtgctggatgcctgcttatacatcctggaccggcgggggatgccatatggaggccgtggagacccagtcaatgtctcccgggtcatctctgccatggtgaactccctggatgacaatggagtcctgattgggaactggtctggtgattactcccgaggcaccaacccatcagcgtgggtgggcagcgtggagatcctgcttagctacctacgcacgggatattccgtcccctatggccagtgctgggtctttgctggcgtgaccaccacagtgctgcgctgcctgggtctggccacccgtactgtcaccaacttcaactccgcccacgacacagacacatcccttaccatggacatctacttcgacgagaacatgaagcccctggagcacctgaaccatgattctgtctggaacttccatgtgtggaacgactgctggatgaagaggccggatctgccctcgggctttgatgggtggcaggtggtggatgccacaccccaagagactagcagtggcatcttctgctgcggcccctgctctgtggagtccatcaagaatggcctggtctacatgaagtacgacacgcctttcatttttgctgaggtgaatagtgacaaggtgtactggcagcggcaggatgatggcagcttcaagattgtttatgtgg

SEQ ID NO: 192678 - DNA, 412 bp, Homo sapiens
  Payload ID: 18034
  Gene Name: transglutaminase 1
  ENST ID: ENST00000559669
  CDS Start-End: 1-387
tacctctcagtcactttctatactggtgtcagtggtaccatcttcaaggagaccaagaaggaagtggagctggcaccaggggcctcggaccgtgtgaccatgccagtggcctacaaggaataccggccccatcttgtggaccagggggccatgctgctcaatgtctcaggccacgtcaaggagagcgggcaggtgctggccaagcagcacaccttccgtctgcgcaccccagacctctccctcacgttactgggagcagcagtggttggccaggagtgtgaagtacagattgtcttcaagaacccccttcccgtcaccctcaccaatgtcgtcttccggctcgaaggctctgggttacagaggcccaagatcctcaacgttgggtgagtctggcctctccccctacccctgc

SEQ ID NO: 192679 - DNA, 555 bp, Homo sapiens
  Payload ID: 18034
  Gene Name: transglutaminase 1
  ENST ID: ENST00000558074
  CDS Start-End: 151-555
agaactcggcagcaggagcctgtgagagcagagtcacttaccaggtctgtccctgcggcatccagtctgtgggtcctgtcccatccatcctgacctgttccatctcagccccaggactcagtactgcggttgccaacactgctgccaggcatgatggatgggccacgttccgatgtgggccgttggggtggcaaccccttgcagccccctaccacgccatctccagagccagagccagagccagacggacgctctcgcagaggaggaggccgttccttctgggctcgctgctgtggctgctgttcatgccgaaatgcggcagatgacgactggggacctgaaccctctgactccaggggtcgagggtccagctctggcactcgaagacctggctcccggggctcagactcccgccggcctgtatcccggggcagcggtgtcaatgcagctggagatggcaccatccgagagggcatgctagtagtgaacggtgtggacttgctgagctcgcgctcggaccagaaccgccgagagcaccacacagacgagtatgag

SEQ ID NO: 192680 - DNA, 580 bp, Homo sapiens
  Payload ID: 18034
  Gene Name: transglutaminase 1
  ENST ID: ENST00000560226
  CDS Start-End: 455-580
acagaactcggcagcaggagcctgtgagagcagaggtaggcagcctaagcttgggaccagaaggtcggccagacagggctgtgggtggaagggcctgcctgccccactgcccttgcagcttcttcatccgggagaaggggctcctcacatgcccagtctggtaggaatcagcctggtgccaggggccatcacagcggtggctcccaccaaagcccagcctaagcccccagacctcacccctgctccctccctagcatcttctccccatttcccgcccagaggcctggcctcttctctccgccccctacagcagtttggcccctccctcccacataagtcacttaccaggtctgtccctgcggcatccagtctgtgggtcctgtcccatccatcctgacctgttccatctcagccccaggactcagtactgcggttgccaacactgctgccaggcatgatggatgggccacgttccgatgtgggccgttggggtggcaaccccttgcagccccctaccacgccatctccagagccagagccagagccagacggacgctctcgcagaggaggaggccgttcc

SEQ ID NO: 192681 - DNA, 5070 bp, Homo sapiens
  Payload ID: 18035
  Gene Name: transglutaminase 2
  Uniprot ID: P21980
  ENST ID: ENST00000361475
  CDS Start-End: 175-2238
actgggcaatgggtggcctcccaggtcgccgccttcccgcggggccccgcccccggcccgccccaaagcgggctataagttagcgccgctctccgcctcggcagtgccagccgccagtggtcgcacttggagggtctcgccgccagtggaaggagccaccgcccccgcccgaccatggccgaggagctggtcttagagaggtgtgatctggagctggagaccaatggccgagaccaccacacggccgacctgtgccgggagaagctggtggtgcgacggggccagcccttctggctgaccctgcactttgagggccgcaactacgaggccagtgtagacagtctcaccttcagtgtcgtgaccggcccagcccctagccaggaggccgggaccaaggcccgttttccactaagagatgctgtggaggagggtgactggacagccaccgtggtggaccagcaagactgcaccctctcgctgcagctcaccaccccggccaacgcccccatcggcctgtatcgcctcagcctggaggcctccactggctaccagggatccagctttgtgctgggccacttcattttgctcttcaacgcctggtgcccagcggatgctgtgtacctggactcggaagaggagcggcaggagtatgtcctcacccagcagggctttatctaccagggctcggccaagttcatcaagaacataccttggaattttgggcagtttgaagatgggatcctagacatctgcctgatccttctagatgtcaaccccaagttcctgaagaacgccggccgtgactgctcccgccgcagcagccccgtctacgtgggccgggtggtgagtggcatggtcaactgcaacgatgaccagggtgtgctgctgggacgctgggacaacaactacggggacggcgtcagccccatgtcctggatcggcagcgtggacatcctgcggcgctggaagaaccacggctgccagcgcgtcaagtatggccagtgctgggtcttcgccgccgtggcctgcacagtgctgaggtgcctgggcatccctacccgcgtcgtgaccaactacaactcggcccatgaccagaacagcaaccttctcatcgagtacttccgcaatgagtttggggagatccagggtgacaagagcgagatgatctggaacttccactgctgggtggagtcgtggatgaccaggccggacctgcagccggggtacgagggctggcaggccctggacccaacgccccaggagaagagcgaagggacgtactgctgtggcccagttccagttcgtgccatcaaggagggcgacctgagcaccaagtacgatgcgccctttgtctttgcggaggtcaatgccgacgtggtagactggatccagcaggacgatgggtctgtgcacaaatccatcaaccgttccctgatcgttgggctgaagatcagcactaagagcgtgggccgagacgagcgggaggatatcacccacacctacaaatacccagaggggtcctcagaggagagggaggccttcacaagggcgaaccacctgaacaaactggccgagaaggaggagacagggatggccatgcggatccgtgtgggccagagcatgaacatgggcagtgactttgacgtctttgcccacatcaccaacaacaccgctgaggagtacgtctgccgcctcctgctctgtgcccgcaccgtcagctacaatgggatcttggggcccgagtgtggcaccaagtacctgctcaacctcaacctggagcctttctctgagaagagcgttcctctttgcatcctctatgagaaataccgtgactgccttacggagtccaacctcatcaaggtgcgggccctcctcgtggagccagttatcaacagctacctgctggctgagagggacctctacctggagaatccagaaatcaagatccggatccttggggagcccaagcagaaacgcaagctggtggctgaggtgtccctgcagaacccgctccctgtggccctggaaggctgcaccttcactgtggagggggccggcctgactgaggagcagaagacggtggagatcccagaccccgtggaggcaggggaggaagttaaggtgagaatggacctgctgccgctccacatgggcctccacaagctggtggtgaacttcgagagcgacaagctgaaggctgtgaagggcttccggaatgtcatcattggccccgcctaagggacccctgctcccagcctgctgagagcccccaccttgatcccaatccttatcccaagctagtgagcaaaatatgccccttcttgggccccagaccccagggcagggtgggcagcctatgggggctctcggaaatggaatgtgcccctggcccatctcagcctcctgagcctgtgggtccccactcaccccctttgctgtgaggaatgctctgtgccagaaacagtgggagccctgaccttggctgactggggctggggtgagagaggaaagacctacattccctctcctgcccagatgccctttggaaagccattgaccacccaccatattgtttgatctacttcatagctccttggagcaggcaaaaaagggacagcatgccccttggctggatcagggaatccagctccctagactgcatcccgtacctcttcccatgactgcacccagctccaggggcccttgggacagccagagctgggtggggacagtgataggcccaaggtcccctccacatcccagcagcccaagcttaatagccctccccctcaacctcaccattgtgaagcacctactatgtgctgggtgcctcccacacttgctggggctcacggggcctccaacccatttaatcaccatgggaaactgttgtgggcgctgcttccaggataaggagactgaggcttagagagaggaggcagccccctccacaccagtggcctcgtggttattagcaaggctgggtaatgtgaaggcccaagagcagagtctgggcctctgactctgagtccactgctccatttataaccccagcctgacctgagactgtcggagaggctgtctggggcctttatcaaaaaaagactcagccaagacaaggaggtagagaggggactgggggactgggagtcagagccctggctgggttcaggtcccacgtctggccaggcactgccttctcctctctgggcctttgtttccttgttggtcagaggagtgattgaaccagctcatctccaaggatcctctccactccatgtttgcaatgcttttatatggcccagccttgtaaataaccacaaggtccactccctgctccacgaagccttaagccataggcccaggatatttctgagagtgaaaccatgactgtgaccaccttctgtccccagccctgtcctggttccttcctatgcccaggtaccacccttcagaccccagttctaggggagaagagccctggacacccctgctctacccatgagcctgcccgctgcaatgcctagacttcccaacagccttagctgccagtgctggtcactaaccaacaaggttggcaccccagctaccccttctttgcagggctaaggcccccaaacatagcccctgccccggaggaagcttggggaacccatgagttgtcagctttgactttatctcctgctctttctacatgactgggcctcccttgggctggaagaattggggattctctattggaggtgagatcacagcctccagggccccccaaatcccagggaaggacttggagagaatcatgctgttgcatttagaactttctgctttgcacaggaaagagtcacacaattaatcaacatgtatattttctctatacatagagctctatttctctacggttttataaaagccttgggttccaaccaggcagtagatgtgcttctgaaccgcaaggagcaaacactgaaataaaatagtttatttttcacactcaaactaggtctggtctgttcctttatgagtttggagggagatgggtaggtgagctcgctcacacctggacccccacttcctgcctaggagtctttcctgagcctcagccctgtccctgcgtttaaactttactggcattcaaggtcctacacaggctggctccatctccggccccttccaccaacagtctgtttttgggccacaattaacttcctgtatccccagaacaccctgcgtagttgtctacctcttggcttttgtgtatgtagttccctgagcctggagtgcccctccttttctttccctgcttggcaaactcctactcatcctataatgcttaacaccaaagtcacctcttctgtgaaaccttccttgatatcttttcgggtccccagagtcctggaatatggaccaattcaaacatttatcacagtaaattttacttccacgttggcctatctgtccccttctccatcctatctgaagccctcgaggcagggaccacgtatctcttaaatacactaataaatgctgaattggtaaatgaatgtttcctaactcaactcccacaagacctgtgctgtcccatagaaataatacatgagccacaaatgcaagccacatatgtaatttagaattttctagtgaccacattgaaaacagtaaaaaagccataggtggaattagctttaataatgtattttatttaatccaatatatccaaaacattatttcaacatgtaatcaatataagaattagtaaggtatttgaccttcttatttttgtactcaatctttgaaatgtggtgtgtgttttatactgacagcaggtctcaatttgaactagctgcatttcaagtgctcggtagccagtctggctagtactggatgaagcaggtctagactgcgattccgtggatgtgcagacttggtcattcatctcattccccaccatcgaagcactcatgagtatctgttgaatgaatagatgatggggacagtccccacccttgggaagtcatgtagaaagacatgacatgcacataaaaaataaatcaaaataaaaacatgacatca

SEQ ID NO: 192682 - DNA, 1018 bp, Homo sapiens
  Payload ID: 18035
  Gene Name: transglutaminase 2
  ENST ID: ENST00000373403
  CDS Start-End: 177-1018
acagtggatccggaagcacaggagaccaagagaccagagataccaggatgagagataggacccctggttgccaggttcgagaagtcctaggctgagtccctggaaatgccagccgccagtggtcgcacttggagggtctcgccgccagtggaaggagccaccgcccccgcccgaccatggccgaggagctggtcttagagaggtgtgatctggagctggagaccaatggccgagaccaccacacggccgacctgtgccgggagaagctggtggtgcgacggggccagcccttctggctgaccctgcactttgagggccgcaactacgaggccagtgtagacagtctcaccttcagtgtcgtgaccggcccagcccctagccaggaggccgggaccaaggcccgttttccactaagagatgctgtggaggagggtgactggacagccaccgtggtggaccagcaagactgcaccctctcgctgcagctcaccaccccggccaacgcccccatcggcctgtatcgcctcagcctggaggcctccactggctaccagggatccagctttgtgctgggccacttcattttgctcttcaacgcctggtgcccagcggatgctgtgtacctggactcggaagaggagcggcaggagtatgtcctcacccagcagggctttatctaccagggctcggccaagttcatcaagaacataccttggaattttgggcagtttgaagatgggatcctagacatctgcctgatccttctagatgtcaaccccaagttcctgaagaacgccggccgtgactgctcccgccgcagcagccccgtctacgtgggccgggtggtgagtggcatggtcaactgcaacgatgaccagggtgtgctgctgggacgctgggacaacaactacggggacggcgtcagccccatgtcctggatcggcagcgtggacatcctgcggcgctggaagaaccacggctgccagcgcgtcaagtatggccagtgctgggtcttcgc

SEQ ID NO: 192683 - DNA, 693 bp, Homo sapiens
  Payload ID: 18035
  Gene Name: transglutaminase 2
  ENST ID: ENST00000453095
  CDS Start-End: 215-693
gttttggaaaaagtgccagggaagccccgtgggcctctgtctctccgggaacccttcccgctcagggctcacagtggatccggaagcacaggagaccaagagaccagagataccaggatgagagataggacccctggttgccagtgccagccgccagtggtcgcacttggagggtctcgccgccagtggaaggagccaccgcccccgcccgaccatggccgaggagctggtcttagagaggtgtgatctggagctggagaccaatggccgagaccaccacacggccgacctgtgccgggagaagctggtggtgcgacggggccagcccttctggctgaccctgcactttgagggccgcaactacgaggccagtgtagacagtctcaccttcagtgtcgtgaccggcccagcccctagccaggaggccgggaccaaggcccgttttccactaagagatgctgtggaggagggtgactggacagccaccgtggtggaccagcaagactgcaccctctcgctgcagctcaccaccccggccaacgcccccatcggcctgtatcgcctcagcctggaggcctccactggctaccagggatccagctttgtgctgggccacttcattttgctcttcaacgcctggtgcccagcggatgctgtgtacctggactcggaagaggagcggcaggagtatgt

SEQ ID NO: 192684 - DNA, 2642 bp, Homo sapiens
  Payload ID: 18036
  Gene Name: transglutaminase 3
  Uniprot ID: Q08188
  ENST ID: ENST00000381458
  CDS Start-End: 64-2145
gtctgtcagcactgtccgtgccattcccagaggagcctgagaagaggcagaggaaggcgaaacatggctgctctaggagtccagagtatcaactggcagacggccttcaaccgacaagcgcatcacacagacaagttctccagccaggagctcatcttgcggagaggccaaaacttccaggtcttaatgatcatgaacaaaggccttggctctaacgaaagactggagttcattgtctccacagggccttacccctcagagtcggccatgacgaaggctgtgtttccactctccaatggcagtagtggtggctggagtgcggtgcttcaggccagcaatggcaatactctgactatcagcatctccagtcctgccagcgcacccataggacggtacacaatggccctccagatcttctcccagggcggcatctcctctgtgaaacttgggacgttcatactgctttttaacccctggctgaatgtggatagcgtctttatgggtaaccacgctgagagagaagagtatgttcaggaagatgccggcatcatctttgtgggaagcacaaaccgaattggcatgattggctggaactttggacagtttgaagaagacattctcagcatctgcctctcaatcttggataggagtctgaatttccgccgtgacgctgctactgatgtggccagcagaaatgaccccaaatacgttggccgggtgctgagtgccatgatcaatagcaatgatgacaatggtgtgcttgctgggaattggagcggcacttacaccggtggccgggacccaaggagctggaacggcagcgtggagatcctcaaaaattggaaaaaatctggcttcagcccagtccgatatggccagtgctgggtctttgctgggaccctcaacacagcgctgcggtctttggggattccttcccgggtgatcaccaacttcaactcagctcatgacacagaccgaaatctcagtgtggatgtgtactacgaccccatgggaaaccccctggacaagggtagtgatagcgtatggaatttccatgtctggaatgaaggctggtttgtgaggtctgacctgggcccctcgtacggtggatggcaggtgttggatgctaccccgcaggaaagaagccaaggggtgttccagtgcggccccgcttcggtcattggtgttcgagagggtgatgtgcagctgaacttcgacatgccctttatcttcgcggaggttaatgccgaccgcatcacctggctgtacgacaacaccactggcaaacagtggaagaattccgtgaacagtcacaccattggcaggtacatcagcaccaaggcggtgggcagcaatgctcgcatggacgtcacggacaagtacaagtacccagaaggctctgaccaggaaagacaagtgttccaaaaggctttggggaaacttaaacccaacacgccatttgccgcgacgtcttcaatgggtttggaaacagaggaacaggagcccagcatcatcgggaagctgaaggtcgctggcatgctggcagtaggcaaagaagtcaacctggtcctactgctcaaaaacctgagcagggatacgaagacagtgacagtgaacatgacagcctggaccatcatctacaacggcacgcttgtacatgaagtgtggaaggactctgccacaatgtccctggaccctgaggaagaggcagaacatcccataaagatctcgtacgctcagtatgagaagtacctgaagtcagacaacatgatccggatcacagcggtgtgcaaggtcccagatgagtctgaggtggtggtggagcgggacatcatcctggacaaccccaccttgaccctggaggtgctgaacgaggctcgtgtgcggaagcctgtgaacgtgcagatgctcttctccaatccactggatgagccggtgagggactgcgtgctgatggtggagggaagcggcctgctgttgggtaacctgaagatcgacgtgccgaccctagggcccaaggaggggtcccgggtccgttttgatatcctgccctcccggagtggcaccaagcaactgctcgccgacttctcctgcaacaagttccctgcaatcaaggccatgttgtccatcgatgtagccgaatgaagggcgctggtggcctcccgtacaaacttggacaacacggagcagggagagctcaccatggaatgaaccccccgcccatgctgtccggcctgggaaaccctctccatctcccaaggctgccagacatggacctccaggctccagcacatccccctctcctctcccccaggttggggctgggtccaccctgtcctatgacttgatcacttttgcacattccctggccgcttctccccagagctgcctgctctgtgagccccacagccctgctcattcctcacgcccttcaatgctgcaggatggactggcccctgacccagggactctccaaacgggatacaggagagaagctggtctagactgtttgctgatccccaacctgcacggggcattcctgcttctctctcaggccaccacagagggcaggggatggttagtcacctgccccagcactcacaccctaactcaaaataaatgttaaataagtgcgatcacac

SEQ ID NO: 192685 - DNA, 3388 bp, Homo sapiens
  Payload ID: 18037
  Gene Name: transglutaminase 4
  Uniprot ID: P49221
  ENST ID: ENST00000296125
  CDS Start-End: 69-2123
gactgtgtggaagcaccaggcatcagagatagagtcttccctggcattgcaggagagaatctgaagggatgatggatgcatcaaaagagctgcaagttctccacattgacttcttgaatcaggacaacgccgtttctcaccacacatgggagttccaaacgagcagtcctgtgttccggcgaggacaggtgtttcacctgcggctggtgctgaaccagcccctacaatcctaccaccaactgaaactggaattcagcacagggccgaatcctagcatcgccaaacacaccctggtggtgctcgacccgaggacgccctcagaccactacaactggcaggcaacccttcaaaatgagtctggcaaagaggtcacagtggctgtcaccagttcccccaatgccatcctgggcaagtaccaactaaacgtgaaaactggaaaccacatccttaagtctgaagaaaacatcctataccttctcttcaacccatggtgtaaagaggacatggttttcatgcctgatgaggacgagcgcaaagagtacatcctcaatgacacgggctgccattacgtgggggctgccagaagtatcaaatgcaaaccctggaactttggtcagtttgagaaaaatgtcctggactgctgcatttccctgctgactgagagctccctcaagcccacagataggagggaccccgtgctggtgtgcagggccatgtgtgctatgatgagctttgagaaaggccagggcgtgctcattgggaattggactggggactacgaaggtggcacagccccatacaagtggacaggcagtgccccgatcctgcagcagtactacaacacgaagcaggctgtgtgctttggccagtgctgggtgtttgctgggatcctgactacagtgctgagagcgttgggcatcccagcacgcagtgtgacaggcttcgattcagctcacgacacagaaaggaacctcacggtggacacctatgtgaatgagaatggcgagaaaatcaccagtatgacccacgactctgtctggaatttccatgtgtggacggatgcctggatgaagcgaccggatctgcccaagggctacgacggctggcaggctgtggacgcaacgccgcaggagcgaagccagggtgtcttctgctgtgggccatcaccactgaccgccatccgcaaaggtgacatctttattgtctatgacaccagattcgtcttctcagaagtgaatggtgacaggctcatctggttggtgaagatggtgaatgggcaggaggagttacacgtaatttcaatggagaccacaagcatcgggaaaaacatcagcaccaaggcagtgggccaagacaggcggagagatatcacctatgagtacaagtatccagaaggctcctctgaggagaggcaggtcatggatcatgccttcctccttctcagttctgagagggagcacagacgacctgtaaaagagaactttcttcacatgtcggtacaatcagatgatgtgctgctgggaaactctgttaatttcaccgtgattcttaaaaggaagaccgctgccctacagaatgtcaacatcttgggctcctttgaactacagttgtacactggcaagaagatggcaaaactgtgtgacctcaataagacctcgcagatccaaggtcaagtatcagaagtgactctgaccttggactccaagacctacatcaacagcctggctatattagatgatgagccagttatcagaggtttcatcattgcggaaattgtggagtctaaggaaatcatggcctctgaagtattcacgtctttccagtaccctgagttctctatagagttgcctaacacaggcagaattggccagctacttgtctgcaattgtatcttcaagaataccctggccatccctttgactgacgtcaagttctctttggaaagcctgggcatctcctcactacagacctctgaccatgggacggtgcagcctggtgagaccatccaatcccaaataaaatgcaccccaataaaaactggacccaagaaatttatcgtcaagttaagttccaaacaagtgaaagagattaatgctcagaagattgttctcatcaccaagtagccttgtctgatgctgtggagccttagttgagatttcagcatttcctaccttgtgcttagctttcagattatggatgattaaatttgatgacttatatgagggcagattcaagagccagcaggtcaaaaaggccaacacaaccataagcagccagacccacaaggccaggtcctgtgctatcacagggtcacctcttttacagttagaaacaccagccgaggccacagaatcccatccctttcctgagtcatggcctcaaaaatcagggccaccattgtctcaattcaaatccatagatttcgaagccacagagtctctccctggagcagcagactatgggcagcccagtgctgccacctgctgacgacccttgagaagctgccatatcttcaggccatgggttcaccagccctgaaggcacctgtcaactggagtgctctctcagcactgggatgggcctgatagaagtgcattctcctcctattgcctccattctcctctctctatccctgaaatccaggaagtccctctcctggtgctccaagcagtttgaagcccaatctgcaaggacatttctcaagggccatgtggttttgcagacaaccctgtcctcaggcctgaactcaccatagagacccatgtcagcaaacggtgaccagcaaatcctcttcccttattctaaagctgccccttgggagactccagggagaaggcattgcttcctccctggtgtgaactctttctttggtattccatccactatcctggcaactcaaggctgcttctgttaactgaagcctgctccttcttgttctgccctccagagatttgctcaaatgatcaataagctttaaattaaactctacttcaagaaaactctgtggtccctgagtccttttttctttatgccaataagcttcttaaatgtgctggcggtttatgcagtcacttggggagccatggaatcctttgatctccccaggcaaggtgctctgaggagttggcttctttattgtctgttcagtacatccaacccctctctcaaaggctgtcaccccaactggatacacaccctggcaaaggcacgtagcttgaatgagggttattttgtgtctaattcacaggagagtcatgggtgggatacctgtcatcctctgcctttccagctgtccaagtgaaaaaaacctcaatcctggtcacccttgcccaagttgcccacatccctggcatacagtaggtgttcaataaatgtttattgaaggaaa

SEQ ID NO: 192686 - DNA, 641 bp, Homo sapiens
  Payload ID: 18037
  Gene Name: transglutaminase 4
  ENST ID: ENST00000422219
  CDS Start-End: 45-320
agagatagagtcttccctggcattgcaggagagaatctgaagggatgatggatgcatcaaaagagctgcaagttctccacattgacttcttgaatcaggacaacgccgtttctcaccacacatgggagttccaaacgagcagtcctgtgttccggcgaggacaggtgtttcacctgcggctggtgctgaaccagcccctacaatcctaccaccaactgaaactggaattcagcacaggtcacagtggctgtcaccagttcccccaatgccatcctgggcaagtaccaactaaacgtgaaaactggaaaccacatccttaagtctgaagaaaacatcctataccttctcttcaacccatggtgtaaagaggacatggttttcatgcctgatgaggacgagcgcaaagagtacatcctcaatgacacgggctgccattacgtgggggctgccagaagtatcaaatgcaaaccctggaactttggtcagtttgagaaaaatgtcctggactgctgcatttccctgctgactgagagctccctcaagcccacagataggagggaccccgtgctggtgtgcagggccatgtgtgctatgatgagctttgagaaaggccagggcgtgctcattgggaattggactgg

SEQ ID NO: 192687 - DNA, 3388 bp, Homo sapiens; identical to SEQ ID NO: 192685
  Payload ID: 18037
  Gene Name: Transglutaminase 4
  ENST ID: ENST00000628744
  CDS Start-End: 69-2123

SEQ ID NO: 192688 - DNA, 641 bp, Homo sapiens; identical to SEQ ID NO: 192686
  Payload ID: 18037
  Gene Name: Transglutaminase 4
  ENST ID: ENST00000627547
  CDS Start-End: 45-320

SEQ ID NO: 192689 - DNA, 1958 bp, Homo sapiens
  Payload ID: 18038
  Gene Name: transglutaminase 5
  Uniprot ID: O43548
  ENST ID: ENST00000349114
  CDS Start-End: 9-1925
cagctaccatggcccaagggctagaagtggccctcacagacctccagagctccagaaataatgtgcggcaccacacggaggagatcactgtggaccacctgcttgttcgccggggccaggccttcaacctcaccctgtacttcaggaaccggagcttccagccaggcctggacaacatcatcttcgtggttgaaactgaggatgctgtctacttggacagtgaaccccagaggcaggagtatgtcatgaatgattatggcttcatctaccaaggcagcaagaactggatccgcccatgtccctggaactatggacagtttgaagacaaaatcatagacatctgcctgaagctgctagacaagagcctgcacttccagactgacccagccacagactgtgctctgcggggaagccccgtctacgtcagcagagtggtgtgtgccatgatcaacagcaatgatgataatggggtgctcaatggaaactggagtgagaattacacagacggcgccaaccctgcggagtggacgggcagcgtggccatcctgaagcagtggaacgccacaggctgccagcccgtgcgctacgggcaatgctgggtctttgctgccgtcatgtgcacagtgatgaggtgtctggggatccctacccgtgtgatcaccaacttcgactctggccacgatacagatggaaacctgatcatagatgagtattatgacaacacaggcaggattttggggaataagaagaaggatactatctggaacttccatgtctggaatgagtgctggatggcccggaaggatctgccccctgcatatggaggctggcaggtgctggacgccacacctcaggagatgagcaacggcgtctactgctgtggccctgcctctgtcagagccatcaaagaaggagaagtggacctgaactatgacacgccctttgtgttttcgatggtgaatgctgactgcatgtcctggctcgtccagggagggaaggagcagaagcttcaccaggacacgagttctgttggcaattttatcagcacaaagagcatccagagtgacgagcgggatgacatcacagagaactacaagtatgaagaaggatccctccaggagaggcaggtgtttctgaaggctctgcagaagctgaaggctagaagcttccatggctcccaaagaggagcagagttgcaaccttccaggcccacatcactgagccaggacagccctcggagcctgcatacaccttcccttcgacccagtgatgtggtgcaagtctccctgaaattcaagctgctcgacccgcccaacatgggccaggatatatgctttgtcctgctggccctcaacatgtcctcccagttcaaggacctcaaagtgaacctgagtgcccagtctctgctgcacgatggcagccccctgtccccattctggcaggacacagcgttcatcacactctctcctaaagaagcaaagacctacccctgcaaaatctcctattcccagtacagccagtacctgtcaacagacaagctgatccgcatcagtgccctgggtgaagagaaaagcagtcctgagaaaatcctggtgaacaagatcatcaccttatcttatccaagcatcacgattaatgttctaggagcagccgttgtgaaccagccactctccatacaggtgatattttcaaaccccctctcggagcaggttgaggactgtgtgctgactgtggaaggaagtggcctcttcaagaaacagcagaaagtcttccttggagtcctcaaaccccaacaccaagcaagcatcattctggagaccgtccccttcaagagtggacaaaggcagatccaagctaatatgagaagcaacaagtttaaggacattaagggttacaggaatgtttatgtagactttgcattataaattctggaacaacgcgccagacgtgtgaatttc

SEQ ID NO: 192690 - DNA, 2767 bp, Homo sapiens
  Payload ID: 18038
  Gene Name: transglutaminase 5
  Uniprot ID: O43548
  ENST ID: ENST00000220420
  CDS Start-End: 9-2171
cagctaccatggcccaagggctagaagtggccctcacagacctccagagctccagaaataatgtgcggcaccacacggaggagatcactgtggaccacctgcttgttcgccggggccaggccttcaacctcaccctgtacttcaggaaccggagcttccagccaggcctggacaacatcatcttcgtggttgaaactggaccgctgccagacctggccttggggactcgggctgtgttcagcctggcacgccatcacagccccagcccctggattgcctggctggagaccaatggggccacctccacagaggtgagcttgtgcgctcctcccacggcggccgtgggtcggtacctcttgaaaatccacatcgactccttccaggggtctgtgacggcctaccagctaggggagttcatcctgcttttcaatccctggtgcccagaggatgctgtctacttggacagtgaaccccagaggcaggagtatgtcatgaatgattatggcttcatctaccaaggcagcaagaactggatccgcccatgtccctggaactatggacagtttgaagacaaaatcatagacatctgcctgaagctgctagacaagagcctgcacttccagactgacccagccacagactgtgctctgcggggaagccccgtctacgtcagcagagtggtgtgtgccatgatcaacagcaatgatgataatggggtgctcaatggaaactggagtgagaattacacagacggcgccaaccctgcggagtggacgggcagcgtggccatcctgaagcagtggaacgccacaggctgccagcccgtgcgctacgggcaatgctgggtctttgctgccgtcatgtgcacagtgatgaggtgtctggggatccctacccgtgtgatcaccaacttcgactctggccacgatacagatggaaacctgatcatagatgagtattatgacaacacaggcaggattttggggaataagaagaaggatactatctggaacttccatgtctggaatgagtgctggatggcccggaaggatctgccccctgcatatggaggctggcaggtgctggacgccacacctcaggagatgagcaacggcgtctactgctgtggccctgcctctgtcagagccatcaaagaaggagaagtggacctgaactatgacacgccctttgtgttttcgatggtgaatgctgactgcatgtcctggctcgtccagggagggaaggagcagaagcttcaccaggacacgagttctgttggcaattttatcagcacaaagagcatccagagtgacgagcgggatgacatcacagagaactacaagtatgaagaaggatccctccaggagaggcaggtgtttctgaaggctctgcagaagctgaaggctagaagcttccatggctcccaaagaggagcagagttgcaaccttccaggcccacatcactgagccaggacagccctcggagcctgcatacaccttcccttcgacccagtgatgtggtgcaagtctccctgaaattcaagctgctcgacccgcccaacatgggccaggatatatgctttgtcctgctggccctcaacatgtcctcccagttcaaggacctcaaagtgaacctgagtgcccagtctctgctgcacgatggcagccccctgtccccattctggcaggacacagcgttcatcacactctctcctaaagaagcaaagacctacccctgcaaaatctcctattcccagtacagccagtacctgtcaacagacaagctgatccgcatcagtgccctgggtgaagagaaaagcagtcctgagaaaatcctggtgaacaagatcatcaccttatcttatccaagcatcacgattaatgttctaggagcagccgttgtgaaccagccactctccatacaggtgatattttcaaaccccctctcggagcaggttgaggactgtgtgctgactgtggaaggaagtggcctcttcaagaaacagcagaaagtcttccttggagtcctcaaaccccaacaccaagcaagcatcattctggagaccgtccccttcaagagtggacaaaggcagatccaagctaatatgagaagcaacaagtttaaggacattaagggttacaggaatgtttatgtagactttgcattataaattctggaacaacgcgccagacgtgtgaatttcaagcttcaggaaaaggagcaagttcaaatgcaagctgcgccattccccaccacaacagaggcttcacagggctccagcaagagccacagaggggatgacgtgttcattttctgtctctcctgactccactagaaatttaagctccatgagggcaaagactttgctttgtttactacccctatactcagaaccatttctggcatatgctaggcactcaacaaatattttttgaatgaatgaataggagactccagcatccagagaacaggtaggaaatgtctatggatggatatttccctggaccatttgcacagctcccctggactcttttcagggcccagggattccactgtgtcccatccagagattccaggattccagtctcctatccagaagcgtgatttggcacagaggtcagaggatactggtaggacttggccatgacttaactgccccctgccccagatatccaggaaagaaaaagacaggctgaacagctcactgttgttttgttgttgcgaaagctaattccctagtatgaataaacttcagaccttgctctc

SEQ ID NO: 192691 - DNA, 2202 bp, Homo sapiens
  Payload ID: 18038
  Gene Name: transglutaminase 5
  ENST ID: ENST00000622115
  CDS Start-End: 4-2169
accctggctgccccagggctagaagtggccctcacagacctccagagctccagaaataatgtgcggcaccacacggaggagatcactgtggaccacctgcttgttcgccggggccaggccttcaacctcaccctgtacttcaggaaccggagcttccagccaggcctggacaacatcatcttcgtggttgaaactggaccgctgccagacctggccttggggactcgggctgtgttcagcctggcacgccatcacagccccagcccctggattgcctggctggagaccaatggggccacctccacagaggtgagcttgtgcgctcctcccacggcggccgtgggtcggtacctcttgaaaatccacatcgactccttccaggggtctgtgacggcctaccagctaggggagttcatcctgcttttcaatccctggtgcccagaggatgctgtctacttggacagtgaaccccagaggcaggagtatgtcatgaatgattatggcttcatctaccaaggcagcaagaactggatccgcccatgtccctggaactatggacagtttgaagacaaaatcatagacatctgcctgaagctgctagacaagagcctgcacttccagactgacccagccacagactgtgctctgcggggaagccccgtctacgtcagcagagtggtgtgtgccatgatcaacagcaatgatgataatggggtgctcaatggaaactggagtgagaattacacagacggcgccaaccctgcggagtggacgggcagcgtggccatcctgaagcagtggaacgccacaggctgccagcccgtgcgctacgggcaatgctgggtctttgctgccgtcatgtgcacagtgatgaggtgtctggggatccctacccgtgtgatcaccaacttcgactctggccacgatacagatggaaacctgatcatagatgagtattatgacaacacaggcaggattttggggaataagaagaaggatactatctggaacttccatgtctggaatgagtgctggatggcccggaaggatctgccccctgcatatggaggctggcaggtgctggacgccacacctcaggagatgagcaacggcgtctactgctgtggccctgcctctgtcagagccatcaaagaaggagaagtggacctgaactatgacacgccctttgtgttttcgatggtgaatgctgactgcatgtcctggctcgtccagggagggaaggagcagaagcttcaccaggacacgagttctgttggcaattttatcagcacaaagagcatccagagtgacgagcgggatgacatcacagagaactacaagtatgaagaaggatccctccaggagaggcaggtgtttctgaaggctctgcagaagctgaaggctagaagcttccatggctcccaaagaggagcagagttgcaaccttccaggcccacatcactgagccaggacagccctcggagcctgcatacaccttcccttcgacccagtgatgtggtgcaagtctccctgaaattcaagctgctcgacccgcccaacatgggccaggatatatgctttgtcctgctggccctcaacatgtcctcccagttcaaggacctcaaagtgaacctgagtgcccagtctctgctgcacgatggcagccccctgtccccattctggcaggacacagcgttcatcacactctctcctaaagaagcaaagacctacccctgcaaaatctcctattcccagtacagccagtacctgtcaacagacaagctgatccgcatcagtgccctgggtgaagagaaaagcagtcctgagaaaatcctggtgaacaagatcatcaccttatcttatccaagcatcacgattaatgttctaggagcagccgttgtgaaccagccactctccatacaggtgatattttcaaaccccctctcggagcaggttgaggactgtgtgctgactgtggaaggaagtggcctcttcaagaaacagcagaaagtcttccttggagtcctcaaaccccaacaccaagcaagcatcattctggagaccgtccccttcaagagtggacaaaggcagatccaagctaatatgagaagcaacaagtttaaggacattaagggttacaggaatgtttatgtagactttgcattataaattctggaacaacgcgccagacgtgtgaatttc

SEQ ID NO: 192692 - DNA, 2756 bp, Homo sapiens
  Payload ID: 18038
  Gene Name: transglutaminase 5
  ENST ID: ENST00000610827
  CDS Start-End: 1-2160
gctcaagggctagaagtggccctcacagacctccagagctccagaaataatgtgcggcaccacacggaggagatcactgtggaccacctgcttgttcgccggggccaggccttcaacctcaccctgtacttcaggaaccggagcttccagccaggcctggacaacatcatcttcgtggttgaaactggaccgctgccagacctggccttggggactcgggctgtgttcagcctggcacgccatcacagccccagcccctggattgcctggctggagaccaatggggccacctccacagaggtgagcttgtgcgctcctcccacggcggccgtgggtcggtacctcttgaaaatccacatcgactccttccaggggtctgtgacggcctaccagctaggggagttcatcctgcttttcaatccctggtgcccagaggatgctgtctacttggacagtgaaccccagaggcaggagtatgtcatgaatgattatggcttcatctaccaaggcagcaagaactggatccgcccatgtccctggaactatggacagtttgaagacaaaatcatagacatctgcctgaagctgctagacaagagcctgcacttccagactgacccagccacagactgtgctctgcggggaagccccgtctacgtcagcagagtggtgtgtgccatgatcaacagcaatgatgataatggggtgctcaatggaaactggagtgagaattacacagacggcgccaaccctgcggagtggacgggcagcgtggccatcctgaagcagtggaacgccacaggctgccagcccgtgcgctacgggcaatgctgggtctttgctgccgtcatgtgcacagtgatgaggtgtctggggatccctacccgtgtgatcaccaacttcgactctggccacgatacagatggaaacctgatcatagatgagtattatgacaacacaggcaggattttggggaataagaagaaggatactatctggaacttccatgtctggaatgagtgctggatggcccggaaggatctgccccctgcatatggaggctggcaggtgctggacgccacacctcaggagatgagcaacggcgtctactgctgtggccctgcctctgtcagagccatcaaagaaggagaagtggacctgaactatgacacgccctttgtgttttcgatggtgaatgctgactgcatgtcctggctcgtccagggagggaaggagcagaagcttcaccaggacacgagttctgttggcaattttatcagcacaaagagcatccagagtgacgagcgggatgacatcacagagaactacaagtatgaagaaggatccctccaggagaggcaggtgtttctgaaggctctgcagaagctgaaggctagaagcttccatggctcccaaagaggagcagagttgcaaccttccaggcccacatcactgagccaggacagccctcggagcctgcatacaccttcccttcgacccagtgatgtggtgcaagtctccctgaaattcaagctgctcgacccgcccaacatgggccaggatatatgctttgtcctgctggccctcaacatgtcctcccagttcaaggacctcaaagtgaacctgagtgcccagtctctgctgcacgatggcagccccctgtccccattctggcaggacacagcgttcatcacactctctcctaaagaagcaaagacctacccctgcaaaatctcctattcccagtacagccagtacctgtcaacagacaagctgatccgcatcagtgccctgggtgaagagaaaagcagtcctgagaaaatcctggtgaacaagatcatcaccttatcttatccaagcatcacgattaatgttctaggagcagccgttgtgaaccagccactctccatacaggtgatattttcaaaccccctctcggagcaggttgaggactgtgtgctgactgtggaaggaagtggcctcttcaagaaacagcagaaagtcttccttggagtcctcaaaccccaacaccaagcaagcatcattctggagaccgtccccttcaagagtggacaaaggcagatccaagctaatatgagaagcaacaagtttaaggacattaagggttacaggaatgtttatgtagactttgcattataaattctggaacaacgcgccagacgtgtgaatttcaagcttcaggaaaaggagcaagttcaaatgcaagctgcgccattccccaccacaacagaggcttcacagggctccagcaagagccacagaggggatgacgtgttcattttctgtctctcctgactccactagaaatttaagctccatgagggcaaagactttgctttgtttactacccctatactcagaaccatttctggcatatgctaggcactcaacaaatattttttgaatgaatgaataggagactccagcatccagagaacaggtaggaaatgtctatggatggatatttccctggaccatttgcacagctcccctggactcttttcagggcccagggattccactgtgtcccatccagagattccaggattccagtctcctatccagaagcgtgatttggcacagaggtcagaggatactggtaggacttggccatgacttaactgccccctgccccagatatccaggaaagaaaaagacaggctgaacagctcactgttgttttgttgttgcgaaagctaattccctagtatgaataaacttcagaccttgctctc

SEQ ID NO: 192693 - DNA, 2510 bp, Homo sapiens
  Payload ID: 18038
  Gene Name: transglutaminase 5
  ENST ID: ENST00000611276
  CDS Start-End: 1-1914
gctcaagggctagaagtggccctcacagacctccagagctccagaaataatgtgcggcaccacacggaggagatcactgtggaccacctgcttgttcgccggggccaggccttcaacctcaccctgtacttcaggaaccggagcttccagccaggcctggacaacatcatcttcgtggttgaaactgaggatgctgtctacttggacagtgaaccccagaggcaggagtatgtcatgaatgattatggcttcatctaccaaggcagcaagaactggatccgcccatgtccctggaactatggacagtttgaagacaaaatcatagacatctgcctgaagctgctagacaagagcctgcacttccagactgacccagccacagactgtgctctgcggggaagccccgtctacgtcagcagagtggtgtgtgccatgatcaacagcaatgatgataatggggtgctcaatggaaactggagtgagaattacacagacggcgccaaccctgcggagtggacgggcagcgtggccatcctgaagcagtggaacgccacaggctgccagcccgtgcgctacgggcaatgctgggtctttgctgccgtcatgtgcacagtgatgaggtgtctggggatccctacccgtgtgatcaccaacttcgactctggccacgatacagatggaaacctgatcatagatgagtattatgacaacacaggcaggattttggggaataagaagaaggatactatctggaacttccatgtctggaatgagtgctggatggcccggaaggatctgccccctgcatatggaggctggcaggtgctggacgccacacctcaggagatgagcaacggcgtctactgctgtggccctgcctctgtcagagccatcaaagaaggagaagtggacctgaactatgacacgccctttgtgttttcgatggtgaatgctgactgcatgtcctggctcgtccagggagggaaggagcagaagcttcaccaggacacgagttctgttggcaattttatcagcacaaagagcatccagagtgacgagcgggatgacatcacagagaactacaagtatgaagaaggatccctccaggagaggcaggtgtttctgaaggctctgcagaagctgaaggctagaagcttccatggctcccaaagaggagcagagttgcaaccttccaggcccacatcactgagccaggacagccctcggagcctgcatacaccttcccttcgacccagtgatgtggtgcaagtctccctgaaattcaagctgctcgacccgcccaacatgggccaggatatatgctttgtcctgctggccctcaacatgtcctcccagttcaaggacctcaaagtgaacctgagtgcccagtctctgctgcacgatggcagccccctgtccccattctggcaggacacagcgttcatcacactctctcctaaagaagcaaagacctacccctgcaaaatctcctattcccagtacagccagtacctgtcaacagacaagctgatccgcatcagtgccctgggtgaagagaaaagcagtcctgagaaaatcctggtgaacaagatcatcaccttatcttatccaagcatcacgattaatgttctaggagcagccgttgtgaaccagccactctccatacaggtgatattttcaaaccccctctcggagcaggttgaggactgtgtgctgactgtggaaggaagtggcctcttcaagaaacagcagaaagtcttccttggagtcctcaaaccccaacaccaagcaagcatcattctggagaccgtccccttcaagagtggacaaaggcagatccaagctaatatgagaagcaacaagtttaaggacattaagggttacaggaatgtttatgtagactttgcattataaattctggaacaacgcgccagacgtgtgaatttcaagcttcaggaaaaggagcaagttcaaatgcaagctgcgccattccccaccacaacagaggcttcacagggctccagcaagagccacagaggggatgacgtgttcattttctgtctctcctgactccactagaaatttaagctccatgagggcaaagactttgctttgtttactacccctatactcagaaccatttctggcatatgctaggcactcaacaaatattttttgaatgaatgaataggagactccagcatccagagaacaggtaggaaatgtctatggatggatatttccctggaccatttgcacagctcccctggactcttttcagggcccagggattccactgtgtcccatccagagattccaggattccagtctcctatccagaagcgtgatttggcacagaggtcagaggatactggtaggacttggccatgacttaactgccccctgccccagatatccaggaaagaaaaagacaggctgaacagctcactgttgttttgttgttgcgaaagctaattccctagtatgaataaacttcagaccttgctctc

SEQ ID NO: 192694 - DNA, 2292 bp, Homo sapiens
  Payload ID: 18039
  Gene Name: transglutaminase 6
  Uniprot ID: O95932
  ENST ID: ENST00000202625
  CDS Start-End: 62-2182
actgtcctgacggtgcacacactgctgtgtggaggaacagaggagtccagctggccttcacatggcagggatcagagtcaccaaggtggactggcagcggtcgaggaatggcgctgcccaccacacccaggagtacccctgccctgagctggtggttcgcaggggccagtcgttcagcctcacgctggagctgagcagagccctggactgtgaggagatcctcatcttcacgatggagacaggaccccgggcttctgaggccctccacaccaaagctgtgttccagacatcggagctggagcggggtgagggctggacagcagcaagggaggctcagatggagaaaactctgaccgtcagtctcgccagccctcccagtgctgtcattggccgctacctgctgagcatcaggctttcctctcaccgcaaacacagcaaccggaggctgggcgagtttgttctccttttcaacccatggtgtgcagaggacgatgtgtttctggcctcagaggaggagagacaggagtacgtgctcagcgacagcggcatcatcttccgaggcgtggagaagcacatacgagcccagggctggaactacgggcagtttgaggaggacatcctgaacatctgcctctccatcctggatcgaagccccggtcaccaaaacaacccagccaccgacgtgtcctgccgccacaaccccatctacgtcaccagggtcatcagtgccatggtgaacagcaacaacgaccgaggtgtggtgcaaggacagtggcagggcaagtacggcggcggcaccagcccgctgcactggcgcggcagcgtggccattctgcagaagtggctcaagggcaggtacaagccagtcaagtacggccagtgctgggtcttcgccggagtcctgtgcacagtcctcaggtgcttggggatagccacacgggtcgtgtccaacttcaactcagcccacgacacagaccagaacctgagtgtggacaaatacgtggactccttcgggcggaccctggaggacctgacagaagacagcatgtggaatttccatgtctggaatgagagctggtttgcccggcaggacctaggcccctcttacaatggctggcaggttctggatgccaccccccaggaggagagtgaaggtgtgttccggtgcggcccagcctcagtcaccgccatccgcgagggtgatgtgcacctggctcacgatggccccttcgtgtttgcggaggtcaacgccgactacatcacctggctgtggcacgaggatgagagccgggagcgtgtatactcaaacacgaagaagattgggagatgcatcagcaccaaggcggtgggcagtgactcccgcgtggacatcactgacctctacaagtatccggaagggtcccggaaagagaggcaggtgtacagcaaggcggtgaacaggctgttcggcgtggaagcctctggaaggagaatctggatccgcagggctgggggtcgctgtctctggcgtgacgacctcctggagcctgccaccaagcccagcatcgctggcaagttcaaggtgctagagcctcccatgctgggccacgacctgagactggccctgtgcttggccaacctcacctcccgggcccagcgggtgagggtcaacctgagcggtgccaccatcctctatacccgcaagccagtggcagagatcctgcatgaatcccacgccgtgaggctggggccgcaagaagagaagagaatcccaattacaatatcttactctaagtataaagaagacctgacagaggacaagaagatcctgttggctgccatgtgccttgtcaccaaaggagagaagcttctggtggagaaggacattactctagaggacttcatcaccatcaaggttctgggcccagccatggtgggagtggcagttacagtggaagtgacagtagtcaaccccctcatagagagagtgaaggactgtgcgctgatggtggagggcagcggccttctccaggaacagctcagcatcgacgtgcctaccctggagcctcaggagagggcctcagtccagtttgacatcaccccctccaaaagtggcccaaggcagctgcaggtggaccttgtaagccctcacttcccggacatcaagggctttgtgatcgtccatgtggccactgccaagtgatggatcatgagggactgagaggggtggatttggcccctgtcctcctcctgcccattctttgtctcttccacatgggagccaggaggcctcagttaatcctgcctcaacct

SEQ ID NO: 192695 - DNA, 2158 bp, Homo sapiens
  Payload ID: 18039
  Gene Name: transglutaminase 6
  Uniprot ID: O95932
  ENST ID: ENST00000381423
  CDS Start-End: 62-1939
actgtcctgacggtgcacacactgctgtgtggaggaacagaggagtccagctggccttcacatggcagggatcagagtcaccaaggtggactggcagcggtcgaggaatggcgctgcccaccacacccaggagtacccctgccctgagctggtggttcgcaggggccagtcgttcagcctcacgctggagctgagcagagccctggactgtgaggagatcctcatcttcacgatggagacaggaccccgggcttctgaggccctccacaccaaagctgtgttccagacatcggagctggagcggggtgagggctggacagcagcaagggaggctcagatggagaaaactctgaccgtcagtctcgccagccctcccagtgctgtcattggccgctacctgctgagcatcaggctttcctctcaccgcaaacacagcaaccggaggctgggcgagtttgttctccttttcaacccatggtgtgcagaggacgatgtgtttctggcctcagaggaggagagacaggagtacgtgctcagcgacagcggcatcatcttccgaggcgtggagaagcacatacgagcccagggctggaactacgggcagtttgaggaggacatcctgaacatctgcctctccatcctggatcgaagccccggtcaccaaaacaacccagccaccgacgtgtcctgccgccacaaccccatctacgtcaccagggtcatcagtgccatggtgaacagcaacaacgaccgaggtgtggtgcaaggacagtggcagggcaagtacggcggcggcaccagcccgctgcactggcgcggcagcgtggccattctgcagaagtggctcaagggcaggtacaagccagtcaagtacggccagtgctgggtcttcgccggagtcctgtgcacagtcctcaggtgcttggggatagccacacgggtcgtgtccaacttcaactcagcccacgacacagaccagaacctgagtgtggacaaatacgtggactccttcgggcggaccctggaggacctgacagaagacagcatgtggaatttccatgtctggaatgagagctggtttgcccggcaggacctaggcccctcttacaatggctggcaggttctggatgccaccccccaggaggagagtgaaggtgtgttccggtgcggcccagcctcagtcaccgccatccgcgagggtgatgtgcacctggctcacgatggccccttcgtgtttgcggaggtcaacgccgactacatcacctggctgtggcacgaggatgagagccgggagcgtgtatactcaaacacgaagaagattgggagatgcatcagcaccaaggcggtgggcagtgactcccgcgtggacatcactgacctctacaagtatccggaagggtcccggaaagagaggcaggtgtacagcaaggcggtgaacaggctgttcggcgtggaagcctctggaaggagaatctggatccgcagggctgggggtcgctgtctctggcgtgacgacctcctggagcctgccaccaagcccagcatcgctggcaagttcaaggtgctagagcctcccatgctgggccacgacctgagactggccctgtgcttggccaacctcacctcccgggcccagcgggtgagggtcaacctgagcggtgccaccatcctctatacccgcaagccagtggcagagatcctgcatgaatcccacgccgtgaggctggggccgcaagaagagaagagaatcccaattacaatatcttactctaagtataaagaagacctgacagaggacaagaagatcctgttggctgccatgtgccttgtcaccaaaggagagaagcttctggtggagaaggacattactctagaggacttcatcaccatcaagcgtgcctaccctggagcctcaggagagggcctcagtccagtttgacatcaccccctccaaaagtggcccaaggcagctgcaggtggaccttgtaagccctcacttcccggacatcaagggctttgtgatcgtccatgtggccactgccaagtgatggatcatgagggactgagaggggtggatttggcccctgtcctcctcctgcccattctttgtctcttccacatgggagccaggaggcctcagttaatcctgcctcaacct

SEQ ID NO: 192696 - DNA, 2313 bp, Homo sapiens
  Payload ID: 18040
  Gene Name: transglutaminase 7
  Uniprot ID: Q96PF1
  ENST ID: ENST00000452443
  CDS Start-End: 6-2138
gggagatggatcaggtggcaaccttgcggcttgagtctgtcgacctgcagagctccaggaacaacaaggagcaccacacgcaggagatgggcgtcaagcggctcactgtgcgccgcggccagcccttctacctccggctgagcttcagccgacccttccagtcccagaacgaccacatcacctttgtggctgagaccggacccaagccgtcagagctgctggggacccgagccacattcttcctcacccgggtccagcccgggaatgtctggagcgcttctgatttcaccattgactccaactctctccaagtttcccttttcacaccagccaatgcagttattggccattacactctgaaaatagagatctctcagggccaaggtcacagtgtgacttacccgctgggaactttcatcctactttttaacccttggagtccagaggacgacgtctacctgccaagtgaaatactgctgcaggagtatatcatgcgagattatggctttgtttacaagggtcatgaaagattcatcacctcctggccctggaactacgggcagtttgaagaggacatcatagacatctgctttgagatcctgaacaagagcctgtatcacttaaagaacccggccaaagactgttcccagcggaacgacgtggtgtatgtgtgcagggtggtgagtgccatgatcaacagcaacgatgacaatggcgtgctgcaggggaactggggcgaggactactccaaaggggtcagtcctctggagtggaagggcagtgtggccatcctacagcagtggtcagccaggggcgggcagcctgtgaagtacggacagtgctgggtcttcgcctctgttatgtgcaccgtaatgagatgcttaggtgttccaacccgtgttgtttccaatttccgttccgcgcacaacgtggataggaacttgaccatcgatacgtactatgaccgaaatgccgagatgctgtcaactcagaaacgagacaaaatatggaacttccacgtctggaatgagtgctggatgatccggaaagatctcccaccaggatacaacgggtggcaggttctggaccccactccccagcagaccagcagtgggctgttctgctgtggccctgcctctgtgaaggccatcagggaaggggatgtccacctggcctatgacaccccttttgtgtatgccgaggtgaacgccgatgaagtcatttggctccttggggatggccaggcccaggaaatcctggcccacaacaccagttccatcgggaaggagatcagcactaagatggtggggtcagaccagcgccagagcatcaccagctcctacaagtacccagaaggatcccctgaggagagagctgtcttcatgaaggcttctcggaaaatgctgggcccccaaagagcttctttgcccttcctggatctcctggagtctgggggtcttagggatcagccagcgcagctgcagcttcacctggccaggatacccgagtggggccaggacctgcagctgctgctgcgtatccagagggtgccagacagcacccaccctcgggggcccatcggactggtggtgcgcttctgtgcacaggccctgctgcatgggggtggtacccagaagcccttctggaggcacacagtgcggatgaacctggactttgggaaggagacacagtggccgctcctcctgccctacagcaattacagaaacaagctaacggacgaaaagctcatccgcgtgtctggcatcgcggaggttgaagagacagggaggtccatgctggtcctaaaagatatctgtctggagcctccccacttgtctattgaggtgtctgagagggctgaggtgggcaaggcgctgagagtccatgtcaccctcaccaacaccttaatggtggctctgagcagctgcacgatggtgctggaaggaagcggcctcatcaatgggcagatagcaaaggaccttgggactctggtggccggacacaccctccaaattcaactggacctctacccgaccaaagctggaccccgccagctccaggttctcatcagcagcaacgaggtcaaggagatcaaaggctacaaggacatcttcgtcactgtggctggggctccctgagacccgccctccagctgccctccctggcacccctgccccacctggctcctttctactcctggctatgtcgtcttggctccacctctgtcctctctctagcctgcctgggaatgaatgaagctctgttagaaacaccgtgtgctttgggaagagacaataaagatgtctttattta

SEQ ID NO: 192697 - DNA, 6419 bp, Homo sapiens
  Payload ID: 18041
  Gene Name: trans-golgi network protein 2
  ENST ID: ENST00000282120
  CDS Start-End: 335-1774
acttccgcggccagtgcgagaggcgagggagctccagctctgcctgtaaggtctcggaagtacgaggcggaggggacgaaaaacggggggccagactgttgtggctgtggtggagacgagaaaccaggaagaagaggctcgcctcccactcggcgacagtaagcgaagcagccgaaggcgagcgccgacatcagcagctgccccctaaatcccgcccttcgtcttggcggcagcgggagactgagagacgcgcgcagcaggggcgggactggagaggggccccgcgcgcggatctcgcgagagcattagagggcggaagcgctatccgagcaggatgcggttcgtggttgccttggtcctcctgaacgtcgcagcggcgggagccgtgccgctcttggccaccgaaagcgtcaagcaagaagaagctggagtacggccttctgcaggaaacgtctccacccaccccagcttgagccaacggcctggaggctctaccaagtcgcatccggagccgcagactccaaaagacagccctagcaagtcgagtgcggaggcgcagaccccagaagacacccccaacaagtcgggtgcggaggcaaagacccaaaaagacagctccaacaagtcgggtgcggaggcaaagacccaaaaaggcagcactagcaagtcgggttcggaggcgcagaccacaaaagacagcactagtaagtcgcatccggagctgcagactccaaaagacagcactggcaaatcgggtgcggaggcgcagaccccagaagacagccccaacaggtcgggtgcggaggcaaagacccaaaaagacagccctagcaagtcaggttcggaggcgcagaccacaaaagatgtccctaataagtcgggtgcggacggccagaccccaaaagacggctccagcaagtcgggtgcggaggatcagaccccaaaagacgtccctaacaagtcgggtgcggagaagcagactccaaaagacggctctaacaagtccggtgcagaggagcagggcccaatagacgggcccagcaagtcgggtgcggaggagcagacctcaaaagacagccctaacaaggtggttccagagcagccttcccggaaagaccattccaagcccatctccaacccttctgataacaaggagctccccaaggctgacacaaaccagcttgctgacaaagggaagctttctcctcatgctttcaaaaccgaatctggggaggaaactgacctcatttctcccccgcaggaggaagttaagtcttcagagcctactgaggatgtggagcccaaagaggctgaagatgatgatacaggacccgaggagggctcaccgcccaaagaagagaaagaaaagatgtccggttctgcctccagtgagaaccgtgaagggacactttcggattccacgggtagcgagaaggatgacctttatccgaacggttctggaaatggcagcgcggagagcagccacttctttgcatatctggtgactgcagccattcttgtggctgtcctctatatcgctcatcacaacaagcggaagatcattgcttttgtcctggaaggaaaaagatctaaagtcacccggcggccaaaggccagtgactaccaacgtttggaccagaagtatgtcttaattctgaatgttttccctgcacctcctaaaagatcttttttccccgtcctaacagaatggtatattcctctggaaaaagatgaacgtcaccaatggattgtgctgctctcgtttcagctttgatttttttgtccttgagaaccttgtcctccctgctgatttgtttctaaatcaaaagaaatgaagaaaaaagtactgtgacctgagagacaccctcctctagaatttagtggcgggtctgggctggcagaggtagggggctgctttgggctttgcacctgcactttggtgacattgttcttctgtgttccctttatttatgctggtggcttccatccgttcctcctctgagggtgagtggaggggtatatggaaacacggctatgaccaaagggagatcccagcctgggcaggctgcgctgctgaccaccctccctggggcccgggctctgtaggaaagttggtccttgactgtggcattgcactctgcactgtttctctctgcagacctaggggaaaactgcaggtggaagtgcttttctactaaggcctcttactttgggggggatgtgccctacagaagacatagaagatggggaaatgccaatgggcaaagagctactttgaatacataattctcttcaaagacttcagcagcaaaccaaaacagcaggttaaaaaaaaagatgcttttttgggtgcaagtctaacctgtctagcatgagatcttcttgattttctgattattttatgtagcttgagacaaagtgaatcaacttccacttagttgtaccgagcataaaacagaacttgggcttcctggcagtgaggccactgtcccatcacagatttttaaaataaatatgatttgaagtagtgtgatctttcacacaatcatactcagtaggaactttttgaaatagggcaagtttatgtttcatgcgagaaaacatgaaggagggttttggttttggtctgcagtttttccaaagggcttttatgagatacatttcccacaaagtccattttgcctttgttgcctaaaacagacaaaatagacttagatttattaatagaaactatactctctgccaattttacctcagtgtatttaatggtcctttaatctgatataagatgccaagggtatttgataaaaattcttcttccatgccatgtcaggagttaatacaaatgaagaaattccgtgggttcccctgggataagtgagggtagtgtcttggacaacactattgtttgaaggtttatcttttctaatcatgctctaccgcattgtagagagcctaaagagagttgtttctgagctgatctcagggaaatacaaataacttgggagatgagggaaataagatgaattctgtgctgtcaaggcagtaagtctgaagaaaggaccatgcttcttatattatcttccaccttgcttaaaacagcccatagctttgagttgacattttcattcttggcggatagcctactttatgaaggtaaggaatgaactcctacccttcttgggtcattctctgtactgatgcgttagtcttataatactttgcaccaacctgaggaatcttctaggcttctctagcatcccctaagactgtggctatttcacgtctctctccctgcctgccttccttttcccttcctttcccctcctcatgttttctggttgtgcccatctgtaccagctcctttccatccaccttcgtatgcacccagatttttctgttcccatctgtcctatttgttattcatcccgctgctcaacttctccagtatgttgcttcccttaagttgccattcattctcttcatgacttttactaactcacttcggtctctgtctgtcaactaaacttttctaaaggttaccagttatccaatcaccaaatccatggctttttctcaaagcttagtcttgtccttggcagaactggacactattgaccatccaaatggaaattcccctttcttggtgtctctgacaaatggtcctttgccttatcttgtgctggtggtgaagaggccctcaaagccaggcctctctattcctttgactgtctcctcagccattaacccattcttcatcctcggagtgagtgattcccaagtctttgtcttggcttaatccctaaagaacccagttctgctggtatcgaatagttcagcttggttgtcattgaaaggaatttctctcttctgtccatcagcctgtccctcccaactgtctaggacagtcttcggtcacctaaattcctaactgcagacttttgccctttttctctctcatcaccaaagtcccatccatttttttttaataaaagatcctcagctacagtctttccattttccttgcttctcttattgcacacccccagcccattttgcttctctcttggattttgttttttcagatccacatttattgggtttcctgtccagcttcttggaaaggagctcactcttggaaagactgatctttccaaaatattttccctggtctgaagctttggtgtgaacttctcaaggcttagagaatccagttacagaccttttggggttcaggatgctatagattgacaccctcctgcctgtttttctctgcatcccaacctggccaaggcccctcctgtggggtgcccatctgtgcctttattccggctgtgccctcgactttccagcttcccatgtttctttggttaggtttctctcccttccttctttctccttccccaatccgcctgtttcgtcagggcccagtttgtttcctcatacaccttcctcactaccccaccccacatggttgactctttccctcagctccaccagctcttcatcatgccactcatttcagaacttgagcaaaacagggcagtcaggatctgatgtctttctggtctccctaagaaaactaagctcttgagggacagcccttggcaatgctttcctatctgctgatcatggtgaccttccttaggacttccagagttcagttccttctggcagagaggttttctttctccatgccatatggatgtgactcaaatgaggggtcccacagcttttcctggctaccacttgctgtgaccttatacatgttggggtttgctcttaaagaggagagcaggaagaaaggttggtttcagaaaccaagagggtcggcagtggacgcgtacattttgtcacggagtccacagagctgagcttttgagcagactctgagaagtatcattgcttgtgttgaaagaatacaacaggatttaagtttctctttagaaattgcactgaagaaaggccgggcgcggtggctccccctgtaatcccagcgctttgggaggccgaggcggggggatcacgaggtcaagagatcgagaccatcctggccaacatggtgaaaccccgtctctaataaaaatacaaaaattagccgggcatggtgacgtgcacctgtagtcccagctactagataggctgaggcaggagaattgcttgaatccgggaggcggaggttgcagtgagccgagatcgtgccactgaactccaacctgccaatagagcgagactccgtctcaaaaaaaaaaaaaaaaaagaaagaaatagcattgaagaaaataccgcacatcagaggaaagcttattttctgcatggtgtcttttcaaagatagaatatttgaagcatgttttctagcgattgtgtggatgagggtgagctggctgaggcatcgctcaagctggggggtggtgtgtaagaagcacgtggagccacaagaggcacctcctatagtcagctaagggcttccctttctgcgcccagcttttgggtgaagggtgatttctattagacacatctgtgcttcagtcatagatgttaatagaggaagcagttttcctgctgcagattcctgaatagagttgctgaaagagtctacttctggactcaggggaagttgaaggccagtctgtgtagaaaggctgaggcaacggggaaagacctgacagctagttacatacgctctgacatagtactcccatgatggcttccagtgacacatgtgctgatagaattctaaacctctggaatttccctgctggcgacttctatggccgttgactgtacagggtaacctgatgccagatgctatgggcgtgatgagaactagagcattgcagcatggaggaaactgtgaggcaccagatcctgtgcttctgcaggccattttctgaaaacccctgttaggaaggttggatttggcgtgacttgcttgagcaagagtcctggggagagattttgaggtttaatttaacggtatatccagagctaacagtgactcaactcgtctagttctgcaagtcagatgtacacttagagtctctctgtgaagggtttgggtctgagctgtatagtatgtcaaactgccagtaagccagcccctcaccctctgatagatattcctttaatgcaccagacttcatgtttgataaatgattaatggttgaaattgtttctcttcttttgtgttttcccagttaatagatggtcactgtttccacaatgttttatactttcagctttttgtaacttaactataattacttaattttatttttttaaagcttgttgtggtctaatgagaagtatttttcagtgcataatgtttttctgagcttctgtaaatgccatcccaatgtggtttggttttgttgaacagaaaccaaaataaatttcaaaatgttaaagcaatggattt

SEQ ID NO: 192698 - DNA, 6489 bp, Homo sapiens
  Payload ID: 18041
  Gene Name: trans-golgi network protein 2
  Uniprot ID: O43493
  ENST ID: ENST00000377386
  CDS Start-End: 464-1777
ttcccacatgggagagaccagagcacagcacgtttgtgtacggccaggagggaaccacgaaaaaagcagaggatagaaacgcaagcacacgatggtggtggccaagaggagcctgcccctagtgacctcacttccgcggccagtgcgagaggcgagggagctccagctctgcctgtaaggtctcggaagtacgaggcggaggggacgaaaaacggggggccagactgttgtggctgtggtggagacgagaaaccaggaagaagaggctcgcctcccactcggcgacagtaagcgaagcagccgaaggcgagcgccgacatcagcagctgccccctaaatcccgcccttcgtcttggcggcagcgggagactgagagacgcgcgcagcaggggcgggactggagaggggccccgcgcgcggatctcgcgagagcattagagggcggaagcgctatccgagcaggatgcggttcgtggttgccttggtcctcctgaacgtcgcagcggcgggagccgtgccgctcttggccaccgaaagcgtcaagcaagaagaagctggagtacggccttctgcaggaaacgtctccacccaccccagcttgagccaacggcctggaggctctaccaagtcgcatccggagccgcagactccaaaagacagccctagcaagtcgagtgcggaggcgcagaccccagaagacacccccaacaagtcgggtgcggaggcaaagacccaaaaagacagctccaacaagtcgggtgcggaggcaaagacccaaaaaggcagcactagcaagtcgggttcggaggcgcagaccacaaaagacagcactagtaagtcgcatccggagctgcagactccaaaagacagcactggcaaatcgggtgcggaggcgcagaccccagaagacagccccaacaggtcgggtgcggaggcaaagacccaaaaagacagccctagcaagtcaggttcggaggcgcagaccacaaaagatgtccctaataagtcgggtgcggacggccagaccccaaaagacggctccagcaagtcgggtgcggaggatcagaccccaaaagacgtccctaacaagtcgggtgcggagaagcagactccaaaagacggctctaacaagtccggtgcagaggagcagggcccaatagacgggcccagcaagtcgggtgcggaggagcagacctcaaaagacagccctaacaaggtggttccagagcagccttcccggaaagaccattccaagcccatctccaacccttctgataacaaggagctccccaaggctgacacaaaccagcttgctgacaaagggaagctttctcctcatgctttcaaaaccgaatctggggaggaaactgacctcatttctcccccgcaggaggaagttaagtcttcagagcctactgaggatgtggagcccaaagaggctgaagatgatgatacaggacccgaggagggctcaccgcccaaagaagagaaagaaaagatgtccggttctgcctccagtgagaaccgtgaagggacactttcggattccacgggtagcgagaaggatgacctttatccgaacggttctggaaatggcagcgcggagagcagccacttctttgcatatctggtgactgcagccattcttgtggctgtcctctatatcgctcatcacaacaagcggaagatcattgcttttgtcctggaaggaaaaagatctaaagtcacccggcggccaaaggccagtgactaccaacgtttggaccagaagtcctaacagaatggtatattcctctggaaaaagatgaacgtcaccaatggattgtgctgctctcgtttcagctttgatttttttgtccttgagaaccttgtcctccctgctgatttgtttctaaatcaaaagaaatgaagaaaaaagtactgtgacctgagagacaccctcctctagaatttagtggcgggtctgggctggcagaggtagggggctgctttgggctttgcacctgcactttggtgacattgttcttctgtgttccctttatttatgctggtggcttccatccgttcctcctctgagggtgagtggaggggtatatggaaacacggctatgaccaaagggagatcccagcctgggcaggctgcgctgctgaccaccctccctggggcccgggctctgtaggaaagttggtccttgactgtggcattgcactctgcactgtttctctctgcagacctaggggaaaactgcaggtggaagtgcttttctactaaggcctcttactttgggggggatgtgccctacagaagacatagaagatggggaaatgccaatgggcaaagagctactttgaatacataattctcttcaaagacttcagcagcaaaccaaaacagcaggttaaaaaaaaagatgcttttttgggtgcaagtctaacctgtctagcatgagatcttcttgattttctgattattttatgtagcttgagacaaagtgaatcaacttccacttagttgtaccgagcataaaacagaacttgggcttcctggcagtgaggccactgtcccatcacagatttttaaaataaatatgatttgaagtagtgtgatctttcacacaatcatactcagtaggaactttttgaaatagggcaagtttatgtttcatgcgagaaaacatgaaggagggttttggttttggtctgcagtttttccaaagggcttttatgagatacatttcccacaaagtccattttgcctttgttgcctaaaacagacaaaatagacttagatttattaatagaaactatactctctgccaattttacctcagtgtatttaatggtcctttaatctgatataagatgccaagggtatttgataaaaattcttcttccatgccatgtcaggagttaatacaaatgaagaaattccgtgggttcccctgggataagtgagggtagtgtcttggacaacactattgtttgaaggtttatcttttctaatcatgctctaccgcattgtagagagcctaaagagagttgtttctgagctgatctcagggaaatacaaataacttgggagatgagggaaataagatgaattctgtgctgtcaaggcagtaagtctgaagaaaggaccatgcttcttatattatcttccaccttgcttaaaacagcccatagctttgagttgacattttcattcttggcggatagcctactttatgaaggtaaggaatgaactcctacccttcttgggtcattctctgtactgatgcgttagtcttataatactttgcaccaacctgaggaatcttctaggcttctctagcatcccctaagactgtggctatttcacgtctctctccctgcctgccttccttttcccttcctttcccctcctcatgttttctggttgtgcccatctgtaccagctcctttccatccaccttcgtatgcacccagatttttctgttcccatctgtcctatttgttattcatcccgctgctcaacttctccagtatgttgcttcccttaagttgccattcattctcttcatgacttttactaactcacttcggtctctgtctgtcaactaaacttttctaaaggttaccagttatccaatcaccaaatccatggctttttctcaaagcttagtcttgtccttggcagaactggacactattgaccatccaaatggaaattcccctttcttggtgtctctgacaaatggtcctttgccttatcttgtgctggtggtgaagaggccctcaaagccaggcctctctattcctttgactgtctcctcagccattaacccattcttcatcctcggagtgagtgattcccaagtctttgtcttggcttaatccctaaagaacccagttctgctggtatcgaatagttcagcttggttgtcattgaaaggaatttctctcttctgtccatcagcctgtccctcccaactgtctaggacagtcttcggtcacctaaattcctaactgcagacttttgccctttttctctctcatcaccaaagtcccatccatttttttttaataaaagatcctcagctacagtctttccattttccttgcttctcttattgcacacccccagcccattttgcttctctcttggattttgttttttcagatccacatttattgggtttcctgtccagcttcttggaaaggagctcactcttggaaagactgatctttccaaaatattttccctggtctgaagctttggtgtgaacttctcaaggcttagagaatccagttacagaccttttggggttcaggatgctatagattgacaccctcctgcctgtttttctctgcatcccaacctggccaaggcccctcctgtggggtgcccatctgtgcctttattccggctgtgccctcgactttccagcttcccatgtttctttggttaggtttctctcccttccttctttctccttccccaatccgcctgtttcgtcagggcccagtttgtttcctcatacaccttcctcactaccccaccccacatggttgactctttccctcagctccaccagctcttcatcatgccactcatttcagaacttgagcaaaacagggcagtcaggatctgatgtctttctggtctccctaagaaaactaagctcttgagggacagcccttggcaatgctttcctatctgctgatcatggtgaccttccttaggacttccagagttcagttccttctggcagagaggttttctttctccatgccatatggatgtgactcaaatgaggggtcccacagcttttcctggctaccacttgctgtgaccttatacatgttggggtttgctcttaaagaggagagcaggaagaaaggttggtttcagaaaccaagagggtcggcagtggacgcgtacattttgtcacggagtccacagagctgagcttttgagcagactctgagaagtatcattgcttgtgttgaaagaatacaacaggatttaagtttctctttagaaattgcactgaagaaaggccgggcgcggtggctccccctgtaatcccagcgctttgggaggccgaggcggggggatcacgaggtcaagagatcgagaccatcctggccaacatggtgaaaccccgtctctaataaaaatacaaaaattagccgggcatggtgacgtgcacctgtagtcccagctactagataggctgaggcaggagaattgcttgaatccgggaggcggaggttgcagtgagccgagatcgtgccactgaactccaacctgccaatagagcgagactccgtctcaaaaaaaaaaaaaaaaaagaaagaaatagcattgaagaaaataccgcacatcagaggaaagcttattttctgcatggtgtcttttcaaagatagaatatttgaagcatgttttctagcgattgtgtggatgagggtgagctggctgaggcatcgctcaagctggggggtggtgtgtaagaagcacgtggagccacaagaggcacctcctatagtcagctaagggcttccctttctgcgcccagcttttgggtgaagggtgatttctattagacacatctgtgcttcagtcatagatgttaatagaggaagcagttttcctgctgcagattcctgaatagagttgctgaaagagtctacttctggactcaggggaagttgaaggccagtctgtgtagaaaggctgaggcaacggggaaagacctgacagctagttacatacgctctgacatagtactcccatgatggcttccagtgacacatgtgctgatagaattctaaacctctggaatttccctgctggcgacttctatggccgttgactgtacagggtaacctgatgccagatgctatgggcgtgatgagaactagagcattgcagcatggaggaaactgtgaggcaccagatcctgtgcttctgcaggccattttctgaaaacccctgttaggaaggttggatttggcgtgacttgcttgagcaagagtcctggggagagattttgaggtttaatttaacggtatatccagagctaacagtgactcaactcgtctagttctgcaagtcagatgtacacttagagtctctctgtgaagggtttgggtctgagctgtatagtatgtcaaactgccagtaagccagcccctcaccctctgatagatattcctttaatgcaccagacttcatgtttgataaatgattaatggttgaaattgtttctcttcttttgtgttttcccagttaatagatggtcactgtttccacaatgttttatactttcagctttttgtaacttaactataattacttaattttatttttttaaagcttgttgtggtctaatgagaagtatttttcagtgcataatgtttttctgagcttctgtaaatgccatcccaatgtggtttggttttgttgaacagaaaccaaaataaatttcaaaatgttaaagcaatgg

SEQ ID NO: 192699 - DNA, 6138 bp, Homo sapiens
  Payload ID: 18041
  Gene Name: trans-golgi network protein 2
  Uniprot ID: O43493
  ENST ID: ENST00000398263
  CDS Start-End: 290-1429
gtaaggtctcggaagtacgaggcggaggggacgaaaaacggggggccagactgttgtggctgtggtggagacgagaaaccaggaagaagaggctcgcctcccactcggcgacagtaagcgaagcagccgaaggcgagcgccgacatcagcagctgccccctaaatcccgcccttcgtcttggcggcagcgggagactgagagacgcgcgcagcaggggcgggactggagaggggccccgcgcgcggatctcgcgagagcattagagggcggaagcgctatccgagcaggatgcggttcgtggttgccttggtcctcctgaacgtcgcagcggcgggagccgtgccgctcttggccaccgaaagcgtcaagcaagaagaagctggagtacggccttctgcaggaaacgtctccacccaccccagcttgagccaacggcctggaggctctaccaagtcgcatccggagccgcagactccaaaagacagccctagcaagtcgagtgcggaggcgcagaccccagaagacacccccaacaagtcgggtgcggaggcaaagacccaaaaagacagctccaacaagtcgggtgcggaggcaaagacccaaaaaggcagcactagcaagtcgggttcggaggcgcagaccacaaaagacagcactagtaagtcgcatccggagctgcagactccaaaagacagcactggcaaatcgggtgcggaggcgcagaccccagaagacagccccaacaggtcgggtgcggaggcaaagacccaaaaagacagccctagcaagtcaggttcggaggcgcagaccacaaaagatgtccctaataagtcgggtgcggacggccagaccccaaaagacggctccagcaagtcgggtgcggaggatcagaccccaaaagacgtccctaacaagtcgggtgcggagaagcagactccaaaagacggctctaacaagtccggtgcagaggagcagggcccaatagacgggcccagcaagtcgggtgcggaggagcagacctcaaaagacagccctaacaaggaggaagttaagtcttcagagcctactgaggatgtggagcccaaagaggctgaagatgatgatacaggacccgaggagggctcaccgcccaaagaagagaaagaaaagatgtccggttctgcctccagtgagaaccgtgaagggacactttcggattccacgggtagcgagaaggatgacctttatccgaacggttctggaaatggcagcgcggagagcagccacttctttgcatatctggtgactgcagccattcttgtggctgtcctctatatcgctcatcacaacaagcggaagatcattgcttttgtcctggaaggaaaaagatctaaagtcacccggcggccaaaggccagtgactaccaacgtttggaccagaagtcctaacagaatggtatattcctctggaaaaagatgaacgtcaccaatggattgtgctgctctcgtttcagctttgatttttttgtccttgagaaccttgtcctccctgctgatttgtttctaaatcaaaagaaatgaagaaaaaagtactgtgacctgagagacaccctcctctagaatttagtggcgggtctgggctggcagaggtagggggctgctttgggctttgcacctgcactttggtgacattgttcttctgtgttccctttatttatgctggtggcttccatccgttcctcctctgagggtgagtggaggggtatatggaaacacggctatgaccaaagggagatcccagcctgggcaggctgcgctgctgaccaccctccctggggcccgggctctgtaggaaagttggtccttgactgtggcattgcactctgcactgtttctctctgcagacctaggggaaaactgcaggtggaagtgcttttctactaaggcctcttactttgggggggatgtgccctacagaagacatagaagatggggaaatgccaatgggcaaagagctactttgaatacataattctcttcaaagacttcagcagcaaaccaaaacagcaggttaaaaaaaaagatgcttttttgggtgcaagtctaacctgtctagcatgagatcttcttgattttctgattattttatgtagcttgagacaaagtgaatcaacttccacttagttgtaccgagcataaaacagaacttgggcttcctggcagtgaggccactgtcccatcacagatttttaaaataaatatgatttgaagtagtgtgatctttcacacaatcatactcagtaggaactttttgaaatagggcaagtttatgtttcatgcgagaaaacatgaaggagggttttggttttggtctgcagtttttccaaagggcttttatgagatacatttcccacaaagtccattttgcctttgttgcctaaaacagacaaaatagacttagatttattaatagaaactatactctctgccaattttacctcagtgtatttaatggtcctttaatctgatataagatgccaagggtatttgataaaaattcttcttccatgccatgtcaggagttaatacaaatgaagaaattccgtgggttcccctgggataagtgagggtagtgtcttggacaacactattgtttgaaggtttatcttttctaatcatgctctaccgcattgtagagagcctaaagagagttgtttctgagctgatctcagggaaatacaaataacttgggagatgagggaaataagatgaattctgtgctgtcaaggcagtaagtctgaagaaaggaccatgcttcttatattatcttccaccttgcttaaaacagcccatagctttgagttgacattttcattcttggcggatagcctactttatgaaggtaaggaatgaactcctacccttcttgggtcattctctgtactgatgcgttagtcttataatactttgcaccaacctgaggaatcttctaggcttctctagcatcccctaagactgtggctatttcacgtctctctccctgcctgccttccttttcccttcctttcccctcctcatgttttctggttgtgcccatctgtaccagctcctttccatccaccttcgtatgcacccagatttttctgttcccatctgtcctatttgttattcatcccgctgctcaacttctccagtatgttgcttcccttaagttgccattcattctcttcatgacttttactaactcacttcggtctctgtctgtcaactaaacttttctaaaggttaccagttatccaatcaccaaatccatggctttttctcaaagcttagtcttgtccttggcagaactggacactattgaccatccaaatggaaattcccctttcttggtgtctctgacaaatggtcctttgccttatcttgtgctggtggtgaagaggccctcaaagccaggcctctctattcctttgactgtctcctcagccattaacccattcttcatcctcggagtgagtgattcccaagtctttgtcttggcttaatccctaaagaacccagttctgctggtatcgaatagttcagcttggttgtcattgaaaggaatttctctcttctgtccatcagcctgtccctcccaactgtctaggacagtcttcggtcacctaaattcctaactgcagacttttgccctttttctctctcatcaccaaagtcccatccatttttttttaataaaagatcctcagctacagtctttccattttccttgcttctcttattgcacacccccagcccattttgcttctctcttggattttgttttttcagatccacatttattgggtttcctgtccagcttcttggaaaggagctcactcttggaaagactgatctttccaaaatattttccctggtctgaagctttggtgtgaacttctcaaggcttagagaatccagttacagaccttttggggttcaggatgctatagattgacaccctcctgcctgtttttctctgcatcccaacctggccaaggcccctcctgtggggtgcccatctgtgcctttattccggctgtgccctcgactttccagcttcccatgtttctttggttaggtttctctcccttccttctttctccttccccaatccgcctgtttcgtcagggcccagtttgtttcctcatacaccttcctcactaccccaccccacatggttgactctttccctcagctccaccagctcttcatcatgccactcatttcagaacttgagcaaaacagggcagtcaggatctgatgtctttctggtctccctaagaaaactaagctcttgagggacagcccttggcaatgctttcctatctgctgatcatggtgaccttccttaggacttccagagttcagttccttctggcagagaggttttctttctccatgccatatggatgtgactcaaatgaggggtcccacagcttttcctggctaccacttgctgtgaccttatacatgttggggtttgctcttaaagaggagagcaggaagaaaggttggtttcagaaaccaagagggtcggcagtggacgcgtacattttgtcacggagtccacagagctgagcttttgagcagactctgagaagtatcattgcttgtgttgaaagaatacaacaggatttaagtttctctttagaaattgcactgaagaaaggccgggcgcggtggctccccctgtaatcccagcgctttgggaggccgaggcggggggatcacgaggtcaagagatcgagaccatcctggccaacatggtgaaaccccgtctctaataaaaatacaaaaattagccgggcatggtgacgtgcacctgtagtcccagctactagataggctgaggcaggagaattgcttgaatccgggaggcggaggttgcagtgagccgagatcgtgccactgaactccaacctgccaatagagcgagactccgtctcaaaaaaaaaaaaaaaaaagaaagaaatagcattgaagaaaataccgcacatcagaggaaagcttattttctgcatggtgtcttttcaaagatagaatatttgaagcatgttttctagcgattgtgtggatgagggtgagctggctgaggcatcgctcaagctggggggtggtgtgtaagaagcacgtggagccacaagaggcacctcctatagtcagctaagggcttccctttctgcgcccagcttttgggtgaagggtgatttctattagacacatctgtgcttcagtcatagatgttaatagaggaagcagttttcctgctgcagattcctgaatagagttgctgaaagagtctacttctggactcaggggaagttgaaggccagtctgtgtagaaaggctgaggcaacggggaaagacctgacagctagttacatacgctctgacatagtactcccatgatggcttccagtgacacatgtgctgatagaattctaaacctctggaatttccctgctggcgacttctatggccgttgactgtacagggtaacctgatgccagatgctatgggcgtgatgagaactagagcattgcagcatggaggaaactgtgaggcaccagatcctgtgcttctgcaggccattttctgaaaacccctgttaggaaggttggatttggcgtgacttgcttgagcaagagtcctggggagagattttgaggtttaatttaacggtatatccagagctaacagtgactcaactcgtctagttctgcaagtcagatgtacacttagagtctctctgtgaagggtttgggtctgagctgtatagtatgtcaaactgccagtaagccagcccctcaccctctgatagatattcctttaatgcaccagacttcatgtttgataaatgattaatggttgaaattgtttctcttcttttgtgttttcccagttaatagatggtcactgtttccacaatgttttatactttcagctttttgtaacttaactataattacttaattttatttttttaaagcttgttgtggtctaatgagaagtatttttcagtgcataatgtttttctgagcttctgtaaatgccatcccaatgtggtttggttttgttgaacagaaaccaaaataaatttcaaaatgttaaagcaa

SEQ ID NO: 192700 - DNA, 2235 bp, Homo sapiens
  Payload ID: 18041
  Gene Name: trans-golgi network protein 2
  Uniprot ID: O43493
  ENST ID: ENST00000409232
  CDS Start-End: 63-1424
agaggggccccgcgcgcggatctcgcgagagcattagagggcggaagcgctatccgagcaggatgcggttcgtggttgccttggtcctcctgaacgtcgcagcggcgggagccgtgccgctcttggccaccgaaagcgtcaagcaagaagaagctggagtacggccttctgcaggaaacgtctccacccaccccagcttgagccaacggcctggaggctctaccaagtcgcatccggagccgcagactccaaaagacagccctagcaagtcgagtgcggaggcgcagaccccagaagacacccccaacaagtcgggtgcggaggcaaagacccaaaaagacagctccaacaagtcgggtgcggaggcaaagacccaaaaaggcagcactagcaagtcgggttcggaggcgcagaccacaaaagacagcactagtaagtcgcatccggagctgcagactccaaaagacagcactggcaaatcgggtgcggaggcgcagaccccagaagacagccccaacaggtcgggtgcggaggcaaagacccaaaaagacagccctagcaagtcaggttcggaggcgcagaccacaaaagatgtccctaataagtcgggtgcggacggccagaccccaaaagacggctccagcaagtcgggtgcggaggatcagaccccaaaagacgtccctaacaagtcgggtgcggagaagcagactccaaaagacggctctaacaagtccggtgcagaggagcagggcccaatagacgggcccagcaagtcgggtgcggaggagcagacctcaaaagacagccctaacaaggtggttccagagcagccttcccggaaagaccattccaagcccatctccaacccttctgataacaaggagctccccaaggctgacacaaaccagcttgctgacaaagggaagctttctcctcatgctttcaaaaccgaatctggggaggaaactgacctcatttctcccccgcaggaggaagttaagtcttcagagcctactgaggatgtggagcccaaagaggctgaagatgatgatacaggacccgaggagggctcaccgcccaaagaagagaaagaaaagatgtccggttctgcctccagtgagaaccgtgaagggacactttcggattccacgggtagcgagaaggatgacctttatccgaacggttctggaaatggcagcgcggagagcagccacttctttgcatatctggtgactgcagccattcttgtggctgtcctctatatcgctcatcacaacaagcggaagatcattgcttttgtcctggaaggaaaaagatctaaagtcacccggcggccaaaggccagtgactaccaacgtttggaccagaagatcttttttcccctaagtcctaacagaatggtatattcctctggaaaaagatgaacgtcaccaatggattgtgctgctctcgtttcagctttgatttttttgtccttgagaaccttgtcctccctgctgatttgtttctaaatcaaaagaaatgaagaaaaaagtactgtgacctgagagacaccctcctctagaatttagtggcgggtctgggctggcagaggtagggggctgctttgggctttgcacctgcactttggtgacattgttcttctgtgttccctttatttatgctggtggcttccatccgttcctcctctgagggtgagtggaggggtatatggaaacacggctatgaccaaagggagatcccagcctgggcaggctgcgctgctgaccaccctccctggggcccgggctctgtaggaaagttggtccttgactgtggcattgcactctgcactgtttctctctgcagacctaggggaaaactgcaggtggaagtgcttttctactaaggcctcttactttgggggggatgtgccctacagaagacatagaagatggggaaatgccaatgggcaaagagctactttgaatacataattctcttcaaagacttcagcagcaaaccaaaacagcaggttaaaaaaaaagatgcttttttgggtgcaagtctaacctgtctagcatgagatcttcttgattttctgattattttatgtagcttgagacaaagtgaatcaacttccacttagttgtaccgagcataaaacagaacttgggcttcctggcagtgaggccactgtcccatcacagatttttaaaataaatatgatttgaagtagtgtgatctttcacacaa

SEQ ID NO: 192701 - DNA, 2276 bp, Homo sapiens
  Payload ID: 18041
  Gene Name: trans-golgi network protein 2
  ENST ID: ENST00000409015
  CDS Start-End: 63-1427
agaggggccccgcgcgcggatctcgcgagagcattagagggcggaagcgctatccgagcaggatgcggttcgtggttgccttggtcctcctgaacgtcgcagcggcgggagccgtgccgctcttggccaccgaaagcgtcaagcaagaagaagctggagtacggccttctgcaggaaacgtctccacccaccccagcttgagccaacggcctggaggctctaccaagtcgcatccggagccgcagactccaaaagacagccctagcaagtcgagtgcggaggcgcagaccccagaagacacccccaacaagtcgggtgcggaggcaaagacccaaaaagacagctccaacaagtcgggtgcggaggcaaagacccaaaaaggcagcactagcaagtcgggttcggaggcgcagaccacaaaagacagcactagtaagtcgcatccggagctgcagactccaaaagacagcactggcaaatcgggtgcggaggcgcagaccccagaagacagccccaacaggtcgggtgcggaggcaaagacccaaaaagacagccctagcaagtcaggttcggaggcgcagaccacaaaagatgtccctaataagtcgggtgcggacggccagaccccaaaagacggctccagcaagtcgggtgcggaggatcagaccccaaaagacgtccctaacaagtcgggtgcggagaagcagactccaaaagacggctctaacaagtccggtgcagaggagcagggcccaatagacgggcccagcaagtcgggtgcggaggagcagacctcaaaagacagccctaacaaggtggttccagagcagccttcccggaaagaccattccaagcccatctccaacccttctgataacaaggagctccccaaggctgacacaaaccagcttgctgacaaagggaagctttctcctcatgctttcaaaaccgaatctggggaggaaactgacctcatttctcccccgcaggaggaagttaagtcttcagagcctactgaggatgtggagcccaaagaggctgaagatgatgatacaggacccgaggagggctcaccgcccaaagaagagaaagaaaagatgtccggttctgcctccagtgagaaccgtgaagggacactttcggattccacgggtagcgagaaggatgacctttatccgaacggttctggaaatggcagcgcggagagcagccacttctttgcatatctggtgactgcagccattcttgtggctgtcctctatatcgctcatcacaacaagcggaagatcattgcttttgtcctggaaggaaaaagatctaaagtcacccggcggccaaaggccagtgactaccaacgtttggaccagaagtatgtcttaattctgaatgttttccctgcacctcctaaaagatcttttttcccctaagtcctaacagaatggtatattcctctggaaaaagatgaacgtcaccaatggattgtgctgctctcgtttcagctttgatttttttgtccttgagaaccttgtcctccctgctgatttgtttctaaatcaaaagaaatgaagaaaaaagtactgtgacctgagagacaccctcctctagaatttagtggcgggtctgggctggcagaggtagggggctgctttgggctttgcacctgcactttggtgacattgttcttctgtgttccctttatttatgctggtggcttccatccgttcctcctctgagggtgagtggaggggtatatggaaacacggctatgaccaaagggagatcccagcctgggcaggctgcgctgctgaccaccctccctggggcccgggctctgtaggaaagttggtccttgactgtggcattgcactctgcactgtttctctctgcagacctaggggaaaactgcaggtggaagtgcttttctactaaggcctcttactttgggggggatgtgccctacagaagacatagaagatggggaaatgccaatgggcaaagagctactttgaatacataattctcttcaaagacttcagcagcaaaccaaaacagcaggttaaaaaaaaagatgcttttttgggtgcaagtctaacctgtctagcatgagatcttcttgattttctgattattttatgtagcttgagacaaagtgaatcaacttccacttagttgtaccgagcataaaacagaacttgggcttcctggcagtgaggccactgtcccatcacagatttttaaaataaatatgatttgaagtagtgtgatctttcacacaa

SEQ ID NO: 192702 - DNA, 1861 bp, Homo sapiens
  Payload ID: 18041
  Gene Name: trans-golgi network protein 2
  Uniprot ID: O43493
  ENST ID: ENST00000444342
  CDS Start-End: 24-1367
ggcggaagcgctatccgagcaggatgcggttcgtggttgccttggtcctcctgaacgtcgcagcggcgggagccgtgccgctcttggccaccgaaagcgtcaagcaagaagaagctggagtacggccttctgcaggaaacgtctccacccaccccagcttgagccaacggcctggaggctctaccaagtcgcatccggagccgcagactccaaaagacagccctagcaagtcgagtgcggaggcgcagaccccagaagacacccccaacaagtcgggtgcggaggcaaagacccaaaaagacagctccaacaagtcgggtgcggaggcaaagacccaaaaaggcagcactagcaagtcgggttcggaggcgcagaccacaaaagacagcactagtaagtcgcatccggagctgcagactccaaaagacagcactggcaaatcgggtgcggaggcgcagaccccagaagacagccccaacaggtcgggtgcggaggcaaagacccaaaaagacagccctagcaagtcaggttcggaggcgcagaccacaaaagatgtccctaataagtcgggtgcggacggccagaccccaaaagacggctccagcaagtcgggtgcggaggatcagaccccaaaagacgtccctaacaagtcgggtgcggagaagcagactccaaaagacggctctaacaagtccggtgcagaggagcagggcccaatagacgggcccagcaagtcgggtgcggaggagcagacctcaaaagacagccctaacaaggtggttccagagcagccttcccggaaagaccattccaagcccatctccaacccttctgataacaaggagctccccaaggctgacacaaaccagcttgctgacaaagggaagctttctcctcatgctttcaaaaccgaatctggggaggaaactgacctcatttctcccccgcaggaggaagttaagtcttcagagcctactgaggatgtggagcccaaagaggctgaagatgatgatacaggacccgaggagggctcaccgcccaaagaagagaaagaaaagatgtccggttctgcctccagtgagaaccgtgaagggacactttcggattccacgggtagcgagaaggatgacctttatccgaacggttctggaaatggcagcgcggagagcagccacttctttgcatatctggtgactgcagccattcttgtggctgtcctctatatcgctcatcacaacaagcggaagatcattgcttttgtcctggaaggaaaaagatctaaagtcacccggcggccaaaggccagtgactaccaacgtttggaccagaaggtaaggaaggaggagccaggtccatgggagggataggagggataggcaacgtcagatggacccagtagtgggcttgcatttgccatgaagcagcagtggctgattctggggatgcggttgctgttgctgttgcattcgccctttttagacaacaaactagaaacatctagatacacatatctgtgacgttagagctagcagagaccttggaatactctacagcagctacctcccttcacagatgaggaaataggcccacgcagaaacactcttttttttttttttccgctaagtttctactgcaagttagtggcaaactcaggacctgatagcaactccctagtctcccagtcctgagctttctgcattctgccagcgctccataaactttaataggcatttgaatcaccttggggaattttgataaaaagcattatctgattcattagatgtggggtggagcctatatttctacattcttttttttttttttggagatggagttttgctcttgttgcccaggctggagt

SEQ ID NO: 192703 - DNA, 3360 bp, Homo sapiens
  Payload ID: 18042
  Gene Name: trans-golgi network vesicle protein 23 homolog A (S. cerevisiae)
  Uniprot ID: A6NH52
  ENST ID: ENST00000299866
  CDS Start-End: 293-934
actatctctgtccgcagttccccaggccgttgcctccctgccgccgctttctctcctgggcgcgtccccggcgagccgagccccctccccagcctgcgactgcgccttaggccccgagcgccccgccccacccgagaagctgcgctgaggctgccccacagggcgcaggccccgaccctcagcgtccaccgtctgctgcctacatccgcccgcccggcgtccgaccccttcagcggcgacgggcggagctggagccccgggcctgggcgccaggtgggctcctgggagggtgatgaagcaggccctggtggacgataccgaggatgtgtccctggactttggaaacgaggaggagctggcctttaggaaagccaagatcagacaccccttggccacctttttccacctgtttttccgagtgagtgccatcgtcacctacgtgagctgcgactggttcagcaagagctttgtgggctgttttgtcatggtgctgctcctcctgtccctggacttctggtctgtgaagaatgtaaccggaagactcctggtgggccttcgatggtggaaccagatagatgaagatgggaagagccactggatctttgaagccaggaaggtctctccgaatagcattgctgccacagaagctgaagcacgaatcttctggctgggcctcataatctgccccatgatatggattgtgtttttttttagcaccttattttccttgaagctaaagtggctggctctggtggttgctgggatctctctccaagctgcaaacctgtatggctacatcctttgtaagatgggaggcaacagtgacattggcaaggtcacagccagtttcctgtcccagacagtgttccagacggcctgcccaggtgactttcagaagcctggcctcgaggggctggagattcaccagcattaggaactgatgaggttctcttcttttgactgatggagattacaaaactcttggattcctggaaaacaagacgacaggcatagagtgctaatggcttgtctaccccttgacagccctgtcctgtgctggggagggctgtgttttgacaggggtggaatcctctggctagttccataaaaagacctgtgtctgtgatgccctgagtctttgaaagtgaccggaatacctcacactacccatcttgctcataaccagtggctgcggccttcctcggaccatctatagatggaggattctgggaatgctgtttccttacccttgacatcattcttctaggcaagtaaaacccagccacaaactcagagaccacagctttaacaaacactgacacctctgccctaactctggggcctctgatggctgccactggctgaatgtggcctgcacgtgggtttggtctggctcaacaaagtttttatttttattttttatttttttgagacacggtctcacgctgttgcccaggctggagtgcagtggcgcgatctcgccttactgcagcctccgcctcccaggttcaagcgattctcctgcctcagcctcctgagtagctgggactacaggcatgcgccaccacacccggctaattttcatatttttagtagagacagtgtttctccatgttagccaggctggtcttgaactcctgaccagcctcaagtgatctgcctgcctccttcacccaaagtgctgggattccaggtgtgagccactgcacctggccttttttttttttatcagttacttttaaaaatgaattactttatccctttattgggatgtatttcctaagccataaatttcaccctcaccatgttttttaaactatgaattaattcacaatactcacacattgagagatttctcatggactcctggcttcctcggctatgggggccactctgtggtcatcacagaccccaccacccacctgtccttccacacccctggctcctttatgttgcttcctgccccacaggcatctgcatttagtactcatggaaatacttactctgaattatacttctgtaggctaacgtggctggggaatctggggcgtcaatgaaaaaagactggcctttgtcacaattcttaccttaaaaaagaaacaaacggaagacaattcagtccaagaggaaaacagaatggccacaagatcttggggctctttccgtgctggtgacaatgggaagatcttgagcccgcttcactcgtaatgaagaacaaagtagaaaagaccagtggggtctcagggaccttccttccagcagggtccccagccagcatttcagcgtggctaaataatcaggtggtgtacagaaaatgcaggttccagggccctacagagaactgattcagcagcttccacatgggcccaggagtctgcattttaagagattagcttttgagtgaaaggatcatgaatgcacatggttaaaaaaagtacagaatgcaaaaggatatggcataaaaggccaagtccgaaaagggctactagtgttctaggtgtctttccagaaagattatgcgcatataaatgtgcacacttgcatgtgtgcgcacacacatacacacactctcatatacctaaaatacgaatgggagcacatgacacacacattctgcctgctgctttgtctgtgtataattttatcttccaggtcatctgtgctggtgtctatcagtctgctagtctttccccgccatgtggccattgttccagtcccctcctatgcacacccaggtttctctaggaccatgttatcccagagccaggtggacaggacacaaggggctaggggtcaatgggggtgttctcgcctccagtctgccctgccagcccccagtcgtgggtggacctgccatcagcttgctctgcccactccccaggcctgagctgctggcgaaacaggcaagtgactgcactgcccatggccggtcaccagcctcaggtgaaccccaggaggggttcctacctagcactcatcatttcctcaacttcactactgtgtcgccctgtgggacagggaagtccaagtcggggaagaagcctgtggggaggggttggtgggagatggggagcccatatggcccagtgagtcaggaaaatagggtccagaggcagggaacataaggccaattcgcacttgagccataacaggaaatgtcctctccataggacgtatgccgtaaatgactttgtaactttacttcatccttttcgtttatatagggcgtacctcaagtagagggtatttaaacacaaaaactctgtaatggggcctttgagcccctattctcaggcccgttctcctcccacaccgtggagttgactttcattttcaataaatcccttccttccttccttt

SEQ ID NO: 192704 - DNA, 1223 bp, Homo sapiens
  Payload ID: 18042
  Gene Name: trans-golgi network vesicle protein 23 homolog A (S. cerevisiae)
  Uniprot ID: A6NH52
  ENST ID: ENST00000456096
  CDS Start-End: 108-674
ccaccgtctgctgcctacatccgcccgcccggcgtccgaccccttcagcggcgacgggcggagctggagccccgggcctgggcgccaggtgggctcctgggagggtgatgaagcaggccctggtggacgataccgaggatgtgtccctggactttggaaacgaggaggagctggcctttaggaaagccaagatcagagaccgggtctcaaaactcctagcctcagtgatcctcctgccttggcctcccaaagtgctgggattaaagaatgtaaccggaagactcctggtgggccttcgatggtggaaccagatagatgaagatgggaagagccactggatctttgaagccaggaaggtctctccgaatagcattgctgccacagaagctgaagcacgaatcttctggctgggcctcataatctgccccatgatatggattgtgtttttttttagcaccttattttccttgaagctaaagtggctggctctggtggttgctgggatctctctccaagctgcaaacctgtatggctacatcctttgtaagatgggaggcaacagtgacattggcaaggtcacagccagtttcctgtcccagacagtgttccagacggcctgcccaggtgactttcagaagcctggcctcgaggggctggagattcaccagcattagatgtttcccctgacaaacgtcctgcccaccaatcccatctcggcagagctgaactgtggcagaggtgcaggctggcaggaatggatgtgccctgggctgctgcaagctcctgtccccaatcacatccattcatgcagcccaactgcctccaggggcctcagagggcagctctcatcaccacttccggccactgcaaaagctgcctgggaaagcagaaatagtttgcagagcagccttccgatcgtttcctcatccatgagagcaagatcttgctcgcctggcagccccacgcgccctcaccttgcacttaggacagatgaagccactcatgttctccaccaccccgatgatgggcagcttcaccttgcggcagaagttgatttctttccggacatcctggagtgacacctcctacgaaggtgaaaagaccagtgattccagcatcaaagtgcgagaaagggaatgtctgtgcaaccgaggggatggctgcaatgcagtggatctgcgatcataaagccttagaggtttctgccctgatagggtttggct

SEQ ID NO: 192705 - DNA, 3677 bp, Homo sapiens
  Payload ID: 18042
  Gene Name: trans-golgi network vesicle protein 23 homolog A (S. cerevisiae)
  ENST ID: ENST00000573360
  CDS Start-End: 159-272
agaagctgcgctgaggctgccccacagggcgcaggccccgaccctcagcgtccaccgtctgctgcctacatccgcccgcccggcgtccgaccccttcagcggcgacgggcggagctggagccccgggcctgggcgccaggtgggctcctgggagggtgatgaagcaggccctggtggacgataccgaggatgtgtccctggactttggaaacgaggaggagctggcctttaggaaagccaagatcaggaacacgcattccccgatgacatgagacacctgccccgtgggctgcgtgtgagcttggagctcagtgactggtggtggaaaaacccaacctttacctttagggaactggccgtcatctctgctaggcgggaaggcagtgactgctgtcacgtttcacttcaaagatgaccgtgtttcgaagagggcaagtgatatttggagtcaagtggcgggaaagtactggattcttcgaaggggaggaaaaaaaacagtgtcagcatgactgtctggggactgctgacctaatgatgtgtccccagggctacagcctgagtttctgcgtcatatgcaccggggagaacattccattgagccacgctaacacccccagcaaagtctgaagtggtaaagggagttcagtgaccatccgcttagctcttggagtgagggcgccttctgggtcctttcctagacaccccttggccacctttttccacctgtttttccgagtgagtgccatcgtcacctacgtgagctgcgactggttcagcaagagctttgtgggctgttttgtcatggtgctgctcctcctgtccctggacttctggtctgtgaagaatgtaaccggaagactcctggtgggccttcgatggtggaaccagatagatgaagatgggaagagccactggatctttgaagccaggaaggtctctccgaatagcattgctgccacagaagctgaagcacgaatcttctggctgggcctcataatctgccccatgatatggattgtgtttttttttagcaccttattttccttgaagctaaagtggctggctctggtggttgctgggatctctctccaagctgcaaacctgtatggctacatcctttgtaagatgggaggcaacagtgacattggcaaggtcacagccagtttcctgtcccagacagtgttccagacggcctgcccaggtgactttcagaagcctggcctcgaggggctggagattcaccagcattaggaactgatgaggttctcttcttttgactgatggagattacaaaactcttggattcctggaaaacaagacgacaggcatagagtgctaatggcttgtctaccccttgacagccctgtcctgtgctggggagggctgtgttttgacaggggtggaatcctctggctagttccataaaaagacctgtgtctgtgatgccctgagtctttgaaagtgaccggaatacctcacactacccatcttgctcataaccagtggctgcggccttcctcggaccatctatagatggaggattctgggaatgctgtttccttacccttgacatcattcttctaggcaagtaaaacccagccacaaactcagagaccacagctttaacaaacactgacacctctgccctaactctggggcctctgatggctgccactggctgaatgtggcctgcacgtgggtttggtctggctcaacaaagtttttatttttattttttatttttttgagacacggtctcacgctgttgcccaggctggagtgcagtggcgcgatctcgccttactgcagcctccgcctcccaggttcaagcgattctcctgcctcagcctcctgagtagctgggactacaggcatgcgccaccacacccggctaattttcatatttttagtagagacagtgtttctccatgttagccaggctggtcttgaactcctgaccagcctcaagtgatctgcctgcctccttcacccaaagtgctgggattccaggtgtgagccactgcacctggccttttttttttttatcagttacttttaaaaatgaattactttatccctttattgggatgtatttcctaagccataaatttcaccctcaccatgttttttaaactatgaattaattcacaatactcacacattgagagatttctcatggactcctggcttcctcggctatgggggccactctgtggtcatcacagaccccaccacccacctgtccttccacacccctggctcctttatgttgcttcctgccccacaggcatctgcatttagtactcatggaaatacttactctgaattatacttctgtaggctaacgtggctggggaatctggggcgtcaatgaaaaaagactggcctttgtcacaattcttaccttaaaaaagaaacaaacggaagacaattcagtccaagaggaaaacagaatggccacaagatcttggggctctttccgtgctggtgacaatgggaagatcttgagcccgcttcactcgtaatgaagaacaaagtagaaaagaccagtggggtctcagggaccttccttccagcagggtccccagccagcatttcagcgtggctaaataatcaggtggtgtacagaaaatgcaggttccagggccctacagagaactgattcagcagcttccacatgggcccaggagtctgcattttaagagattagcttttgagtgaaaggatcatgaatgcacatggttaaaaaaagtacagaatgcaaaaggatatggcataaaaggccaagtccgaaaagggctactagtgttctaggtgtctttccagaaagattatgcgcatataaatgtgcacacttgcatgtgtgcgcacacacatacacacactctcatatacctaaaatacgaatgggagcacatgacacacacattctgcctgctgctttgtctgtgtataattttatcttccaggtcatctgtgctggtgtctatcagtctgctagtctttccccgccatgtggccattgttccagtcccctcctatgcacacccaggtttctctaggaccatgttatcccagagccaggtggacaggacacaaggggctaggggtcaatgggggtgttctcgcctccagtctgccctgccagcccccagtcgtgggtggacctgccatcagcttgctctgcccactccccaggcctgagctgctggcgaaacaggcaagtgactgcactgcccatggccggtcaccagcctcaggtgaaccccaggaggggttcctacctagcactcatcatttcctcaacttcactactgtgtcgccctgtgggacagggaagtccaagtcggggaagaagcctgtggggaggggttggtgggagatggggagcccatatggcccagtgagtcaggaaaatagggtccagaggcagggaacataaggccaattcgcacttgagccataacaggaaatgtcctctccataggacgtatgccgtaaatgactttgtaactttacttcatccttttcgtttatatagggcgtacctcaagtagagggtatttaaacacaaaaactctgtaatggggcctttgagcccctattctcaggcccgttctcctcccacaccgtggagttgactttcattttcaataaatcccttccttccttccttt

SEQ ID NO: 192706 - DNA, 1298 bp, Homo sapiens
  Payload ID: 18042
  Gene Name: trans-golgi network vesicle protein 23 homolog A (S. cerevisiae)
  Uniprot ID: A6NH52
  ENST ID: ENST00000575135
  CDS Start-End: 108-749
ccaccgtctgctgcctacatccgcccgcccggcgtccgaccccttcagcggcgacgggcggagctggagccccgggcctgggcgccaggtgggctcctgggagggtgatgaagcaggccctggtggacgataccgaggatgtgtccctggactttggaaacgaggaggagctggcctttaggaaagccaagatcagacaccccttggccacctttttccacctgtttttccgagtgagtgccatcgtcacctacgtgagctgcgactggttcagcaagagctttgtgggctgttttgtcatggtgctgctcctcctgtccctggacttctggtctgtgaagaatgtaaccggaagactcctggtgggccttcgatggtggaaccagatagatgaagatgggaagagccactggatctttgaagccaggaaggtctctccgaatagcattgctgccacagaagctgaagcacgaatcttctggctgggcctcataatctgccccatgatatggattgtgtttttttttagcaccttattttccttgaagctaaagtggctggctctggtggttgctgggatctctctccaagctgcaaacctgtatggctacatcctttgtaagatgggaggcaacagtgacattggcaaggtcacagccagtttcctgtcccagacagtgttccagacggcctgcccaggtgactttcagaagcctggcctcgaggggctggagattcaccagcattagatgtttcccctgacaaacgtcctgcccaccaatcccatctcggcagagctgaactgtggcagaggtgcaggctggcaggaatggatgtgccctgggctgctgcaagctcctgtccccaatcacatccattcatgcagcccaactgcctccaggggcctcagagggcagctctcatcaccacttccggccactgcaaaagctgcctgggaaagcagaaatagtttgcagagcagccttccgatcgtttcctcatccatgagagcaagatcttgctcgcctggcagccccacgcgccctcaccttgcacttaggacagatgaagccactcatgttctccaccaccccgatgatgggcagcttcaccttgcggcagaagttgatttctttccggacatcctggagtgacacctcctacgaaggtgaaaagaccagtgattccagcatcaaagtgcgagaaagggaatgtctgtgcaaccgaggggatggctgcaatgcagtggatctgcgatcataaagccttagaggtttctgccctgatagggtttggct

SEQ ID NO: 192707 - DNA, 3256 bp, Homo sapiens
  Payload ID: 18042
  Gene Name: trans-golgi network vesicle protein 23 homolog A (S. cerevisiae)
  ENST ID: ENST00000572428
  CDS Start-End: 1-453
gtcatggtgctgctcctcctgtccctggacttctggtctgtgaagaatgtaaccggaagactcctggtgggccttcgatggtggaaccagatagatgaagatgggaagagccactggatctttgaagccaggaaggtctctccgaatagcattgctgccacagaagctgaagcacgaatcttctggctgggcctcataatctgccccatgatatggattgtgtttttttttagcaccttattttccttgaagctaaagtggctggctctggtggttgctgggatctctctccaagctgcaaacctgtatggctacatcctttgtaagatgggaggcaacagtgacattggcaaggtcacagccagtttcctgtcccagacagtgttccagacggcctgcccaggtgactttcagaagcctggcctcgaggggctggagattcaccagcattaggctttcttatcttcacaggcagaaatggcttaaacgggagtttctacaatcgactaagcttccgacacagcagaatcccacgatcccacaacccatttgttttttacgtgaaacaggcctcgggggagagatttgagggggttttattcttaaaacggcacatttgtagagaatgccctttatatatgttctaaagaaaagtgtacaaatactcaatgattaaagtgtctctgagaaagtggcttcggaccacaccagcatctggtccttttgctgtgacccaccccatcccggagctggtcgggtctggctggatgtgctgcccagtgagtgcctcgctcggtaactgcttggtcctgaacattctctcgtttcaggaactgatgaggttctcttcttttgactgatggagattacaaaactcttggattcctggaaaacaagacgacaggcatagagtgctaatggcttgtctaccccttgacagccctgtcctgtgctggggagggctgtgttttgacaggggtggaatcctctggctagttccataaaaagacctgtgtctgtgatgccctgagtctttgaaagtgaccggaatacctcacactacccatcttgctcataaccagtggctgcggccttcctcggaccatctatagatggaggattctgggaatgctgtttccttacccttgacatcattcttctaggcaagtaaaacccagccacaaactcagagaccacagctttaacaaacactgacacctctgccctaactctggggcctctgatggctgccactggctgaatgtggcctgcacgtgggtttggtctggctcaacaaagtttttatttttattttttatttttttgagacacggtctcacgctgttgcccaggctggagtgcagtggcgcgatctcgccttactgcagcctccgcctcccaggttcaagcgattctcctgcctcagcctcctgagtagctgggactacaggcatgcgccaccacacccggctaattttcatatttttagtagagacagtgtttctccatgttagccaggctggtcttgaactcctgaccagcctcaagtgatctgcctgcctccttcacccaaagtgctgggattccaggtgtgagccactgcacctggccttttttttttttatcagttacttttaaaaatgaattactttatccctttattgggatgtatttcctaagccataaatttcaccctcaccatgttttttaaactatgaattaattcacaatactcacacattgagagatttctcatggactcctggcttcctcggctatgggggccactctgtggtcatcacagaccccaccacccacctgtccttccacacccctggctcctttatgttgcttcctgccccacaggcatctgcatttagtactcatggaaatacttactctgaattatacttctgtaggctaacgtggctggggaatctggggcgtcaatgaaaaaagactggcctttgtcacaattcttaccttaaaaaagaaacaaacggaagacaattcagtccaagaggaaaacagaatggccacaagatcttggggctctttccgtgctggtgacaatgggaagatcttgagcccgcttcactcgtaatgaagaacaaagtagaaaagaccagtggggtctcagggaccttccttccagcagggtccccagccagcatttcagcgtggctaaataatcaggtggtgtacagaaaatgcaggttccagggccctacagagaactgattcagcagcttccacatgggcccaggagtctgcattttaagagattagcttttgagtgaaaggatcatgaatgcacatggttaaaaaaagtacagaatgcaaaaggatatggcataaaaggccaagtccgaaaagggctactagtgttctaggtgtctttccagaaagattatgcgcatataaatgtgcacacttgcatgtgtgcgcacacacatacacacactctcatatacctaaaatacgaatgggagcacatgacacacacattctgcctgctgctttgtctgtgtataattttatcttccaggtcatctgtgctggtgtctatcagtctgctagtctttccccgccatgtggccattgttccagtcccctcctatgcacacccaggtttctctaggaccatgttatcccagagccaggtggacaggacacaaggggctaggggtcaatgggggtgttctcgcctccagtctgccctgccagcccccagtcgtgggtggacctgccatcagcttgctctgcccactccccaggcctgagctgctggcgaaacaggcaagtgactgcactgcccatggccggtcaccagcctcaggtgaaccccaggaggggttcctacctagcactcatcatttcctcaacttcactactgtgtcgccctgtgggacagggaagtccaagtcggggaagaagcctgtggggaggggttggtgggagatggggagcccatatggcccagtgagtcaggaaaatagggtccagaggcagggaacataaggccaattcgcacttgagccataacaggaaatgtcctctccataggacgtatgccgtaaatgactttgtaactttacttcatccttttcgtttatatagggcgtacctcaagtagagggtatttaaacacaaaaactctgtaatggggcctttgagcccctattctcaggcccgttctcctcccacaccgtggagttgactttcattttcaataaatcccttccttccttccttt

SEQ ID NO: 192708 - DNA, 2987 bp, Homo sapiens
  Payload ID: 18042
  Gene Name: trans-golgi network vesicle protein 23 homolog A (S. cerevisiae)
  ENST ID: ENST00000572102
  CDS Start-End: 1-189
gtctctccgaatagcattgctgccacagaagctgaagcacgaatcttctggctgggcctcataatctgccccatgatatggattgtgtttttttttagcaccttattttccttgaagctaaagtggctggcctgcccaggtgactttcagaagcctggcctcgaggggctggagattcaccagcattaggctttcttatcttcacaggcagaaatggcttaaacgggagtttctacaatcgactaagcttccgacacagcagaatcccacgatcccacaacccatttgttttttacgtgaaacaggcctcgggggagagatttgagggggttttattcttaaaacggcacatttgtagagaatgccctttatatatgttctaaagaaaagtgtacaaatactcaatgattaaagtgtctctgagaaagtggcttcggaccacaccagcatctggtccttttgctgtgacccaccccatcccggagctggtcgggtctggctggatgtgctgcccagtgagtgcctcgctcggtaactgcttggtcctgaacattctctcgtttcaggaactgatgaggttctcttcttttgactgatggagattacaaaactcttggattcctggaaaacaagacgacaggcatagagtgctaatggcttgtctaccccttgacagccctgtcctgtgctggggagggctgtgttttgacaggggtggaatcctctggctagttccataaaaagacctgtgtctgtgatgccctgagtctttgaaagtgaccggaatacctcacactacccatcttgctcataaccagtggctgcggccttcctcggaccatctatagatggaggattctgggaatgctgtttccttacccttgacatcattcttctaggcaagtaaaacccagccacaaactcagagaccacagctttaacaaacactgacacctctgccctaactctggggcctctgatggctgccactggctgaatgtggcctgcacgtgggtttggtctggctcaacaaagtttttatttttattttttatttttttgagacacggtctcacgctgttgcccaggctggagtgcagtggcgcgatctcgccttactgcagcctccgcctcccaggttcaagcgattctcctgcctcagcctcctgagtagctgggactacaggcatgcgccaccacacccggctaattttcatatttttagtagagacagtgtttctccatgttagccaggctggtcttgaactcctgaccagcctcaagtgatctgcctgcctccttcacccaaagtgctgggattccaggtgtgagccactgcacctggccttttttttttttatcagttacttttaaaaatgaattactttatccctttattgggatgtatttcctaagccataaatttcaccctcaccatgttttttaaactatgaattaattcacaatactcacacattgagagatttctcatggactcctggcttcctcggctatgggggccactctgtggtcatcacagaccccaccacccacctgtccttccacacccctggctcctttatgttgcttcctgccccacaggcatctgcatttagtactcatggaaatacttactctgaattatacttctgtaggctaacgtggctggggaatctggggcgtcaatgaaaaaagactggcctttgtcacaattcttaccttaaaaaagaaacaaacggaagacaattcagtccaagaggaaaacagaatggccacaagatcttggggctctttccgtgctggtgacaatgggaagatcttgagcccgcttcactcgtaatgaagaacaaagtagaaaagaccagtggggtctcagggaccttccttccagcagggtccccagccagcatttcagcgtggctaaataatcaggtggtgtacagaaaatgcaggttccagggccctacagagaactgattcagcagcttccacatgggcccaggagtctgcattttaagagattagcttttgagtgaaaggatcatgaatgcacatggttaaaaaaagtacagaatgcaaaaggatatggcataaaaggccaagtccgaaaagggctactagtgttctaggtgtctttccagaaagattatgcgcatataaatgtgcacacttgcatgtgtgcgcacacacatacacacactctcatatacctaaaatacgaatgggagcacatgacacacacattctgcctgctgctttgtctgtgtataattttatcttccaggtcatctgtgctggtgtctatcagtctgctagtctttccccgccatgtggccattgttccagtcccctcctatgcacacccaggtttctctaggaccatgttatcccagagccaggtggacaggacacaaggggctaggggtcaatgggggtgttctcgcctccagtctgccctgccagcccccagtcgtgggtggacctgccatcagcttgctctgcccactccccaggcctgagctgctggcgaaacaggcaagtgactgcactgcccatggccggtcaccagcctcaggtgaaccccaggaggggttcctacctagcactcatcatttcctcaacttcactactgtgtcgccctgtgggacagggaagtccaagtcggggaagaagcctgtggggaggggttggtgggagatggggagcccatatggcccagtgagtcaggaaaatagggtccagaggcagggaacataaggccaattcgcacttgagccataacaggaaatgtcctctccataggacgtatgccgtaaatgactttgtaactttacttcatccttttcgtttatatagggcgtacctcaagtagagggtatttaaacacaaaaactctgtaatggggcctttgagcccctattctcaggcccgttctcctcccacaccgtggagttgactttcattttcaataaatcccttccttcctt

SEQ ID NO: 192709 - DNA, 667 bp, Homo sapiens
  Payload ID: 18042
  Gene Name: trans-golgi network vesicle protein 23 homolog A (S. cerevisiae)
  ENST ID: ENST00000619408
  CDS Start-End: 1-461
gcgactggttcagcaagagctttgtgggctgttttgtcatggtgctgctcctcctgtccctggacttctggtctgtgaagaatgtaaccggaagactcctggtgggccttcgatggtggaaccagatagatgaagatgggaagagccactggatctttgaagccaggaaggtctctccgaatagcattgctgccacagaagctgaagcacgaatcttctggctgggcctcataatctgccccatgatatggattgtgtttttttttagcaccttattttccttgaagctaaagtggctggctctggtggttgctgggatctctctccaagctgcaaacctgtatggctacatcctttgtaagatgggaggcaacagtgacattggcaaggtcacagccagtttcctgtcccagacagtgttccagacggctttcttatcttcacaggcagaaatggcttaaacgggagtttctacaatcgactaagcttccgacacagcagaatcccacgatcccacaacccatttgttttttacgtgaaacaggcctcgggggagagatttgagggggttttattcttaaaacggcacatttgtagagaatgccctttatatatgttctaaagaaaagtgtacaaatactcaatgattaaagtgtctctgagaaag

SEQ ID NO: 192710 - DNA, 1298 bp, Homo sapiens; identical to SEQ ID NO: 192706
  Payload ID: 18042
  Gene Name: trans-golgi network vesicle protein 23 homolog A (S. cerevisiae)
  Uniprot ID: A6NH52
  ENST ID: ENST00000612195
  CDS Start-End: 108-749

SEQ ID NO: 192711 - DNA, 2064 bp, Homo sapiens
  Payload ID: 18043
  Gene Name: trans-golgi network vesicle protein 23 homolog B (S. cerevisiae)
  Uniprot ID: Q9NYZ1
  ENST ID: ENST00000307767
  CDS Start-End: 300-917
gacagcaaatacttccgtaaaacagaccatgaagctttccacttagagcccactgtggccccaatacctttccctttcgctcctgctccaggctccgcctccgccgtgtccgggccgctcgccccgcccccgctcgccccgcccctggatttgctccctcaaagcggaagtgaggccggactgaggctcttacagtggtccctgctggcccttggtgacgggtcgcctcagttccgacccggacccgtacgctgctgcgctgacgtggctcccggaagtagggctggcgtagggccgccatgttgcagcaggatagtaatgatgacactgaagatgtttcactgtttgatgcggaagaggagacgactaatagaccaagaaaagccaaaatcagacatccagtagcatcgtttttccacttattctttcgagtcagtgcaatcatcgtctatcttctctgtgggttgctcagcagcagctttattacctgtatggtgacaattatcttgttgttgtcgtgtgacttttgggcagtgaagaatgtcacaggtagactaatggttggcctacgttggtggaatcacattgatgaagatggaaagagccattgggtgtttgaatctagaaaggagtcctctcaagagaataaaactgtgtcagaggctgaatcaagaatcttttggttgggacttattgcctgtccagtactgtgggtgatatttgcttttagtgcactcttctccttcagagtaaagtggttggcggtggttatcatgggtgtggtgctacaaggtgccaacctgtatggttacatcaggtgtaaggtgcgcagcagaaagcatttaaccagcatggctacttcatattttggaaagcagtttttaagacaaaacactggagatgatcagacttcctgaatagagaaagcttatgtgctttgttacattggggaacaactgaagagattcttgactcaaccttttagagcttagtccatgttgcaacgaggagtgttggctttgtttttccacttaaaaactttatttataaaaaggaaaagtagttttcatattaagtttttatttcctttccagcagttggggctagaaagtatgtgttggcactagaaacattgtcaagatttgttctgtggtgtaggtatgcacattccataggtatgcacacggccatgtaatatcagtatatcccaagttaatgaaagtgttcatttacataggtaatggagacctttgcattttgatccatagaacataggaggatgttcttagtctgtctcaaagctctatatgtttacatattatttctgtagattgttttcaggagaaagttttgcttctatggtaagagtgagcactttggcttatgtataagttagaaataattgttagtttttaatatgcacttcgtggggaaatttcttagacgtatgcaagcaagtgaaaacaattagggccagtggtattaactactttataaaattttatttttgtttgtaagaagtcatctatttaaggcccagttaatataagtggaatcatcatagtttaaggaatacccagagattgctgctgttctatttattttacagaaaggatagctagattgaaagctcttcagtggaccttgagctaatagatcttttaccactaaaagagcattattctcatgtcataatgagaataataatttacatacttggcataataaatgcctaaaagacattttattttctgaatctatttttttcttgctataatggggatattgtaaattatgcatttgtattaatggtatttcttaaagcaatctatgtaactgtaaattaaaccaatctacaaactattgtaggcatctgtaaattctgttgtaggtattataaactttgttgaagtcttaatcagcagattatgttgtgaatatatttgtacattgttaaaatagtttttaagattatttgtttaattgaataagtgtcttattggagtgatagctttgaaggtgcaaaactttatatttgtataaaattctactatttacaaggca

SEQ ID NO: 192712 - DNA, 1049 bp, Homo sapiens
  Payload ID: 18043
  Gene Name: trans-golgi network vesicle protein 23 homolog B (S. cerevisiae)
  ENST ID: ENST00000574294
  CDS Start-End: 184-345
gctcgccccgcccccgctcgccccgcccctggatttgctccctcaaagcggaagtgaggccggactgaggctcttacagtggtccctgctggcccttggtgacgggtcgcctcagttccgacccggacccgtacgctgctgcgctgacgtggctcccggaagtagggctggcgtagggccgccatgttgcagcaggatagtaatgatgacactgaagatgtttcactgtttgatgcggaagaggagacgactaatagaccaagaaaagccaaaatcagacatccagtagcatcgtttttccacttattctttcgagtcagtgcaatcatcgtctatcttctctaatgtcacaggtagactaatggttggcctacgttggtggaatcacattgatgaagatggaaagagccattgggtgtttgaatctagaaaggagtcctctcaagagaataaaactgtgtcagaggctgaatcaagaatcttttggttgggacttattgcctgtccagtactgtgggtgatatttgcttttagtgcactcttctccttcagagtaaagtggttggcggtggttatcatgggtgtggtgctacaaggtgccaacctgtatggttacatcaggtgtaaggtgcgcagcagaaagcatttaaccagcatggctacttcatattttggaaagcagtttttaagacaaaacactggagatgatcagacttcctgaatagagaaagcttatgtgctttgttacattggggaacaactgaagagattcttgactcaaccttttagagcttagtccatgttgcaacgaggagtgttggctttgtttttccacttaaaaactttatttataaaaaggaaaagtagttttcatattaagtttttatttcctttccagcagttggggctagaaagtatgtgttggcactagaaacattgtcaagatttgttctgtggtgtaggtatgcacattccataggtatgcacacggccatgtaatatcagtatatcccaagttaatgaaagtgttcatttacataggtaatgga

SEQ ID NO: 192713 - DNA, 718 bp, Homo sapiens
  Payload ID: 18043
  Gene Name: trans-golgi network vesicle protein 23 homolog B (S. cerevisiae)
  ENST ID: ENST00000571018
  CDS Start-End: 152-265
atttgctccctcaaagcggaagtgaggccggactgaggctcttacagtggtccctgctggcccttggtgacgggtcgcctcagttccgacccggacccgtacgctgctgcgctgacgtggctcccggaagtagggctggcgtagggccgccatgttgcagcaggatagtaatgatgacactgaagatgtttcactgtttgatgcggaagaggagacgactaatagaccaagaaaagccaaaatcagaatgtcacaggtagactaatggttggcctacgttggtggaatcacattgatgaagatggaaagagccattgggtgtttgaatctagaaaggagtcctctcaagagaataaaactgtgtcagaggctgaatcaagaatcttttggttgggacttattgcctgtccagtactgtgggtgatatttgcttttagtgcactcttctccttcagagtaaagtggttggcggtggttatcatgggtgtggtgctacaaggtgccaacctgtatggttacatcaggtgtaaggtgcgcagcagaaagcatttaaccagcatggctacttcatattttggaaagcagtttttaagacaaaacactggagatgatcagacttcctgaatagagaaagcttatgtgctttgttacattggggaacaactgaagagattcttgactcaaccttttagagcttagtccatgttgcaacgaggag

SEQ ID NO: 192714 - DNA, 1080 bp, Homo sapiens
  Payload ID: 18043
  Gene Name: trans-golgi network vesicle protein 23 homolog B (S. cerevisiae)
  ENST ID: ENST00000574226
  CDS Start-End: 140-751
aaagcggaagtgaggccggactgaggctcttacagtggtccctgctggcccttggtgacgggtcgcctcagttccgacccggacccgtacgctgctgcgctgacgtggctcccggaagtagggctggcgtagggccgccatgttgcagcaggatagtaatgatgacactgaagatgtttcactgtttgatgcggaagaggagacgactaatagaccaagaaaagccaaaatcagacatccagtagcatcgtttttccacttattctttcgagtcagtgcaatcatcgtctatcttctctgtgggttgctcagcagcagctttattacctgtatggtgacaattatcttgttgttgtcgtgtgacttttgggcagtgaagaatgtcacaggtagactaatggttggcctacgttggtggaatcacattgatgaagatggaaagagccattgggtgtttgaatctagaaaggagtcctctcaagagaataaaactgtgtcagaggctgaatcaagaatcttttggttgggacttattgcctgtccagtactgtgggtgatatttgcttttagtgcactcttctccttcagagtaaagtggttggcggtggttatcatgggtgtggtgctacaaggtgccaacctgtatggttacatcaggtgtaaggtgcgcagcagaaagcatttaaccagcatggctacttcatattttggaaagcagtttttaagacaagtaagtgttttctggatgtgatcagtgactaatgcaattatttctaactttcatagtttaatttttatgaaacgctcctgaacagaagttttaaaggcatatagttgtataaatataatgataaagatgttgtaattgctctttgggggtgttcaagacagtctggaagtgtattgtcagtatcctaaaattattttaaagccaggaaggataaactatcattgataataacttattttttaaaaattacttttaagttcagttgtttttcatcaattatgggagctttaagtgaatgcccttgcagaatgtatgttgtatgttttttttttttttttttgagacagagt

SEQ ID NO: 192715 - DNA, 2989 bp, Homo sapiens
  Payload ID: 18043
  Gene Name: trans-golgi network vesicle protein 23 homolog B (S. cerevisiae)
  ENST ID: ENST00000476139
  CDS Start-End: 1417-1842
ctgagggctcgctgggagggtggcggctcctgggactggctctgcaggttccgtgggactggagcccgcgtcccccgcgcccgctactcgaactcgaggaggagcggggcggccgggagtggagggctgtgggtagttgtctgaggagggctgctgggggttctgaggccgctgggggcggcgtgacccgtgcggcgcagagcaagtacttcttgcggctgtggggacgcccattgttaaccagcgcgagtgggggtctctctttcctcaacccttattgccggggtggagttgaggaggagcggcctgcgggcctcttagcttcctgacacccaggggtgcgatgctattttgtaggaatcggcgacaccgccagagcctcgctttcaaattgctgtttccaaactaatgttgttggtgattctctcctttgtgctcttagagttaattgtagtccacatgttggcaaccagagactcgtaagattaataatatttttagaaaaaactactgtttatggtcacttagattgtcttaagtgtttttttctttcggttcacacaaaatttgttgagggattactatgactcagacacggttgtaggcccagggatagggttgtgaccagtacagacaggtttcttgccccgtatttttgggttagggaagtgggttctaggagatgggggttgggtggggagacacgataaattgtataaccaaagatattttcagataattgcaaaggcagggtgatgaaataacaagtgtctgaggataggacaactaagatttatggtcaggaaagactgcttatgaggagatgccttgagtggagaaaatctaataatggttaaattcagctgtattacaggaaaggtgtcccgatccagacccgaaaagagggtccttggccgggcgtggtgactcaggcctgtaatcccagcactttgggaggacgaggtgggtggatcatgaggtcaagagatcgagaccatcctggccaacttggtgaaaccctgtctctactaaaaatacaaaaattagttgggcgtgatggtgcacgcctgtagtcccagctactcgggaggctgaggcaggagaatcgcttgaactggggaggctgaggttgcagtgagccgcgggccactgcactccatccagcctggctacagagggagactccgtctcaaacaaaacaaaaaaagtcttggatcaggcaagaaggaattcagggatagtaatgatgacactgaagatgtttcactgtttgatgcggaagaggagacgactaatagaccaagaaaagccaaaatcagacatccagtagcatcgtttttccacttattctttcgagtcagtgcaatcatcgtctatcttctctgtgggttgctcagcagcagctttattacctgtatggtgacaattatcttgttgttgtcgtgtgacttttgggcagtgaagaatgtcacaggtagactaatggttggcctacgttggtggaatcacattgatgaagatggaaagagccattgggtgtttgaatctagaaaggagtcctctcaagagaataaaactgtgtcagaggctgaatcaagaatcttttggttgggacttattgcctgtccagtactgtgggtgatatttgcttttagtgcactcttctccttcagagtaaagtggttggcggtggttatcatgggtgtggtgctacaaggtgccaacctgtatggttacatcaggtgtaaggtgcgcagcagaaagcatttaaccagcatggctacttcatattttggaaagcagtttttaagacaaaacactggagatgatcagacttcctgaatagagaaagcttatgtgctttgttacattggggaacaactgaagagattcttgactcaaccttttagagcttagtccatgttgcaacgaggagtgttggctttgtttttccacttaaaaactttatttataaaaaggaaaagtagttttcatattaagtttttatttcctttccagcagttggggctagaaagtatgtgttggcactagaaacattgtcaagatttgttctgtggtgtaggtatgcacattccataggtatgcacacggccatgtaatatcagtatatcccaagttaatgaaagtgttcatttacataggtaatggagacctttgcattttgatccatagaacataggaggatgttcttagtctgtctcaaagctctatatgtttacatattatttctgtagattgttttcaggagaaagttttgcttctatggtaagagtgagcactttggcttatgtataagttagaaataattgttagtttttaatatgcacttcgtggggaaatttcttagacgtatgcaagcaagtgaaaacaattagggccagtggtattaactactttataaaattttatttttgtttgtaagaagtcatctatttaaggcccagttaatataagtggaatcatcatagtttaaggaatacccagagattgctgctgttctatttattttacagaaaggatagctagattgaaagctcttcagtggaccttgagctaatagatcttttaccactaaaagagcattattctcatgtcataatgagaataataatttacatacttggcataataaatgcctaaaagacattttattttctgaatctatttttttcttgctataatggggatattgtaaattatgcatttgtattaatggtatttcttaaagcaatctatgtaactgtaaattaaaccaatctacaaactattgtaggcatctgtaaattctgttgtaggtattataaactttgttgaagtcttaatcagcagattatgttgtgaatatatttgtacattgttaaaatagtttttaagattatttgtttaattgaataagtgtcttattggagtgatagctttgaaggtgcaaaactttatatttgtataaaattctactatttacaaggca

SEQ ID NO: 192716 - DNA, 1258 bp, Homo sapiens
  Payload ID: 18043
  Gene Name: trans-golgi network vesicle protein 23 homolog B (S. cerevisiae)
  ENST ID: ENST00000581733
  CDS Start-End: 198-623
gacttgggagagaacaggatagtaatgatgacactgaagatgtttcactgtttgatgcggaagaggagacgactaatagaccaagaaaagccaaaatcagacatccagtagcatcgtttttccacttattctttcgagtcagtgcaatcatcgtctatcttctctgtgggttgctcagcagcagctttattacctgtatggtgacaattatcttgttgttgtcgtgtgacttttgggcagtgaagaatgtcacaggtagactaatggttggcctacgttggtggaatcacattgatgaagatggaaagagccattgggtgtttgaatctagaaaggagtcctctcaagagaataaaactgtgtcagaggctgaatcaagaatcttttggttgggacttattgcctgtccagtactgtgggtgatatttgcttttagtgcactcttctccttcagagtaaagtggttggcggtggttatcatgggtgtggtgctacaaggtgccaacctgtatggttacatcaggtgtaaggtgcgcagcagaaagcatttaaccagcatggctacttcatattttggaaagcagtttttaagacaaaacactggagatgatcagacttcctgaatagagaaagcttatgtgctttgttacattggggaacaactgaagagattcttgactcaaccttttagagcttagtccatgttgcaacgaggagtgttggctttgtttttccacttaaaaactttatttataaaaaggaaaagtagttttcatattaagtttttatttcctttccagcagttggggctagaaagtatgtgttggcactagaaacattgtcaagatttgttctgtggtgtaggtatgcacattccataggtatgcacacggccatgtaatatcagtatatcccaagttaatgaaagtgttcatttacataggtaatggagacctttgcattttgatccatagaacataggaggatgttcttagtctgtctcaaagctctatatgtttacatattatttctgtagattgttttcaggagaaagttttgcttctatggtaagagtgagcactttggcttatgtataagttagaaataattgttagtttttaatatgcacttcgtggggaaatttcttagacgtatgcaagcaagtgaaaacaattagggccagtggtattaactactttataaaattttatttttgtttgtaagaagtcatctatttaaggcccagttaatataagtg

SEQ ID NO: 192717 - DNA, 697 bp, Homo sapiens
  Payload ID: 18043
  Gene Name: trans-golgi network vesicle protein 23 homolog B (S. cerevisiae)
  ENST ID: ENST00000575261
  CDS Start-End: 302-697
gctcttacagtggtccctgctggcccttggtgacgggtcgcctcagttccgacccggacccgtacgctgctgcgctgacgtggctcccggaagtagggctggcgtagggccgccatgttgcagcagtaatgatgacactgaagatgtttcactgtttgatgcggaagaggagacgactaatagaccaagaaaagccaaaatcagacatccagtagcatcgtttttccacttattctttcgagtcagtgcaatcatcgtctatcttctctgtgggttgctcagcagcagctttattacctgtatggtgacaattatcttgttgttgtcgtgtgacttttgggcagtgaagaatgtcacaggtagactaatggttggcctacgttggtggaatcacattgatgaagatggaaagagccattgggtgtttgaatctagaaaggagtcctctcaagagaataaaactgtgtcagaggctgaatcaagaatcttttggttgggacttattgcctgtccagtactgtgggtgatatttgcttttagtgcactcttctccttcagagtaaagtggttggcggtggttatcatgggtgtggtgctacaaggtgccaacctgtatggttacatcaggtgtaaggtgcgcagcagaaagcatttaaccagcatggctacttcatattttggaaagcagtttttaaga

SEQ ID NO: 192718 - DNA, 1527 bp, Homo sapiens
  Payload ID: 18044
  Gene Name: trans-golgi network vesicle protein 23 homolog C (S. cerevisiae)
  Uniprot ID: Q96ET8
  ENST ID: ENST00000225576
  CDS Start-End: 97-927
gctggcccttggtgacgggtcgcgtcagttccgacccggacccgtacgctgctgcgctgacgtggctcctggaagcagggctggcgtagggccgccatgttgcagcaggatagtaatgatgacactgaagatgtttcactgtttgatgcggaagaggagacgactaatagaccaagaaaagccaaaatcagacatccagtagcatcgtttttccacttattctttcgagtcagtgcaatcatcgtctgtcttctctgtgagttgctcagcagcagctttattacctgtatggttacaattatcttgttgttgtcgtgtgacttttgggcagtgaagaatgtcacaggtagactaatggttggcctacgttggtggaatcacattgatgaagatggaaagagccattgggtgtttgaatctagaaaggagtcctctcaagagaataaaactgtgtcagaggctgaatcaagaatcttttggttgggacttattgcctgttcagtactgtgggtgatatttgcctttagtgcactcttctccttcacagtaaagtggctgagacggtctcgccacattgcccagactggtctgaaagtcttgggctcaagagatcctcccgcttccgccttccaaagcgctgggataacaggcgtgagccgctgcccgggccatccctcgaggaagtttcatcaggtagacattaattctttcacgaggatcacggatcgagctctttactggaaacctgcgccccgccttagttctccacctcttcgtgcggctccaggcaactgccaacagatggcgcccgcccgcctatttctctccttgcggctttgggcctggaggggaggtggggagagtcccaatagcagaggaactggtgagcccgggccaaaatttcatctggcatccggaatgcattaaaaacaacccacaaatctgaagctcctcgcaggagagagagagagagagagagaggagagagaggagagaggagagagggagggaagagagtgacggagaaggagagaaagagacgggagagaggagagagaaagagagagagaggagagagagaaagaacgaacgaacagggaacttgtaaaactaaggggaaaagggcagaagagaggcagcagcgtggtccctgcaagcgtccgctttcctggccaagcagcccccagcacgcctgctttgtggggcagggccatgcggccccgaggaaggatgcggtgagccagagggttccagacaaaggaggggatccccaaggctctgggccagccagtccctgttttactggcaccacggtccctcctaggcgaggacgaagagggaaggggtggagacctccaccttctctgcgtgtggctgcgtccctttacagaatgacaggcccttacttccgagggcggggactaatgtgtaaggcttaacagatccaattccagaaattatctgtgtttttttcaatcaccctcttgtgcccccccaccccccattaaatttcatcttttatctttt

SEQ ID NO: 192719 - DNA, 1911 bp, Homo sapiens
  Payload ID: 18044
  Gene Name: trans-golgi network vesicle protein 23 homolog C (S. cerevisiae)
  ENST ID: ENST00000428082
  CDS Start-End: 148-765
gctccctcaaagcggaggtgaggccggactgaggctcttacagtggtccctgctggcccttggtgacgggtcgcgtcagttccgacccggacccgtacgctgctgcgctgacgtggctcctggaagcagggctggcgtagggccgccatgttgcagcaggatagtaatgatgacactgaagatgtttcactgtttgatgcggaagaggagacgactaatagaccaagaaaagccaaaatcagacatccagtagcatcgtttttccacttattctttcgagtcagtgcaatcatcgtctgtcttctctgtgagttgctcagcagcagctttattacctgtatggttacaattatcttgttgttgtcgtgtgacttttgggcagtgaagaatgtcacaggtagactaatggttggcctacgttggtggaatcacattgatgaagatggaaagagccattgggtgtttgaatctagaaaggagtcctctcaagagaataaaactgtgtcagaggctgaatcaagaatcttttggttgggacttattgcctgttcagtactgtgggtgatatttgcctttagtgcactcttctccttcacagtaaagtggctggcggtggttattatgggtgtggtgctacaaggtgccaacctgtatggttacatcaggtgtaaggtgcgcagcagaaagcatttaaccagcatggctacttcatattttggaaagcagtttttaagacaaaacactggagatgatcagacttcctgaatagagaaagcttatgtgctttgttacattggggaacaactgaagagattcttgactcaaccttttagagcttagtccatgttgcaacgaggagtgttggctttgtttttccacttaaaaactttatttataaaaaggaaaagtagttttcatattaagtttttatttcctttccagcagttggggctagaaagtatatgttggcactagaaacattgttaagatttgttctgtggtgtaggtatgcacattccataggtatgcacacggccatgtaatacctgtatatcccaagttaatgaaagtgttcatttacacagataatggagacctttgcattttgatccatagaacataggaggatgttcttagtctgtctcaaagctctatatgtttacatattatttctgtagattgttttcaggagaaagttttgcttctatggtaagagtgagcactttggcttatgtataagttagaaataattgttagtttttaatatgtacttcatggggaaatttcttagacgtatgcaagcaagtgaaaacaattagggccagtggtattaactactttataaaattttatttttgtttgtaagaagttatctacttaaggcccagttaatataagtggaatcatcatagtttaaggaatacccagagattgctgctattctatttattttacagaaaggatagctagattgaaagttcttcagtggaccttgagctaatagatcttttaccactaaaagagcattattctcatgtcataatgagaataataatttacatacttggcataataaatgcctaaaagacattttattttctgaatctatttttttcttgctataatggggatattgtaaattatgcatttgtattaatggtatttcttaaagcaatctatgtaactgtaaattaaaccaatctacaaactattgtaggcatctgtaaattctgttgtaggtattataaactttgttgaagtcttaatcagcagattatgttgtgaatatatttgtacattgttaaaatagtttttaagattatttgtttaattgaataagtgtcttattggagtgatagctttgaaggtgcaaaactttatatttgtataaaattctactatttacaaggc

SEQ ID NO: 192720 - DNA, 537 bp, Homo sapiens
  Payload ID: 18044
  Gene Name: trans-golgi network vesicle protein 23 homolog C (S. cerevisiae)
  ENST ID: ENST00000419890
  CDS Start-End: 208-537
agggctggcgtagggccgccatgttgcagcagtaatgatgacactgaagatgtttcactgtttgatgcggaagaggagacgactaatagaccaagaaaagccaaaatcagacatccagtagcatcgtttttccacttattctttcgagtcagtgcaatcatcgtctgtcttctctgtgagttgctcagcagcagctttattacctgtatggttacaattatcttgttgttgtcgtgtgacttttgggcagtgaagaatgtcacaggtagactaatggttggcctacgttggtggaatcacattgatgaagatggaaagagccattgggtgtttgaatctagaaaggagtcctctcaagagaataaaactgtgtcagaggctgaatcaagaatcttttggttgggacttattgcctgttcagtactgtgggtgatatttgcctttagtgcactcttctccttcacagtaaagtggctggcggtggttattatgggtgtggtgctacaaggtgccaacctgtatggttacatcaggtgt

SEQ ID NO: 192721 - DNA, 1852 bp, Homo sapiens
  Payload ID: 18044
  Gene Name: trans-golgi network vesicle protein 23 homolog C (S. cerevisiae)
  ENST ID: ENST00000438826
  CDS Start-End: 89-706
ttggtgacgggtcgcgtcagttccgacccggacccgtacgctgctgcgctgacgtggctcctggaagcagggctggcgtagggccgccatgttgcagcaggatagtaatgatgacactgaagatgtttcactgtttgatgcggaagaggagacgactaatagaccaagaaaagccaaaatcagacatccagtagcatcgtttttccacttattctttcgagtcagtgcaatcatcgtctgtcttctctgtgagttgctcagcagcagctttattacctgtatggttacaattatcttgttgttgtcgtgtgacttttgggcagtgaagaatgtcacaggtagactaatggttggcctacgttggtggaatcacattgatgaagatggaaagagccattgggtgtttgaatctagaaaggagtcctctcaagagaataaaactgtgtcagaggctgaatcaagaatcttttggttgggacttattgcctgttcagtactgtgggtgatatttgcctttagtgcactcttctccttcacagtaaagtggctggcggtggttattatgggtgtggtgctacaaggtgccaacctgtatggttacatcaggtgtaaggtgcgcagcagaaagcatttaaccagcatggctacttcatattttggaaagcagtttttaagacaaaacactggagatgatcagacttcctgaatagagaaagcttatgtgctttgttacattggggaacaactgaagagattcttgactcaaccttttagagcttagtccatgttgcaacgaggagtgttggctttgtttttccacttaaaaactttatttataaaaaggaaaagtagttttcatattaagtttttatttcctttccagcagttggggctagaaagtatatgttggcactagaaacattgttaagatttgttctgtggtgtaggtatgcacattccataggtatgcacacggccatgtaatacctgtatatcccaagttaatgaaagtgttcatttacacagataatggagacctttgcattttgatccatagaacataggaggatgttcttagtctgtctcaaagctctatatgtttacatattatttctgtagattgttttcaggagaaagttttgcttctatggtaagagtgagcactttggcttatgtataagttagaaataattgttagtttttaatatgtacttcatggggaaatttcttagacgtatgcaagcaagtgaaaacaattagggccagtggtattaactactttataaaattttatttttgtttgtaagaagttatctacttaaggcccagttaatataagtggaatcatcatagtttaaggaatacccagagattgctgctattctatttattttacagaaaggatagctagattgaaagttcttcagtggaccttgagctaatagatcttttaccactaaaagagcattattctcatgtcataatgagaataataatttacatacttggcataataaatgcctaaaagacattttattttctgaatctatttttttcttgctataatggggatattgtaaattatgcatttgtattaatggtatttcttaaagcaatctatgtaactgtaaattaaaccaatctacaaactattgtaggcatctgtaaattctgttgtaggtattataaactttgttgaagtcttaatcagcagattatgttgtgaatatatttgtacattgttaaaatagtttttaagattatttgtttaattgaataagtgtcttattggagtgatagctttgaaggtgcaaaactttatatttgtataaaattctactatttacaaggc

SEQ ID NO: 192722 - DNA, 591 bp, Homo sapiens
  Payload ID: 18044
  Gene Name: trans-golgi network vesicle protein 23 homolog C (S. cerevisiae)
  ENST ID: ENST00000521179
  CDS Start-End: 25-138
aagcagggctggcgtagggccgccatgttgcagcaggatagtaatgatgacactgaagatgtttcactgtttgatgcggaagaggagacgactaatagaccaagaaaagccaaaatcagaatgtcacaggtagactaatggttggcctacgttggtggaatcacattgatgaagatggaaagagccattgggtgtttgaatctagaaaggagtcctctcaagagaataaaactgtgtcagaggctgaatcaagaatcttttggttgggacttattgcctgttcagtactgtgggtgatatttgcctttagtgcactcttctccttcacagtaaagtggctggcggtggttattatgggtgtggtgctacaaggtgccaacctgtatggttacatcaggtgtaaggtgcgcagcagaaagcatttaaccagcatggctacttcatattttggaaagcagtttttaagacaaaacactggagatgatcagacttcctgaatagagaaagcttatgtgctttgttacattggggaacaactgaagagattcttgactcaaccttttagagcttagtccatgttgcaacgaggag

SEQ ID NO: 192723 - DNA, 764 bp, Homo sapiens
  Payload ID: 18044
  Gene Name: trans-golgi network vesicle protein 23 homolog C (S. cerevisiae)
  ENST ID: ENST00000523573
  CDS Start-End: 1-162
atgttgcagcaggatagtaatgatgacactgaagatgtttcactgtttgatgcggaagaggagacgactaatagaccaagaaaagccaaaatcagacatccagtagcatcgtttttccacttattctttcgagtcagtgcaatcatcgtctgtcttctctaatgtcacaggtagactaatggttggcctacgttggtggaatcacattgatgaagatggaaagagccattgggtgtttgaatctagaaaggagtcctctcaagagaataaaactgtgtcagaggctgaatcaagaatcttttggttgggacttattgcctgttcagtactgtgggtgatatttgcctttagtgcactcttctccttcacagtaaagtggctggcggtggttattatgggtgtggtgctacaaggtgccaacctgtatggttacatcaggtgtaaggtgcgcagcagaaagcatttaaccagcatggctacttcatattttggaaagcagtttttaagacaaaacactggagatgatcagacttcctgaatagagaaagcttatgtgctttgttacattggggaacaactgaagagattcttgactcaaccttttagagcttagtccatgttgcaacgaggagtgttggctttgtttttccacttaaaaactttatttataaaaaggaaaagtagttttcatattaagtttttatttcctttccagcagttggggctagaaagtatatgttggcactagaaacattgttaagatt

SEQ ID NO: 192724 - DNA, 2989 bp, Homo sapiens
  Payload ID: 18044
  Gene Name: trans-golgi network vesicle protein 23 homolog C (S. cerevisiae)
  ENST ID: ENST00000584811
  CDS Start-End: 1417-1842
ctgagggcgcgctgggagggtggcggctcctgggactggctctgcaggttccgtgggactggagcccgcgtcccccgcgcccgctactcgaactcgaggaggagcggggcggccgggagtggagggctgtgggtagttgtctgaggagggctgctgggggttctgaggccgctgggggaggcgtgacccgtgcggcgcagagcaagtacttcttgcggctgtggggacgcccattgttaaccagcgcgagtgggggtctctctttcctcaacccttattgccggggtggagttgaggaggagcggcctgcgggcctcttagcttcctgacacccaggggtgcgatgctatcttgtaggaatcggcgacaccgccagagcctcgctttcaaattgctgtttccaaactaatgttgttggtgattctctcctttgtgctcttagagttaattgtagtccacatgttggcaaccagagactcgtaagattaataatatttttagaaaaaactactgtttatggtcacttagattgtcttaagtgtttttttctttcggttcacacaaaatttgttgagggattactatgactcagacacggttgtaggcccagggatagggttgtgaccagtacagacaggtttcttgccccgtattttcgggttagggaagtgggttctaggagatgggggttgggtggggagacacgataaattgtataaccaaagatattttcagataattgcaaaggcagggtgatgaaataacaagtgtccgaggataggacaactaagatttatggtcaggaaagactgcttatgaggagatgccttgagtggagaaaatctaataatggttaaattcagctgtattacaggaaaggtgtcccgatccagacccgaaaagagggtccttggccgggcgtggtgactcaggcctgtaatcccagcactttgggaggacgaggtgggtggatcatgaggtcaagagatcgagaccatcctggccaacttggtgaaaccctgtctctactaaaaatacaaaaattagttgggcgtgatgatgcacgcctgtagtcccagctactcgggaggctgaggcaggagaatcgcttgaactggggaggccgaggttgcagtgagccgcgggccactgcactccatccagcctggctacagagggagactccgtctcaaacaaaacaaaaaaagtcttggatcaggcaagaaggaattcagggatagtaatgatgacactgaagatgtttcactgtttgatgcggaagaggagacgactaatagaccaagaaaagccaaaatcagacatccagtagcatcgtttttccacttattctttcgagtcagtgcaatcatcgtctgtcttctctgtgagttgctcagcagcagctttattacctgtatggttacaattatcttgttgttgtcgtgtgacttttgggcagtgaagaatgtcacaggtagactaatggttggcctacgttggtggaatcacattgatgaagatggaaagagccattgggtgtttgaatctagaaaggagtcctctcaagagaataaaactgtgtcagaggctgaatcaagaatcttttggttgggacttattgcctgttcagtactgtgggtgatatttgcctttagtgcactcttctccttcacagtaaagtggctggcggtggttattatgggtgtggtgctacaaggtgccaacctgtatggttacatcaggtgtaaggtgcgcagcagaaagcatttaaccagcatggctacttcatattttggaaagcagtttttaagacaaaacactggagatgatcagacttcctgaatagagaaagcttatgtgctttgttacattggggaacaactgaagagattcttgactcaaccttttagagcttagtccatgttgcaacgaggagtgttggctttgtttttccacttaaaaactttatttataaaaaggaaaagtagttttcatattaagtttttatttcctttccagcagttggggctagaaagtatatgttggcactagaaacattgttaagatttgttctgtggtgtaggtatgcacattccataggtatgcacacggccatgtaatacctgtatatcccaagttaatgaaagtgttcatttacacagataatggagacctttgcattttgatccatagaacataggaggatgttcttagtctgtctcaaagctctatatgtttacatattatttctgtagattgttttcaggagaaagttttgcttctatggtaagagtgagcactttggcttatgtataagttagaaataattgttagtttttaatatgtacttcatggggaaatttcttagacgtatgcaagcaagtgaaaacaattagggccagtggtattaactactttataaaattttatttttgtttgtaagaagttatctacttaaggcccagttaatataagtggaatcatcatagtttaaggaatacccagagattgctgctattctatttattttacagaaaggatagctagattgaaagttcttcagtggaccttgagctaatagatcttttaccactaaaagagcattattctcatgtcataatgagaataataatttacatacttggcataataaatgcctaaaagacattttattttctgaatctatttttttcttgctataatggggatattgtaaattatgcatttgtattaatggtatttcttaaagcaatctatgtaactgtaaattaaaccaatctacaaactattgtaggcatctgtaaattctgttgtaggtattataaactttgttgaagtcttaatcagcagattatgttgtgaatatatttgtacattgttaaaatagtttttaagattatttgtttaattgaataagtgtcttattggagtgatagctttgaaggtgcaaaactttatatttgtataaaattctactatttacaaggca

SEQ ID NO: 192725 - DNA, 1080 bp, Homo sapiens
  Payload ID: 18044
  Gene Name: trans-golgi network vesicle protein 23 homolog C (S. cerevisiae)
  Uniprot ID: Q96ET8
  ENST ID: ENST00000518321
  CDS Start-End: 140-751
aaagcggaggtgaggccggactgaggctcttacagtggtccctgctggcccttggtgacgggtcgcgtcagttccgacccggacccgtacgctgctgcgctgacgtggctcctggaagcagggctggcgtagggccgccatgttgcagcaggatagtaatgatgacactgaagatgtttcactgtttgatgcggaagaggagacgactaatagaccaagaaaagccaaaatcagacatccagtagcatcgtttttccacttattctttcgagtcagtgcaatcatcgtctgtcttctctgtgagttgctcagcagcagctttattacctgtatggttacaattatcttgttgttgtcgtgtgacttttgggcagtgaagaatgtcacaggtagactaatggttggcctacgttggtggaatcacattgatgaagatggaaagagccattgggtgtttgaatctagaaaggagtcctctcaagagaataaaactgtgtcagaggctgaatcaagaatcttttggttgggacttattgcctgttcagtactgtgggtgatatttgcctttagtgcactcttctccttcacagtaaagtggctggcggtggttattatgggtgtggtgctacaaggtgccaacctgtatggttacatcaggtgtaaggtgcgcagcagaaagcatttaaccagcatggctacttcatattttggaaagcagtttttaagacaagtaagtgttttctggatgtgatcagtgactaatgcaattatttctaactttcatagtttaatttttatgaaacgctcctgaacagaagttttaaaggcatatagttgtataaatataatgataaagatgttgtaattgctctttgggggtgttcaagacagtctggaagtgtattgtcagtatcctaaaattattttaaagccaggaaggataaactatcattgataataacttattttttaaaaattacttttaagttcagttgtttttcatcaattatgggagctttaagtgaatgcccttgcagaatgtatgttgtatgtttttatttttattttttgagacagagt

SEQ ID NO: 192726 - DNA, 488 bp, Homo sapiens
  Payload ID: 18044
  Gene Name: trans-golgi network vesicle protein 23 homolog C (S. cerevisiae)
  ENST ID: ENST00000581273
  CDS Start-End: 1-183
gagtcctctcaagagaataaaactgtgtcagaggctgaatcaagaatcttttggttgggacttattgcctgttcagtactgtgggtgatatttgcctttagtgcactcttctccttcacagtaaagtggctggtgactgtatttggagacaggacctttaaagacatgattaagataaaatgaggtcatatgggtaggccttaattcagtctgactggtgttccataagaagaggatattaggacacagacacacagaggaaggaccgtgtgaagacgaagggggaagatgccgtccacaagccaaggagagaggccttagaggaaaccagccctgctgacaccttgatcttgggcttccagtctccagaacttgcttagagcatgaaagttttctgccgtctttggaatcttgtttgcaaacagctcaaaggagatgcggcccaagggctccccgttgatggcgatgttgaagaacatggtggggtt

SEQ ID NO: 192727 - DNA, 5223 bp, Homo sapiens
  Payload ID: 18045
  Gene Name: transient receptor potential cation channel, subfamily A, member 1
  Uniprot ID: O75762
  ENST ID: ENST00000262209
  CDS Start-End: 209-3568
actacaaaagtagcgcgggcctgagaactccttccagaagttctccagggcttccgcagagcgactttttcgctgcctgtgagctgcagcgcgggagagctcgggctcgcgcggaccccagcgcctggcaggctgacagcgctctctcgccccaggtgcccgcgcgcgtggtgagcagctgcaccaggtggcgtccggggtggggtcaatgaagcgcagcctgaggaagatgtggcgccctggagaaaagaaggagccccagggcgttgtctatgaggatgtgccggacgacacggaggatttcaaggaatcgcttaaggtggtttttgaaggaagtgcatatggattacaaaactttaataagcaaaagaaattaaaaagatgtgacgatatggacaccttcttcttgcattatgctgcagcagaaggccaaattgagctaatggagaagatcaccagagattcctctttggaagtgctgcatgaaatggatgattatggaaatacccctctgcattgtgctgtagaaaaaaaccaaattgaaagcgttaagtttcttctcagcagaggagcaaacccaaatctccgaaacttcaacatgatggctcctctccacatagctgtgcagggcatgaataatgaggtgatgaaggtcttgcttgagcatagaactattgatgttaatttggaaggagaaaatggaaacacagctgtgatcattgcgtgcaccacaaataatagcgaagcattgcagattttgcttaaaaaaggagctaagccatgtaaatcaaataaatggggatgtttccctattcaccaagctgcattttcaggttccaaagaatgcatggaaataatactaaggtttggtgaagagcatgggtacagtagacagttgcacattaactttatgaataatgggaaagccacccctctccacctggctgtgcaaaatggtgacttggaaatgatcaaaatgtgcctggacaatggtgcacaaatagacccagtggagaagggaaggtgcacagccattcattttgctgccacccagggagccactgagattgttaaactgatgatatcgtcctattctggtagcgtggatattgttaacacaaccgatggatgtcatgagaccatgcttcacagagcttcattgtttgatcaccatgagctagcagactatttaatttcagtgggagcagatattaataagatcgattctgaaggacgctctccacttatattagcaactgcttctgcatcttggaatattgtaaatttgctactctctaaaggtgcccaagtagacataaaagataattttggacgtaattttctgcatttaactgtacagcaaccttatggattaaaaaatctgcgacctgaatttatgcagatgcaacagatcaaagagctggtaatggatgaagacaacgatgggtgtactcctctacattatgcatgtagacaggggggccctggttctgtaaataacctacttggctttaatgtgtccattcattccaaaagcaaagataagaaatcacctctgcattttgcagccagttatgggcgtatcaatacctgtcagaggctcctacaagacataagtgatacgaggcttctgaatgaaggtgaccttcatggaatgactcctctccatctggcagcaaagaatggacatgataaagtagttcagcttcttctgaaaaaaggtgcattgtttctcagtgaccacaatggctggacagctttgcatcatgcgtccatgggcgggtacactcagaccatgaaggtcattcttgatactaatttgaagtgcacagatcgcctggatgaagacgggaacactgcacttcactttgctgcaagggaaggccacgccaaagccgttgcgcttcttctgagccacaatgctgacatagtcctgaacaagcagcaggcctcctttttgcaccttgcacttcacaataagaggaaggaggttgttcttacgatcatcaggagcaaaagatgggatgaatgtcttaagattttcagtcataattctccaggcaataaatgtccaattacagaaatgatagaatacctccctgaatgcatgaaggtacttttagatttctgcatgttgcattccacagaagacaagtcctgccgagactattatatcgagtataatttcaaatatcttcaatgtccattagaattcaccaaaaaaacacctacacaggatgttatatatgaaccgcttacagccctcaacgcaatggtacaaaataaccgcatagagcttctcaatcatcctgtgtgtaaagaatatttactcatgaaatggttggcttatggatttagagctcatatgatgaatttaggatcttactgtcttggtctcatacctatgaccattctcgttgtcaatataaaaccaggaatggctttcaactcaactggcatcatcaatgaaactagtgatcattcagaaatactagataccacgaattcatatctaataaaaacttgtatgattttagtgtttttatcaagtatatttgggtattgcaaagaagcggggcaaattttccaacagaaaaggaattattttatggatataagcaatgttcttgaatggattatctacacgacgggcatcatttttgtgctgcccttgtttgttgaaataccagctcatctgcagtggcaatgtggagcaattgctgtttacttctattggatgaatttcttattgtatcttcaaagatttgaaaattgtggaatttttattgttatgttggaggtaattttgaaaactttgttgaggtctacagttgtatttatcttccttcttctggcttttggactcagcttttacatcctcctgaatttacaggatcccttcagctctccattgctttctataatccagaccttcagcatgatgctaggagatatcaattatcgagagtccttcctagaaccatatctgagaaatgaattggcacatccagttctgtcctttgcacaacttgtttccttcacaatatttgtcccaattgtcctcatgaatttacttattggtttggcagttggcgacattgctgaggtccagaaacatgcatcattgaagaggatagctatgcaggtggaacttcataccagcttagagaagaagctgccactttggtttctacgcaaagtggatcagaaatccaccatcgtgtatcccaacaaacccagatctggtgggatgttattccatatattctgttttttattttgcactggggaaataagacaagaaataccaaatgctgataaatctttagaaatggaaatattaaagcagaaataccggctgaaggatcttacttttctcctggaaaaacagcatgagctcattaaactgatcattcagaagatggagatcatctctgagacagaggatgatgatagccattgttcttttcaagacaggtttaagaaagagcagatggaacaaaggaatagcagatggaatactgtgttgagagcagtcaaggcaaaaacacaccatcttgagccttagctcctcagaccttcagtgaggcttctaatggggggtgcatgacttgctggttctaactttcaatttaaaaagagtgaggaagaagcagaatgattcattttgctgcgtgtgaaatcatggttcctgcatgctgtataaaagtaaaccatcttttatcctctattcatattttctaccaatcactatgtattggggatatctttgcagatatgttcaaattggactggactttgatgagatataatctcattatttgaatgggtagaaaatgaatttgctagaacacacatttttaatgaaaagaagtaataaatgtaactattaagctaaaatgcaaatgtcagtactgaattcctgcttgttaattacataatatgtgatgctctagaaaatagtcacaagtattaataatgccttagatgatagtcttaaatattaggttgaggtctacctaacctaagctgcttcctggaaagcttcatgttgaaagaacctatgggtggcaccatgtggacttttctgtccctactgtgatgaatagccccacccttcttgctgtccccaacacacctgatgtcactttgagccatatagttgaagtacaaattaataggccttatgatatgcacgaattttactatagataatatatgttgtttctggttttgtttgccaatgagcataataaatgtaaaacctatatagtatccctgtgattattgtatgagcctttgtttgagatttgaaaacaacatggctccatcacatattcccttttttcttttgatgtctactcaaatcatgaattaatcacatacctcatcattaatcttttcaaggtccttctattgttttgtctgattttctccatcatcctgattagcatgtttattccctcactacccccaggagatattcactgtaatgaatatgtctttggctatgtatgtgtccttgtgttatgttgtacagtgttgttttgagtctgttattatttacacagatgttattatgctatagcttctatttctgtttttgcttcttatttctcttataattctcacttatttcctattttttctactcatttctatttgttactcctttttactggacatgatgtttacaagatacaactgtgttactgtattccatctagtacggggcctttggtgtggcttactatttcattgtgtgcacccacccacccaccacactggacttttctagagatggacagcttggttacctccaccttcctgcactcattctcaaacatactgatgttcatacaaaccagcagagtgctgagggacgatatgtactattacaaaaccagacacttttacattcatggtccaacagatcacatggcctagaggcaatgttgcatataccttaatctttgatatgaataatatctttgttctttatatttcttaaaacagaaagggtggaaaatcactatacagaagcaatatccaaagatctcctgatcataaagacaaggggtcttttcagtcttccctctcctcaaaccttgtgtagcattgcacaatatagatctcagtcaacattcactgagtgccaagaatgtgagaaacactgtaccatgcctgtcatgcgaaatatttaaataaacagattgtcttaca

SEQ ID NO: 192728 - DNA, 2812 bp, Homo sapiens
  Payload ID: 18045
  Gene Name: transient receptor potential cation channel, subfamily A, member 1
  ENST ID: ENST00000523582
  CDS Start-End: 1-2751
gtcttgcttgagcatagaactattgatgttaatttggaaggagaaaatggaaacacagctgtgatcattgcgtgcaccacaaataatagcgaagcattgcagattttgcttaaaaaaggagctaagccatgtaaatcaaataaatggggatgtttccctattcaccaagctgcattttcaggttccaaagaatgcatggaaataatactaaggtttggtgaagagcatgggtacagtagacagttgcacattaactttatgaataatgggaaagccacccctctccacctggctgtgcaaaatggtgacttggaaatgatcaaaatgtgcctggacaatggtgcacaaatagacccagtggagaagggaaggtgcacagccattcattttgctgccacccagggagccactgagattgttaaactgatgatatcgtcctattctggtagcgtggatattgttaacacaaccgatggatgtcatgagaccatgcttcacagagcttcattgtttgatcaccatgagctagcagactatttaatttcagtgggagcagatattaataagatcgattctgaaggacgctctccacttatattagcaactgcttctgcatcttggaatattgtaaatttgctactctctaaaggtgcccaagtagacataaaagataattttggacgtaattttctgcatttaactgtacagcaaccttatggattaaaaaatctgcgacctgaatttatgcagatgcaacagatcaaagagctggtaatggatgaagacaacgatgggtgtactcctctacattatgcatgtagacaggggggccctggttctgtaaataacctacttggctttaatgtgtccattcattccaaaagcaaagataagaaatcacctctgcattttgcagccagttatgggcgtatcaatacctgtcagaggctcctacaagacataagtgatacgaggcttctgaatgaaggtgaccttcatggaatgactcctctccatctggcagcaaagaatggacatgataaagtagttcagcttcttctgaaaaaaggtgcattgtttctcagtgaccacaatggctggacagctttgcatcatgcgtccatgggcgggtacactcagaccatgaaggtcattcttgatactaatttgaagtgcacagatcgcctggatgaagacgggaacactgcacttcactttgctgcaagggaaggccacgccaaagccgttgcgcttcttctgagccacaatgctgacatagtcctgaacaagcagcaggcctcctttttgcaccttgcacttcacaataagaggaaggaggttgttcttacgatcatcaggagcaaaagatgggatgaatgtcttaagattttcagtcataattctccaggcaataaatgtccaattacagaaatgatagaatacctccctgaatgcatgaaggtacttttagatttctgcatgttgcattccacagaagacaagtcctgccgagactattatatcgagtataatttcaaatatcttcaatgtccattagaattcaccaaaaaaacacctacacaggatgttatatatgaaccgcttacagccctcaacgcaatggtacaaaataaccgcatagagcttctcaatcatcctgtgtgtaaagaatatttactcatgaaatggttggcttatggatttagagctcatatgatgaatttaggatcttactgtcttggtctcatacctatgaccattctcgttgtcaatataaaaccaggaatggctttcaactcaactggcatcatcaatgaaactagtgatcattcagaaatactagataccacgaattcatatctaataaaaacttgtatgattttagtgtttttatcaagtatatttgggtattgcaaagaagcggggcaaattttccaacagaaaaggaattattttatggatataagcaatgttcttgaatggattatctacacgacgggcatcatttttgtgctgcccttgtttgttgaaataccagctcatctgcagtggcaatgtggagcaattgctgtttacttctattggatgaatttcttattgtatcttcaaagatttgaaaattgtggaatttttattgttatgttggaggtaattttgaaaactttgttgaggtctacagttgtatttatcttccttcttctggcttttggactcagcttttacatcctcctgaatttacaggatcccttcagctctccattgctttctataatccagaccttcagcatgatgctaggagatatcaattatcgagagtccttcctagaaccatatctgagaaatgaattggcacatccagttctgtcctttgcacaacttgtttccttcacaatatttgtcccaattgtcctcatgaatttacttattggtttggcagttggcgacattgctgaggtccagaaacatgcatcattgaagaggatagctatgcaggtggaacttcataccagcttagagaagaagctgccactttggtttctacgcaaagtggatcagaaatccaccatcgtgtatcccaacaaacccagatctggtgggatgttattccatatattctgttttttattttgcactggggaaataagacaagaaataccaaatgctgataaatctttagaaatggaaatattaaagcagaaataccggaagacaacttgtgccttcgtactgactctaattcctgttggttgagtgactctgggcatatgtcctcctctctaaaatgatgatgatagaatatattctttatggt

SEQ ID NO: 192729 - DNA, 4324 bp, Homo sapiens
  Payload ID: 18046
  Gene Name: transient receptor potential cation channel, subfamily C, member 1
  Uniprot ID: P48995
  ENST ID: ENST00000273482
  CDS Start-End: 392-2671
atctctcgtcctcttcctgggctaggccgccccaggcgcggcccctgcgactcctggcacggccccgtgctcggctgccgccctggcgcgcgccacactgtcgtccccggacgggcgcggaccggctcggccggggcgccggcggctggggaggggtcgctggccccggggccgcgcatgcgccgccaccaacttggggctgtcagtggagggcgagtgctggttctcaggggaggcgacgcccttcggggccaacgggcctcgagccgaggcagcagtgggaacgactcatcctttttccagccctggggcgtggctggggtcggggtcggggtcggggccggtgggggccccgcccccgtctcctggcctgcccccttcatgggccgcgatgatggcggccctgtacccgagcacggacctctcgggcgcctcctcctcctccctgccttcctctccatcctcttcctcgccgaacgaggtgatggcgctgaaggatgtgcgggaggtgaaggaggagaatacgctgaatgagaagcttttcttgctggcgtgcgacaagggtgactattatatggttaaaaagattttggaggaaaacagttcaggtgacttgaacataaattgcgtagatgtgcttgggagaaatgctgttaccataactattgaaaacgaaaacttggatatactgcagcttcttttggactacggttgtcagaaactaatggaacgaattcagaatcctgagtattcaacaactatggatgttgcacctgtcattttagctgctcatcgtaacaactatgaaattcttacaatgctcttaaaacaggatgtatctctacccaagccccatgcagttggctgtgaatgcacattgtgttctgcaaaaaacaaaaaggatagcctccggcattccaggtttcgtcttgatatatatcgatgtttggccagtccagctctaataatgttaacagaggaggatccaattctgagagcatttgaacttagtgctgatttaaaagaactaagtcttgtggaggtggaattcaggaatgattatgaggaactagcccggcaatgtaaaatgtttgctaaggatttacttgcacaagcccggaattctcgtgaattggaagttattctaaaccatacgtctagtgacgagcctcttgacaaacggggattattagaagaaagaatgaatttaagtcgtctaaaacttgctatcaaatataaccagaaagagtttgtctcccagtctaactgccagcagttcctgaacactgtttggtttggacagatgtcgggttaccgacgcaagcccacctgtaagaagataatgactgttttgacagtaggcatcttttggccagttttgtcactttgttatttgatagctcccaaatctcagtttggcagaatcattcacacaccttttatgaaatttatcattcatggagcatcatatttcacatttctgctgttgcttaatctatactctcttgtctacaatgaggataagaaaaacacaatggggccagcccttgaaagaatagactatcttcttattctgtggattattgggatgatttggtcagacattaaaagactctggtatgaagggttggaagactttttagaagaatctcgtaatcaactcagttttgtcatgaattctctttatttggcaacctttgccctcaaagtggttgctcacaacaagtttcatgattttgctgatcggaaggattgggatgcattccatcctacactggtggcagaagggctttttgcatttgcaaatgttctaagttatcttcgtctcttttttatgtatacaaccagctctatcttgggtccattacagatttcaatgggacagatgttacaagattttggaaaatttcttgggatgtttcttcttgttttgttttctttcacaattggactgacacaactgtatgataaaggatatacttcaaaggagcagaaggactgtgtaggcatcttctgtgaacagcaaagcaatgataccttccattcgttcattggcacctgctttgctttgttctggtatattttctccttagcgcatgtggcaatctttgtcacaagatttagctatggagaagaactgcagtcctttgtgggagctgtcattgttggtacatacaatgtcgtggttgtgattgtgcttaccaaactgctggtggcaatgcttcataaaagctttcagttgatagcaaatcatgaagacaaagaatggaagtttgctcgagcaaaattatggcttagctactttgatgacaaatgtacgttacctccacctttcaacatcattccctcaccaaagactatctgctatatgattagtagcctcagtaagtggatttgctctcatacatcaaaaggcaaggtcaaacggcaaaacagtttaaaggaatggaggaatttgaaacagaagagagatgaaaactatcaaaaagtgatgtgctgcctagtgcatcgttacttgacttccatgagacagaagatgcaaagtacagatcaggcaactgtggaaaatctaaacgaactgcgccaagatctgtcaaaattccgaaatgaaataagggatttacttggctttcggacttctaaatatgctatgttttatccaagaaattaaccattttctaaatcatggagcgaataattttcaataacagatccaaaagactatattgcataacttgcaatgaaattaatgagatatatattgaaataaagaattatgtaaaagccattctttaaaatatttatagcataaatatatgttatgtaaagtgtgtatatagaattagttttttaaaccttctgttagtggctttttgcagaagcaaaacagattaagtagatagattttgttagcatgctgcttggttttcttacttagtgctttaaaatgtttttttttatgtttaagaggggcagttataaatggacacattgcccagaatgttttgtaaaatgaagaccagcaaatgtaggctgatctccttcacaggatacacttgaaatatagaagttatgttttaaatatctctgttttaggagttcacatatagttcagcatttattgtttaggagtataattttattttatctaaaataatagtctattttttcttttgtattttgttataatcttaagcaacaaagaaaaaaccctaatatttgaatctatttatgtctttcaatttaaattcacttcagtttttgttattgtaatatatttacttttacatggttataatcactttatatttttaatgtttttttcacttaatattttatatatacatttccatgtattgatgtagttagtccacatttaaatttttatagaattatatagtttttgaaaaatacagtcagtagatgttttattttttagctattcagttatgtttataagtttgcatagctacttctcgacatttggtttgttttaatttttttgtatcataatagtcctatttttttttcaagttggagtgaatgtttttagttttaagatagataggagacacttttttatcacatgtagtcacaacctgttttgtttttgtaaaacataggaagtctctttaatgcaatgatttgttttatatttggactaaggttcttgagcttatctcccaaggtactttccataatttaacacagcttctataaaagtgacttcatgcttacttgtggatcattcttgctgcttaagatgaaaagcattggttttttaaaattagagaataaaatatgtatttaaatttttggtgtgttcacataaagggatgtagctaaaatgttttcataggctattatatattctcgcagcatttccagttaagaggatattaggtatataattctcttcttaaccgaatgtcagatggtcttacgccacagggtgcaggtaacccttggtctgtaagcaccaccgatccagggatcattgtctaaataggttactattgtttgtttcatcttgcttttgcatttttattttttaatttccaaattttaagtgttccctctttggggcaaattcttataaaaatgtttattgtaaagttatatattttgtctacgatgggattatgcacttcccaattgggattttacatctggatttttagtcattctaaaaaacacctaattattaaaacatttatagagtgcctactgtatgcatgagttgagttgcttctgaggtacattttgaatgacagcatattgtaagaaaaaaaaaggtgaataaaatttgacattagattataaa

SEQ ID NO: 192730 - DNA, 397 bp, Homo sapiens
  Payload ID: 18046
  Gene Name: transient receptor potential cation channel, subfamily C, member 1
  ENST ID: ENST00000460401
  CDS Start-End: 1-196
ggcggccctgtacccgagcacggacctctcgggcgcctcctcctcctccctgccttcctctccatcctcttcctcgccgaacgaggtgatggcgctgaaggatgtgcgggaggtgaaggaggagaatacgctgaatgagaagcttttcttgctggcgtgcgacaaggaaactaatggaacgaattcagaatcctgagtattcaacaactatggatgttgcacctgtcattttagctgctcatcgtaacaactatgaaattcttacaatgctcttaaaacaggatgtatctctacccaagccccatgcagttggctgtgaatgcacattgtgttctgcaaaaaacaaaaaggatagcctccggcattccaggtttcgtcttgatatatatcgatgttt

SEQ ID NO: 192731 - DNA, 3061 bp, Homo sapiens
  Payload ID: 18046
  Gene Name: transient receptor potential cation channel, subfamily C, member 1
  Uniprot ID: P48995
  ENST ID: ENST00000476941
  CDS Start-End: 487-2868
gcgaacatctcctcggagcgcagctgggccagcggttcccacagccctggagcccaacgtgcgcagaagcgcctcttggagctcctctcccacagatctctcgtcctcttcctgggctaggccgccccaggcgcggcccctgcgactcctggcacggccccgtgctcggctgccgccctggcgcgcgccacactgtcgtccccggacgggcgcggaccggctcggccggggcgccggcggctggggaggggtcgctggccccggggccgcgcatgcgccgccaccaacttggggctgtcagtggagggcgagtgctggttctcaggggaggcgacgcccttcggggccaacgggcctcgagccgaggcagcagtgggaacgactcatcctttttccagccctggggcgtggctggggtcggggtcggggtcggggccggtgggggccccgcccccgtctcctggcctgcccccttcatgggccgcgatgatggcggccctgtacccgagcacggacctctcgggcgcctcctcctcctccctgccttcctctccatcctcttcctcgccgaacgaggtgatggcgctgaaggatgtgcgggaggtgaaggaggagaatacgctgaatgagaagcttttcttgctggcgtgcgacaagggtgactattatatggttaaaaagattttggaggaaaacagttcaggtgacttgaacataaattgcgtagatgtgcttgggagaaatgctgttaccataactattgaaaacgaaaacttggatatactgcagcttcttttggactacggttgtcagtctgcagatgcacttttggtggcaatcgactctgaagtagtgggagctgttgatatactacttaatcatcgaccaaaacgatcatcaagaccaactatagtaaaactaatggaacgaattcagaatcctgagtattcaacaactatggatgttgcacctgtcattttagctgctcatcgtaacaactatgaaattcttacaatgctcttaaaacaggatgtatctctacccaagccccatgcagttggctgtgaatgcacattgtgttctgcaaaaaacaaaaaggatagcctccggcattccaggtttcgtcttgatatatatcgatgtttggccagtccagctctaataatgttaacagaggaggatccaattctgagagcatttgaacttagtgctgatttaaaagaactaagtcttgtggaggtggaattcaggaatgattatgaggaactagcccggcaatgtaaaatgtttgctaaggatttacttgcacaagcccggaattctcgtgaattggaagttattctaaaccatacgtctagtgacgagcctcttgacaaacggggattattagaagaaagaatgaatttaagtcgtctaaaacttgctatcaaatataaccagaaagagtttgtctcccagtctaactgccagcagttcctgaacactgtttggtttggacagatgtcgggttaccgacgcaagcccacctgtaagaagataatgactgttttgacagtaggcatcttttggccagttttgtcactttgttatttgatagctcccaaatctcagtttggcagaatcattcacacaccttttatgaaatttatcattcatggagcatcatatttcacatttctgctgttgcttaatctatactctcttgtctacaatgaggataagaaaaacacaatggggccagcccttgaaagaatagactatcttcttattctgtggattattgggatgatttggtcagacattaaaagactctggtatgaagggttggaagactttttagaagaatctcgtaatcaactcagttttgtcatgaattctctttatttggcaacctttgccctcaaagtggttgctcacaacaagtttcatgattttgctgatcggaaggattgggatgcattccatcctacactggtggcagaagggctttttgcatttgcaaatgttctaagttatcttcgtctcttttttatgtatacaaccagctctatcttgggtccattacagatttcaatgggacagatgttacaagattttggaaaatttcttgggatgtttcttcttgttttgttttctttcacaattggactgacacaactgtatgataaaggatatacttcaaaggagcagaaggactgtgtaggcatcttctgtgaacagcaaagcaatgataccttccattcgttcattggcacctgctttgctttgttctggtatattttctccttagcgcatgtggcaatctttgtcacaagatttagctatggagaagaactgcagtcctttgtgggagctgtcattgttggtacatacaatgtcgtggttgtgattgtgcttaccaaactgctggtggcaatgcttcataaaagctttcagttgatagcaaatcatgaagacaaagaatggaagtttgctcgagcaaaattatggcttagctactttgatgacaaatgtacgttacctccacctttcaacatcattccctcaccaaagactatctgctatatgattagtagcctcagtaagtggatttgctctcatacatcaaaaggcaaggtcaaacggcaaaacagtttaaaggaatggaggaatttgaaacagaagagagatgaaaactatcaaaaagtgatgtgctgcctagtgcatcgttacttgacttccatgagacagaagatgcaaagtacagatcaggcaactgtggaaaatctaaacgaactgcgccaagatctgtcaaaattccgaaatgaaataagggatttacttggctttcggacttctaaatatgctatgttttatccaagaaattaaccattttctaaatcatggagcgaataattttcaataacagatccaaaagactatattgcataacttgcaatgaaattaatgagatatatattgaaataaagaattatgtaaaagccattctttaaaatatttatagcataaatatatgttatgtaaagtgtgtatatagaattagttttttaaaccttctgtt

SEQ ID NO: 192732 - DNA, 3620 bp, Homo sapiens
  Payload ID: 18046
  Gene Name: transient receptor potential cation channel, subfamily C, member 1
  Uniprot ID: P48995
  ENST ID: ENST00000612385
  CDS Start-End: 56-2335
ccgaggcagcagtgggaacgactcatcctttttccagcccccttcatgggccgcgatgatggcggccctgtacccgagcacggacctctcgggcgcctcctcctcctccctgccttcctctccatcctcttcctcgccgaacgaggtgatggcgctgaaggatgtgcgggaggtgaaggaggagaatacgctgaatgagaagcttttcttgctggcgtgcgacaagggtgactattatatggttaaaaagattttggaggaaaacagttcaggtgacttgaacataaattgcgtagatgtgcttgggagaaatgctgttaccataactattgaaaacgaaaacttggatatactgcagcttcttttggactacggttgtcagaaactaatggaacgaattcagaatcctgagtattcaacaactatggatgttgcacctgtcattttagctgctcatcgtaacaactatgaaattcttacaatgctcttaaaacaggatgtatctctacccaagccccatgcagttggctgtgaatgcacattgtgttctgcaaaaaacaaaaaggatagcctccggcattccaggtttcgtcttgatatatatcgatgtttggccagtccagctctaataatgttaacagaggaggatccaattctgagagcatttgaacttagtgctgatttaaaagaactaagtcttgtggaggtggaattcaggaatgattatgaggaactagcccggcaatgtaaaatgtttgctaaggatttacttgcacaagcccggaattctcgtgaattggaagttattctaaaccatacgtctagtgacgagcctcttgacaaacggggattattagaagaaagaatgaatttaagtcgtctaaaacttgctatcaaatataaccagaaagagtttgtctcccagtctaactgccagcagttcctgaacactgtttggtttggacagatgtcgggttaccgacgcaagcccacctgtaagaagataatgactgttttgacagtaggcatcttttggccagttttgtcactttgttatttgatagctcccaaatctcagtttggcagaatcattcacacaccttttatgaaatttatcattcatggagcatcatatttcacatttctgctgttgcttaatctatactctcttgtctacaatgaggataagaaaaacacaatggggccagcccttgaaagaatagactatcttcttattctgtggattattgggatgatttggtcagacattaaaagactctggtatgaagggttggaagactttttagaagaatctcgtaatcaactcagttttgtcatgaattctctttatttggcaacctttgccctcaaagtggttgctcacaacaagtttcatgattttgctgatcggaaggattgggatgcattccatcctacactggtggcagaagggctttttgcatttgcaaatgttctaagttatcttcgtctcttttttatgtatacaaccagctctatcttgggtccattacagatttcaatgggacagatgttacaagattttggaaaatttcttgggatgtttcttcttgttttgttttctttcacaattggactgacacaactgtatgataaaggatatacttcaaaggagcagaaggactgtgtaggcatcttctgtgaacagcaaagcaatgataccttccattcgttcattggcacctgctttgctttgttctggtatattttctccttagcgcatgtggcaatctttgtcacaagatttagctatggagaagaactgcagtcctttgtgggagctgtcattgttggtacatacaatgtcgtggttgtgattgtgcttaccaaactgctggtggcaatgcttcataaaagctttcagttgatagcaaatcatgaagacaaagaatggaagtttgctcgagcaaaattatggcttagctactttgatgacaaatgtacgttacctccacctttcaacatcattccctcaccaaagactatctgctatatgattagtagcctcagtaagtggatttgctctcatacatcaaaaggcaaggtcaaacggcaaaacagtttaaaggaatggaggaatttgaaacagaagagagatgaaaactatcaaaaagtgatgtgctgcctagtgcatcgttacttgacttccatgagacagaagatgcaaagtacagatcaggcaactgtggaaaatctaaacgaactgcgccaagatctgtcaaaattccgaaatgaaataagggatttacttggctttcggacttctaaatatgctatgttttatccaagaaattaaccattttctaaatcatggagcgaataattttcaataacagatccaaaagactatattgcataacttgcaatgaaattaatgagatatatattgaaataaagaattatgtaaaagccattctttaaaatatttatagcataaatatatgttatgtaaagtgtgtatatagaattagttttttaaaccttctgttagtggctttttgcagaagcaaaacagattaagtagatagattttgttagcatgctgcttggttttcttacttagtgctttaaaatgtttttttttatgtttaagaggggcagttataaatggacacattgcccagaatgttttgtaaaatgaagaccagcaaatgtaggctgatctccttcacaggatacacttgaaatatagaagttatgttttaaatatctctgttttaggagttcacatatagttcagcatttattgtttaggagtataattttattttatctaaaataatagtctattttttcttttgtattttgttataatcttaagcaacaaagaaaaaaccctaatatttgaatctatttatgtctttcaatttaaattcacttcagtttttgttattgtaatatatttacttttacatggttataatcactttatatttttaatgtttttttcacttaatattttatatatacatttccatgtattgatgtagttagtccacatttaaatttttatagaattatatagtttttgaaaaatacagtcagtagatgttttattttttagctattcagttatgtttataagtttgcatagctacttctcgacatttggtttgttttaatttttttgtatcataatagtcctatttttttttcaagttggagtgaatgtttttagttttaagatagataggagacacttttttatcacatgtagtcacaacctgttttgtttttgtaaaacataggaagtctctttaatgcaatgatttgttttatatttggactaaggttcttgagcttatctcccaaggtactttccataatttaacacagcttctataaaagtgacttcatgcttacttgtggatcattcttgctgcttaagatgaaaagcattggttttttaaaattagagaataaaatatgtatttaaatttttggtgtgttcacataaagggatgtagctaaaatgttttcataggctattatatattctcgcagcatttccagttaagaggatattaggtatataattctcttcttaaccgaatgtcagatggtcttacgccacagggtgc

SEQ ID NO: 192733 - DNA, 3675 bp, Homo sapiens
  Payload ID: 18047
  Gene Name: transient receptor potential cation channel, subfamily C, member 3
  Uniprot ID: Q13507
  ENST ID: ENST00000264811
  CDS Start-End: 420-2966
aattaacttctcttagtcttcaagcctagtacttgaatgtcaagtacctgcaagcctcaatgtccaagacttttaagagcggaaggtacgatgagttccatctttactagggtcacaaggaaggcatgggtatatggaaatttttattattattccatctgaatatcattttctagagaataggagcttttgttctgaagggctgccggcttccttctgggatctagcagccagggttagatcacaggtgtcactttcaggcgagtagttagcaacggtatcgctagcaactgagccgacccctgcagccagaggtttgcagtgggtagtgtgtattccagaaagggccctgacatgtgaaaggaaggaatgtgccctaatattctacagttgttttatcgttgctactgattaggtccatggagggaagcccatccctgagacgcatgacagtgatgcgggagaagggccggcgccaggctgtcaggggcccggccttcatgttcaatgaccgcggcaccagcctcaccgccgaggaggagcgcttcctcgacgccgccgagtacggcaacatcccagtggtgcgcaagatgctggaggagtccaagacgctgaacgtcaactgcgtggactacatgggccagaacgcgctgcagctggctgtgggcaacgagcacctggaggtgaccgagctgctgctcaagaaggagaacctggcgcgcattggcgacgccctgctgctcgccatcagcaagggctacgtgcgcatcgtagaggccatcctcaaccaccctggcttcgcggccagcaagcgtctcactctgagcccctgtgagcaggagctgcaggacgacgacttctacgcttacgacgaggacggcacgcgcttctcgccggacatcacccccatcatcctggcggcgcactgccagaaatacgaagtggtgcacatgctgctgatgaagggtgccaggatcgagcggccgcacgactatttctgcaagtgcggggactgcatggagaagcagaggcacgactccttcagccactcacgctcgaggatcaatgcctacaaggggctggccagcccggcttacctctcattgtccagcgaggacccggtgcttacggccctagagctcagcaacgagctggccaagctggccaacatagagaaggagttcaagaatgactatcggaagctctccatgcaatgcaaagactttgtagtgggtgtgctggatctctgccgagactcagaagaggtagaagccattctgaatggagatctggaatcagcagagcctctggaggtacacaggcacaaagcttcattaagtcgtgtcaaacttgccattaagtatgaagtcaaaaagtttgtggctcatcccaactgccagcagcagctcttgacgatctggtatgagaacctctcaggcctaagggagcagaccatagctatcaagtgtctcgttgtgctggtcgtggccctgggccttccattcctggccattggctactggatcgcaccttgcagcaggctggggaaaattctgcgaagcccttttatgaagtttgtagcacatgcagcttctttcatcatcttcctgggtctgcttgtgttcaatgcctcagacaggttcgaaggcatcaccacgctgcccaatatcacagttactgactatcccaaacagatcttcagggtgaaaaccacccagtttacatggactgaaatgctaattatggtctgggttcttggaatgatgtggtctgaatgtaaagagctctggctggaaggacctagggaatacattttgcagttgtggaatgtgcttgactttgggatgctgtccatcttcattgctgctttcacagccagattcctagctttccttcaggcaacgaaggcacaacagtatgtggacagttacgtccaagagagtgacctcagtgaagtgacactcccaccagagatacagtatttcacttatgctagagataaatggctcccttctgaccctcagattatatctgaaggcctttatgccatagctgttgtgctcagcttctctcggattgcgtacatcctccctgcaaatgagagctttggccccctgcagatctctcttggaaggactgtaaaggacatattcaagttcatggtcctctttattatggtgttttttgcctttatgattggcatgttcatactttattcttactaccttggggctaaagttaatgctgcttttaccactgtagaagaaagtttcaagactttattttggtcaatatttgggttgtctgaagtgacttccgttgtgctcaaatatgatcacaaattcatagaaaatattggatacgttctttatggaatatacaatgtaactatggtggtcgttttactcaacatgctaattgctatgattaatagctcatatcaagaaattgaggatgacagtgatgtagaatggaagtttgctcgttcaaaactttggttatcctattttgatgatggaaaaacattacctccacctttcagtctagttcctagtccaaaatcatttgtttatttcatcatgcgaattgttaactttcccaaatgcagaaggagaaggcttcagaaggatatagaaatgggaatgggtaactcaaagtccaggttaaacctcttcactcagtctaactcaagagtttttgaatcacacagttttaacagcattctcaatcagccaacacgttatcagcagataatgaaaagacttataaagcggtatgttttgaaagcacaagtagacaaagaaaatgatgaagttaatgaaggtgaattaaaagaaatcaagcaagatatctccagccttcgttatgaacttttggaagacaagagccaagcaactgaggaattagccattctaattcataaacttagtgagaaactgaatcccagcatgctgagatgtgaatgatgcagcaacctggatttggctttgactatagcacaaatgtgggcaataatatttctaagtatgaaatacttgaaaaactatgatgtaaatttttagtattaactacctttatcatgtgaacctttaaaagttagctcttaatggttttattgttttatcacatgaaaatgcattttatttgtctgctttgacattacagtggcataccattgtgttgaaaagcccaatattactatattattgaaacttttattcattttagagtaaactccacatctttgcactacctgtttgcctccaagagactatcagttccttggggacagggaccatgtcttattcatctttgtgtctccagcatctagtacagtgcctggtatatagtaggtgctcaataaatgttgaaaccaactgaactgccaacaaaataaaaataaaaagtcttcactatgtagcataccttcccttgtccaagttctgaagaggttttttttttttttttttaatagaaactgaagacattttacaaccagctatgacttggtaagacattcttagaattttaggtgtcactgataatcctagaaccactgagccccaagtgaagaatttaacaacaaaatgggttaatgaaaaatataattacattgtatatttaagtttcatagaattatttaaaacaacacattaaagatttttctaaaatata

SEQ ID NO: 192734 - DNA, 3548 bp, Homo sapiens
  Payload ID: 18047
  Gene Name: transient receptor potential cation channel, subfamily C, member 3
  Uniprot ID: Q13507
  ENST ID: ENST00000379645
  CDS Start-End: 75-2840
gggaagactgcactgccgcgaaggcggaggaggccggcagccggcacccccacactcggaccgcagccggcgcgatgtccaccaaggtcaggaagtgcaaagaacaagcaagggtgaccttcccggcgccggaggaggaggaagacgagggcgaggacgagggcgcggagccgcagcgccgccgccggggctggaggggcgtcaacggggggctggagccgcgctcggcgccctcgcagcgggagccgcacggctactgcccgccgcccttctcccacgggccggacctgtccatggagggaagcccatccctgagacgcatgacagtgatgcgggagaagggccggcgccaggctgtcaggggcccggccttcatgttcaatgaccgcggcaccagcctcaccgccgaggaggagcgcttcctcgacgccgccgagtacggcaacatcccagtggtgcgcaagatgctggaggagtccaagacgctgaacgtcaactgcgtggactacatgggccagaacgcgctgcagctggctgtgggcaacgagcacctggaggtgaccgagctgctgctcaagaaggagaacctggcgcgcattggcgacgccctgctgctcgccatcagcaagggctacgtgcgcatcgtagaggccatcctcaaccaccctggcttcgcggccagcaagcgtctcactctgagcccctgtgagcaggagctgcaggacgacgacttctacgcttacgacgaggacggcacgcgcttctcgccggacatcacccccatcatcctggcggcgcactgccagaaatacgaagtggtgcacatgctgctgatgaagggtgccaggatcgagcggccgcacgactatttctgcaagtgcggggactgcatggagaagcagaggcacgactccttcagccactcacgctcgaggatcaatgcctacaaggggctggccagcccggcttacctctcattgtccagcgaggacccggtgcttacggccctagagctcagcaacgagctggccaagctggccaacatagagaaggagttcaagaatgactatcggaagctctccatgcaatgcaaagactttgtagtgggtgtgctggatctctgccgagactcagaagaggtagaagccattctgaatggagatctggaatcagcagagcctctggaggtacacaggcacaaagcttcattaagtcgtgtcaaacttgccattaagtatgaagtcaaaaagtttgtggctcatcccaactgccagcagcagctcttgacgatctggtatgagaacctctcaggcctaagggagcagaccatagctatcaagtgtctcgttgtgctggtcgtggccctgggccttccattcctggccattggctactggatcgcaccttgcagcaggctggggaaaattctgcgaagcccttttatgaagtttgtagcacatgcagcttctttcatcatcttcctgggtctgcttgtgttcaatgcctcagacaggttcgaaggcatcaccacgctgcccaatatcacagttactgactatcccaaacagatcttcagggtgaaaaccacccagtttacatggactgaaatgctaattatggtctgggttcttggaatgatgtggtctgaatgtaaagagctctggctggaaggacctagggaatacattttgcagttgtggaatgtgcttgactttgggatgctgtccatcttcattgctgctttcacagccagattcctagctttccttcaggcaacgaaggcacaacagtatgtggacagttacgtccaagagagtgacctcagtgaagtgacactcccaccagagatacagtatttcacttatgctagagataaatggctcccttctgaccctcagattatatctgaaggcctttatgccatagctgttgtgctcagcttctctcggattgcgtacatcctccctgcaaatgagagctttggccccctgcagatctctcttggaaggactgtaaaggacatattcaagttcatggtcctctttattatggtgttttttgcctttatgattggcatgttcatactttattcttactaccttggggctaaagttaatgctgcttttaccactgtagaagaaagtttcaagactttattttggtcaatatttgggttgtctgaagtgacttccgttgtgctcaaatatgatcacaaattcatagaaaatattggatacgttctttatggaatatacaatgtaactatggtggtcgttttactcaacatgctaattgctatgattaatagctcatatcaagaaattgaggatgacagtgatgtagaatggaagtttgctcgttcaaaactttggttatcctattttgatgatggaaaaacattacctccacctttcagtctagttcctagtccaaaatcatttgtttatttcatcatgcgaattgttaactttcccaaatgcagaaggagaaggcttcagaaggatatagaaatgggaatgggtaactcaaagtccaggttaaacctcttcactcagtctaactcaagagtttttgaatcacacagttttaacagcattctcaatcagccaacacgttatcagcagataatgaaaagacttataaagcggtatgttttgaaagcacaagtagacaaagaaaatgatgaagttaatgaaggtgaattaaaagaaatcaagcaagatatctccagccttcgttatgaacttttggaagacaagagccaagcaactgaggaattagccattctaattcataaacttagtgagaaactgaatcccagcatgctgagatgtgaatgatgcagcaacctggatttggctttgactatagcacaaatgtgggcaataatatttctaagtatgaaatacttgaaaaactatgatgtaaatttttagtattaactacctttatcatgtgaacctttaaaagttagctcttaatggttttattgttttatcacatgaaaatgcattttatttgtctgctttgacattacagtggcataccattgtgttgaaaagcccaatattactatattattgaaacttttattcattttagagtaaactccacatctttgcactacctgtttgcctccaagagactatcagttccttggggacagggaccatgtcttattcatctttgtgtctccagcatctagtacagtgcctggtatatagtaggtgctcaataaatgttgaaaccaactgaactgccaacaaaataaaaataaaaagtcttcactatgtagcataccttcccttgtccaagttctgaagaggttttttttttttttttttaatagaaactgaagacattttacaaccagctatgacttggtaagacattcttagaattttaggtgtcactgataatcctagaaccactgagccccaagtgaagaatttaacaacaaaatgggttaatgaaaaatataattacattgtatatttaagtttcatagaattatttaaaacaacacattaaagatttttctaaaatat

SEQ ID NO: 192735 - DNA, 619 bp, Homo sapiens
  Payload ID: 18047
  Gene Name: transient receptor potential cation channel, subfamily C, member 3
  ENST ID: ENST00000502968
  CDS Start-End: 341-619
cgtctctctgtggttcagtcacatttggggtaaaactggaaccgaagccctatagggtcccctgagggagagagtgggcatcgggcagccggggaaccgctttagtgataactttgactgcggttcccaggcggtgcagggtcagcggctcgcgccccggcgcgcgggctctctttttctctttctttctttccctctctctctttctaaacgaaggagcggtcggcgcgctaatgcatgagaaagagcaacttttcttaatttccaatcttggagacagcttttaatcagtgcgagacgcagagaagataaaaagagggtgatcggtttcacagggtccatggagggaagcccatccctgagacgcatgacagtgatgcgggagaagggccggcgccaggctgtcaggggcccggccttcatgttcaatgaccgcggcaccagcctcaccgccgaggaggagcgcttcctcgacgccgccgagtacggcaacatcccagtggtgcgcaagatgctggaggagtccaagacgctgaacgtcaactgcgtggactacatgggccagaacgcgctgcagctggctgtgggcaacgagcacctggaggtgaccgagctgctg

SEQ ID NO: 192736 - DNA, 2700 bp, Homo sapiens
  Payload ID: 18047
  Gene Name: transient receptor potential cation channel, subfamily C, member 3
  ENST ID: ENST00000506449
  CDS Start-End: 76-906
gggccctgacatgtgaaaggaaggaatgtgccctaatattctacagttgttttatcgttgctactgattaggtccatggagggaagcccatccctgagacgcatgacagtgatgcgggagaagggccggcgccaggctgtcaggggcccggccttcatgttcaatgaccgcggcaccagcctcaccgccgaggaggagcgcttcctcgacgccgccgagtacggcaacatcccagtggtgcgcaagatgctggaggagtccaagacgctgaacgtcaactgcgtggactacatgggccagaacgcgctgcagctggctgtgggcaacgagcacctggaggtgaccgagctgctgctcaagaaggagaacctggcgcgcattggcgacgccctgctgctcgccatcagcaagggctacgtgcgcatcgtagaggccatcctcaaccaccctggcttcgcggccagcaagcgtctcactctgagcccctgtgagcaggagctgcaggacgacgacttctacgcttacgacgaggacggcacgcgcttctcgccggacatcacccccatcatcctggcggcgcactgccagaaatacgaagtggtgcacatgctgctgatgaagggtgccaggatcgagcggccgcacgactatttctgcaagtgcggggactgcatggagaagcagaggcacgactccttcagccactcacgctcgaggatcaatgcctacaaggggctggccagcccggcttacctctcattgtccagcgaggacccggtgcttacggccctagagctcagcaacgagctggccaagctggccaacatagagaaggagttcaagatctcagagcaagttgaaaactccaaattccgtttagagacagtagaaaagcatttagaatgactatcggaagctctccatgcaatgcaaagactttgtagtgggtgtgctggatctctgccgagactcagaagaggtagaagccattctgaatggagatctggaatcagcagagcctctggaggtacacaggcacaaagcttcattaagtcgtgtcaaacttgccattaagtatgaagtcaaaaagtttgtggctcatcccaactgccagcagcagctcttgacgatctggtatgagaacctctcaggcctaagggagcagaccatagctatcaagtgtctcgttgtgctggtcgtggccctgggccttccattcctggccattggctactggatcgcaccttgcagcaggctggggaaaattctgcgaagcccttttatgaagtttgtagcacatgcagcttctttcatcatcttcctgggtctgcttgtgttcaatgcctcagacaggttcgaaggcatcaccacgctgcccaatatcacagttactgactatcccaaacagatcttcagggtgaaaaccacccagtttacatggactgaaatgctaattatggtctgggttcttggaatgatgtggtctgaatgtaaagagctctggctggaaggacctagggaatacattttgcagttgtggaatgtgcttgactttgggatgctgtccatcttcattgctgctttcacagccagattcctagctttccttcaggcaacgaaggcacaacagtatgtggacagttacgtccaagagagtgacctcagtgaagtgacactcccaccagagatacagtatttcacttatgctagagataaatggctcccttctgaccctcagattatatctgaaggcctttatgccatagctgttgtgctcagcttctctcggattgcgtacatcctccctgcaaatgagagctttggccccctgcagatctctcttggaaggactgtaaaggacatattcaagttcatggtcctctttattatggtgttttttgcctttatgattggcatgttcatactttattcttactaccttggggctaaagttaatgctgcttttaccactgtagaagaaagtttcaagactttattttggtcaatatttgggttgtctgaagtgacttccgttgtgctcaaatatgatcacaaattcatagaaaatattggatacgttctttatggaatatacaatgtaactatggtggtcgttttactcaacatgctaattgctatgattaatagctcatatcaagaaattgaggatgacagtgatgtagaatggaagtttgctcgttcaaaactttggttatcctattttgatgatggaaaaacattacctccacctttcagtctagttcctagtccaaaatcatttgtttatttcatcatgcgaattgttaactttcccaaatgcagaaggagaaggcttcagaaggatatagaaatgggaatgggtaactcaaagtccaggttaaacctcttcactcagtctaactcaagagtttttgaatcacacagttttaacagcattctcaatcagccaacacgttatcagcagataatgaaaagacttataaagcggtatgttttgaaagcacaagtagacaaagaaaatgatgaagttaatgaaggtgaattaaaagaaatcaagcaagatatctccagccttcgttatgaacttttggaagacaagagccaagcaactgaggaattagccattctaattcataaacttagtgagaaactgaatcccagcatgctgagatgtgaatgatgcagcaacctggatttggc

SEQ ID NO: 192737 - DNA, 2382 bp, Homo sapiens
  Payload ID: 18047
  Gene Name: transient receptor potential cation channel, subfamily C, member 3
  ENST ID: ENST00000513531
  CDS Start-End: 1-2382
atggagggaagcccatccctgagacgcatgacagtgatgcgggagaagggccggcgccaggctgtcaggggcccggccttcatgttcaatgaccgcggcaccagcctcaccgccgaggaggagcgcttcctcgacgccgccgagtacggcaacatcccagtggtgcgcaagatgctggaggagtccaagacgctgaacgtcaactgcgtggactacatgggccagaacgcgctgcagctggctgtgggcaacgagcacctggaggtgaccgagctgctgctcaagaaggagaacctggcgcgcattggcgacgccctgctgctcgccatcagcaagggctacgtgcgcatcgtagaggccatcctcaaccaccctggcttcgcggccagcaagcgtctcactctgagcccctgtgagcaggagctgcaggacgacgacttctacgcttacgacgaggacggcacgcgcttctcgccggacatcacccccatcatcctggcggcgcactgccagaaatacgaagtggtgcacatgctgctgatgaagggtgccaggatcgagcggccgcacgactatttctgcaagtgcggggactgcatggagaagcagaggcacgactccttcagccactcacgctcgaggatcaatgcctacaaggggctggccagcccggcttacctctcattgtccagcgaggacccggtgcttacggccctagagctcagcaacgagctggccaagctggccaacatagagaaggagttcaagaatgactatcggaagctctccatgcaatgcaaagactttgtagtgggtgtgctggatctctgccgagactcagaagaggtagaagccattctgaatggagatctggaatcagcagagcctctggaggtacacaggcacaaagcttcattaagtcgtgtcaaacttgccattaagtatgaagtcaaaaagctggggaaaattctgcgaagcccttttatgaagtttgtagcacatgcagcttctttcatcatcttcctgggtctgcttgtgttcaatgcctcagacaggttcgaaggcatcaccacgctgcccaatatcacagttactgactatcccaaacagatcttcagggtgaaaaccacccagtttacatggactgaaatgctaattatggtctgggttcttggaatgatgtggtctgaatgtaaagagctctggctggaaggacctagggaatacattttgcagttgtggaatgtgcttgactttgggatgctgtccatcttcattgctgctttcacagccagattcctagctttccttcaggcaacgaaggcacaacagtatgtggacagttacgtccaagagagtgacctcagtgaagtgacactcccaccagagatacagtatttcacttatgctagagataaatggctcccttctgaccctcagattatatctgaaggcctttatgccatagctgttgtgctcagcttctctcggattgcgtacatcctccctgcaaatgagagctttggccccctgcagatctctcttggaaggactgtaaaggacatattcaagttcatggtcctctttattatggtgttttttgcctttatgattggcatgttcatactttattcttactaccttggggctaaagttaatgctgcttttaccactgtagaagaaagtttcaagactttattttggtcaatatttgggttgtctgaagtgacttccgttgtgctcaaatatgatcacaaattcatagaaaatattggatacgttctttatggaatatacaatgtaactatggtggtcgttttactcaacatgctaattgctatgattaatagctcatatcaagaaattgaggatgacagtgatgtagaatggaagtttgctcgttcaaaactttggttatcctattttgatgatggaaaaacattacctccacctttcagtctagttcctagtccaaaatcatttgtttatttcatcatgcgaattgttaactttcccaaatgcagaaggagaaggcttcagaaggatatagaaatgggaatgggtaactcaaagtccaggttaaacctcttcactcagtctaactcaagagtttttgaatcacacagttttaacagcattctcaatcagccaacacgttatcagcagataatgaaaagacttataaagcggtatgttttgaaagcacaagtagacaaagaaaatgatgaagttaatgaaggtgaattaaaagaaatcaagcaagatatctccagccttcgttatgaacttttggaagacaagagccaagcaactgaggaattagccattctaattcataaacttagtgagaaactgaatcccagcatgctgagatgtgaatga

SEQ ID NO: 192738 - DNA, 2912 bp, Homo sapiens
  Payload ID: 18048
  Gene Name: transient receptor potential cation channel, subfamily C, member 4
  Uniprot ID: Q9UBN4
  ENST ID: ENST00000338947
  CDS Start-End: 236-2650
cttcgctttcagagcatcctcactccgcccagttcggtgccagctgcgtgggctccagcttcgatcgttttccttggaatgctccaaaactcagcagcgactaagggaattccattggaatttgccgggcgtgctctcaccccgcacggcacccgcgccgtcagtcctcggatcccatcacttcagcccgaagattgcaactttgcagagacgaagaaatagcatggcatgaaacatggctcagttctattacaaaagaaatgttaatgctccctatagagaccgcatccctctaaggatagtaagagcagaatcagaactctcgccatcagaaaaagcctacttgaatgctgtggaaaagggagattatgccagtgtcaagaaatccctagaggaagctgaaatttattttaaaatcaatattaattgcattgatcctctcggaagaactgctctcctcattgcaattgaaaatgagaacttggagctcatcgaactactcttaagctttaatgtctatgttggagatgctctattacatgctatcagaaaagaagtcgtcggagctgttgagctgttattgaaccacaaaaaacctagtggagaaaaacagtttgttgcccagcccaattgtcaacagctgctggcatctcgctggtacgatgagtttccaggctggaggagaagacactgggcagtgaagatggtgacatgtttcataataggacttctttttcctgtcttctctgtgtgctacctgatagctcccaaaagcccacttggactgttcatcaggaagccatttatcaagtttatctgccacacagcctcctatttgacttttttgttcctgctgctgcttgcctctcagcacatcgacaggtcagacttgaacaggcaaggtccaccaccaaccatcgtcgagtggatgatattaccgtgggtcctgggcttcatatggggagaaattaaacagatgtgggatggcggacttcaggactacatccatgattggtggaatctaatggactttgtaatgaactccttatatttagcaacaatctccttgaaaattgttgcatttgtaaagtacagtgcccttaatccacgagaatcatgggacatgtggcatcccactctggtggcagaggctttatttgctattgcaaacatcttcagttctctgcgtctgatctcactgtttactgcaaattctcacctgggacctctgcaaatatctctgggaagaatgctcctggacattttgaagtttctattcatatactgccttgtgttgctagcatttgcaaatggcctaaatcaattgtacttctattatgaagaaacgaaagggttaacctgcaaaggcataagatgtgaaaagcagaataatgcattttcaacgttatttgagacactgcagtccctgttttggtcaatatttgggctcatcaatttatatgtgaccaatgtcaaagcacagcatgaatttactgagtttgttggtgccaccatgtttgggacatacaatgtcatctctctggttgttctactcaacatgttaatagctatgatgaataattcttaccaactgattgctgaccatgcagatatagaatggaaatttgcacgaacaaagctttggatgagttattttgaagaaggaggtactctgcctactcccttcaatgtcatcccgagccccaagtctctctggtacctgatcaaatggatctggacacacttgtgcaagaaaaagatgagaagaaagccagaaagttttggaacaatagggaggcgagctgctgataacttgagaagacatcaccaataccaagaagttatgaggaacctggtgaagcgatacgttgctgcaatgattagagatgctaaaactgaagaaggcctgaccgaagagaactttaaggaactaaagcaagacatttctagtttccgctttgaagtcctgggattactaagaggaagcaaactttccacaatacaatctgcgaatgcctcgaaggagtcttcaaattcggcagactcagatgaaaagagtgatagcgaaggtaatagcaaggacaagaaaaagaatttcagcctttttgatttaaccaccctgattcatccgagatcagcagcaattgcctctgaaagacataacataagcaatggctctgccctggtggttcaggagccgcccagggagaagcagagaaaagtgaattttgtgaccgatatcaaaaactttgggttatttcatagacgatcaaaacaaaatgctgctgagcaaaatgcaaaccaaatcttctctgtttcagaagaagttgctcgtcaacaggctgcaggaccacttgagagaaatattcaactggaatctcgaggattagcttcacggggtgacctgagcattcccggtctcagtgaacaatgtgtgttagtagaccatagagaaaggaatacggacacactggggttacaggtaggaaagagagtgtgtccattcaagtcagagaaggtggtggtggaggacacggttcctataataccaaaggagaaacatgcaaaagaagaggactctagtatagactatgatctaaacctcccagacacagtcacccacgaagattacgtgaccacaagattgtgatacttgaaggaggaagcgtttaccatacacatacgtattttccgtagtgctctgggtgggggaaaatgtttaaattgtattagcaaatgctaacttacactttatagcgtttatcagctgtggcatattacctgtaacatgtttaaataaggcaaaggcaatcaaaaacctttttgttttgtagcctgcttttgctttcacaatttgtcttacaattgtttttgttaataaataaatgcaccttgtattcttgtactgttgc

SEQ ID NO: 192739 - DNA, 2784 bp, Homo sapiens
  Payload ID: 18048
  Gene Name: transient receptor potential cation channel, subfamily C, member 4
  Uniprot ID: Q9UBN4
  ENST ID: ENST00000355779
  CDS Start-End: 236-2746
cttcgctttcagagcatcctcactccgcccagttcggtgccagctgcgtgggctccagcttcgatcgttttccttggaatgctccaaaactcagcagcgactaagggaattccattggaatttgccgggcgtgctctcaccccgcacggcacccgcgccgtcagtcctcggatcccatcacttcagcccgaagattgcaactttgcagagacgaagaaatagcatggcatgaaacatggctcagttctattacaaaagaaatgttaatgctccctatagagaccgcatccctctaaggatagtaagagcagaatcagaactctcgccatcagaaaaagcctacttgaatgctgtggaaaagggagattatgccagtgtcaagaaatccctagaggaagctgaaatttattttaaaatcaatattaattgcattgatcctctcggaagaactgctctcctcattgcaattgaaaatgagaacttggagctcatcgaactactcttaagctttaatgtctatgttggagatgctctattacatgctatcagaaaagaagtcgtcggagctgttgagctgttattgaaccacaaaaaacctagtggagaaaaacaggtgcctcctatactccttgataagcagttctctgaattcactccagacattacaccaatcattttggcagcccatacaaataattatgagataataaaactcttggttcagaaaggagtctcagtgcctcgaccccacgaggtccgctgtaactgtgtggaatgcgtgtccagttcagatgtggacagcctccgtcactcacgctccagactcaacatctacaaggccttggccagtccctctctcattgcactgtcaagcgaagatccttttctcacagcctttcagttaagttgggaacttcaggaactgagcaaggtggaaaatgaattcaagtcggagtatgaagagctgtcacggcagtgcaaacaatttgctaaggacctactggatcagacgagaagttccagagaactggaaatcattcttaattaccgagatgacaatagtctcatagaagaacaaagtggaaatgatcttgcaagactaaaattggccattaagtaccgtcaaaaagagtttgttgcccagcccaattgtcaacagctgctggcatctcgctggtacgatgagtttccaggctggaggagaagacactgggcagtgaagatggtgacatgtttcataataggacttctttttcctgtcttctctgtgtgctacctgatagctcccaaaagcccacttggactgttcatcaggaagccatttatcaagtttatctgccacacagcctcctatttgacttttttgttcctgctgctgcttgcctctcagcacatcgacaggtcagacttgaacaggcaaggtccaccaccaaccatcgtcgagtggatgatattaccgtgggtcctgggcttcatatggggagaaattaaacagatgtgggatggcggacttcaggactacatccatgattggtggaatctaatggactttgtaatgaactccttatatttagcaacaatctccttgaaaattgttgcatttgtaaagtacagtgcccttaatccacgagaatcatgggacatgtggcatcccactctggtggcagaggctttatttgctattgcaaacatcttcagttctctgcgtctgatctcactgtttactgcaaattctcacctgggacctctgcaaatatctctgggaagaatgctcctggacattttgaagtttctattcatatactgccttgtgttgctagcatttgcaaatggcctaaatcaattgtacttctattatgaagaaacgaaagggttaacctgcaaaggcataagatgtgaaaagcagaataatgcattttcaacgttatttgagacactgcagtccctgttttggtcaatatttgggctcatcaatttatatgtgaccaatgtcaaagcacagcatgaatttactgagtttgttggtgccaccatgtttgggacatacaatgtcatctctctggttgttctactcaacatgttaatagctatgatgaataattcttaccaactgattgctgaccatgcagatatagaatggaaatttgcacgaacaaagctttggatgagttattttgaagaaggaggtactctgcctactcccttcaatgtcatcccgagccccaagtctctctggtacctgatcaaatggatctggacacacttgtgcaagaaaaagatgagaagaaagccagaaagttttggaacaatagggaggcgagctgctgataacttgagaagacatcaccaataccaagaagttatgaggaacctggtgaagcgatacgttgctgcaatgattagagatgctaaaactgaagaagttgctcgtcaacaggctgcaggaccacttgagagaaatattcaactggaatctcgaggattagcttcacggggtgacctgagcattcccggtctcagtgaacaatgtgtgttagtagaccatagagaaaggaatacggacacactggggttacaggtaggaaagagagtgtgtccattcaagtcagagaaggtggtggtggaggacacggttcctataataccaaaggagaaacatgcaaaagaagaggactctagtatagactatgatctaaacctcccagacacagtcacccacgaagattacgtgaccacaagattgtgatacttgaaggaggaagcgtttaccatacacatacgtat

SEQ ID NO: 192740 - DNA, 2955 bp, Homo sapiens
  Payload ID: 18048
  Gene Name: transient receptor potential cation channel, subfamily C, member 4
  Uniprot ID: Q9UBN4
  ENST ID: ENST00000358477
  CDS Start-End: 236-2917
cttcgctttcagagcatcctcactccgcccagttcggtgccagctgcgtgggctccagcttcgatcgttttccttggaatgctccaaaactcagcagcgactaagggaattccattggaatttgccgggcgtgctctcaccccgcacggcacccgcgccgtcagtcctcggatcccatcacttcagcccgaagattgcaactttgcagagacgaagaaatagcatggcatgaaacatggctcagttctattacaaaagaaatgttaatgctccctatagagaccgcatccctctaaggatagtaagagcagaatcagaactctcgccatcagaaaaagcctacttgaatgctgtggaaaagggagattatgccagtgtcaagaaatccctagaggaagctgaaatttattttaaaatcaatattaattgcattgatcctctcggaagaactgctctcctcattgcaattgaaaatgagaacttggagctcatcgaactactcttaagctttaatgtctatgttggagatgctctattacatgctatcagaaaagaagtcgtcggagctgttgagctgttattgaaccacaaaaaacctagtggagaaaaacaggtgcctcctatactccttgataagcagttctctgaattcactccagacattacaccaatcattttggcagcccatacaaataattatgagataataaaactcttggttcagaaaggagtctcagtgcctcgaccccacgaggtccgctgtaactgtgtggaatgcgtgtccagttcagatgtggacagcctccgtcactcacgctccagactcaacatctacaaggccttggccagtccctctctcattgcactgtcaagcgaagatccttttctcacagcctttcagttaagttgggaacttcaggaactgagcaaggtggaaaatgaattcaagtcggagtatgaagagctgtcacggcagtgcaaacaatttgctaaggacctactggatcagacgagaagttccagagaactggaaatcattcttaattaccgagatgacaatagtctcatagaagaacaaagtggaaatgatcttgcaagactaaaattggccattaagtaccgtcaaaaagagtttgttgcccagcccaattgtcaacagctgctggcatctcgctggtacgatgagtttccaggctggaggagaagacactgggcagtgaagatggtgacatgtttcataataggacttctttttcctgtcttctctgtgtgctacctgatagctcccaaaagcccacttggactgttcatcaggaagccatttatcaagtttatctgccacacagcctcctatttgacttttttgttcctgctgctgcttgcctctcagcacatcgacaggtcagacttgaacaggcaaggtccaccaccaaccatcgtcgagtggatgatattaccgtgggtcctgggcttcatatggggagaaattaaacagatgtgggatggcggacttcaggactacatccatgattggtggaatctaatggactttgtaatgaactccttatatttagcaacaatctccttgaaaattgttgcatttgtaaagtacagtgcccttaatccacgagaatcatgggacatgtggcatcccactctggtggcagaggctttatttgctattgcaaacatcttcagttctctgcgtctgatctcactgtttactgcaaattctcacctgggacctctgcaaatatctctgggaagaatgctcctggacattttgaagtttctattcatatactgccttgtgttgctagcatttgcaaatggcctaaatcaattgtacttctattatgaagaaacgaaagggttaacctgcaaaggcataagatgtgaaaagcagaataatgcattttcaacgttatttgagacactgcagtccctgttttggtcaatatttgggctcatcaatttatatgtgaccaatgtcaaagcacagcatgaatttactgagtttgttggtgccaccatgtttgggacatacaatgtcatctctctggttgttctactcaacatgttaatagctatgatgaataattcttaccaactgattgctgaccatgcagatatagaatggaaatttgcacgaacaaagctttggatgagttattttgaagaaggaggtactctgcctactcccttcaatgtcatcccgagccccaagtctctctggtacctgatcaaatggatctggacacacttgtgcaagaaaaagatgagaagaaagccagaaagttttggaacaatagggaggcgagctgctgataacttgagaagacatcaccaataccaagaagttatgaggaacctggtgaagcgatacgttgctgcaatgattagagatgctaaaactgaagaaggcctgaccgaagagaactttaaggaactaaagcaagacatttctagtttccgctttgaagtcctgggattactaagaggaagcaaactttccacaatacaatctgcgaatgcctcgaaggagtcttcaaattcggcagactcagatgaaaagagtgatagcgaagaagaagttgctcgtcaacaggctgcaggaccacttgagagaaatattcaactggaatctcgaggattagcttcacggggtgacctgagcattcccggtctcagtgaacaatgtgtgttagtagaccatagagaaaggaatacggacacactggggttacaggtaggaaagagagtgtgtccattcaagtcagagaaggtggtggtggaggacacggttcctataataccaaaggagaaacatgcaaaagaagaggactctagtatagactatgatctaaacctcccagacacagtcacccacgaagattacgtgaccacaagattgtgatacttgaaggaggaagcgtttaccatacacatacgtat

SEQ ID NO: 192741 - DNA, 2760 bp, Homo sapiens
  Payload ID: 18048
  Gene Name: transient receptor potential cation channel, subfamily C, member 4
  Uniprot ID: Q9UBN4
  ENST ID: ENST00000379673
  CDS Start-End: 236-2722
cttcgctttcagagcatcctcactccgcccagttcggtgccagctgcgtgggctccagcttcgatcgttttccttggaatgctccaaaactcagcagcgactaagggaattccattggaatttgccgggcgtgctctcaccccgcacggcacccgcgccgtcagtcctcggatcccatcacttcagcccgaagattgcaactttgcagagacgaagaaatagcatggcatgaaacatggctcagttctattacaaaagaaatgttaatgctccctatagagaccgcatccctctaaggatagtaagagcagaatcagaactctcgccatcagaaaaagcctacttgaatgctgtggaaaagggagattatgccagtgtcaagaaatccctagaggaagctgaaatttattttaaaatcaatattaattgcattgatcctctcggaagaactgctctcctcattgcaattgaaaatgagaacttggagctcatcgaactactcttaagctttaatgtctatgttggagatgctctattacatgctatcagaaaagaagtcgtcggagctgttgagctgttattgaaccacaaaaaacctagtggagaaaaacaggtgcctcctatactccttgataagcagttctctgaattcactccagacattacaccaatcattttggcagcccatacaaataattatgagataataaaactcttggttcagaaaggagtctcagtgcctcgaccccacgaggtccgctgtaactgtgtggaatgcgtgtccagttcagatgtggacagcctccgtcactcacgctccagactcaacatctacaaggccttggccagtccctctctcattgcactgtcaagcgaagatccttttctcacagcctttcagttaagttgggaacttcaggaactgagcaaggtggaaaatgaattcaagtcggagtatgaagagctgtcacggcagtgcaaacaatttgctaaggacctactggatcagacgagaagttccagagaactggaaatcattcttaattaccgagatgacaatagtctcatagaagaacaaagtggaaatgatcttgcaagactaaaattggccattaagtaccgtcaaaaagagtttgttgcccagcccaattgtcaacagctgctggcatctcgctggtacgatgagtttccaggctggaggagaagacactgggcagtgaagatggtgacatgtttcataataggacttctttttcctgtcttctctgtgtgctacctgatagctcccaaaagcccacttggactgttcatcaggaagccatttatcaagtttatctgccacacagcctcctatttgacttttttgttcctgctgctgcttgcctctcagcacatcgacaggtcagacttgaacaggcaaggtccaccaccaaccatcgtcgagtggatgatattaccgtgggtcctgggcttcatatggggagaaattaaacagatgtgggatggcggacttcaggactacatccatgattggtggaatctaatggactttgtaatgaactccttatatttagcaacaatctccttgaaaattgttgcatttgtaaagtacagtgcccttaatccacgagaatcatgggacatgtggcatcccactctggtggcagaggctttatttgctattgcaaacatcttcagttctctgcgtctgatctcactgtttactgcaaattctcacctgggacctctgcaaatatctctgggaagaatgctcctggacattttgaagtttctattcatatactgccttgtgttgctagcatttgcaaatggcctaaatcaattgtacttctattatgaagaaacgaaagggttaacctgcaaaggcataagatgtgaaaagcagaataatgcattttcaacgttatttgagacactgcagtccctgttttggtcaatatttgggctcatcaatttatatgtgaccaatgtcaaagcacagcatgaatttactgagtttgttggtgccaccatgtttgggacatacaatgtcatctctctggttgttctactcaacatgttaatagctatgatgaataattcttaccaactgattgctaggcgagctgctgataacttgagaagacatcaccaataccaagaagttatgaggaacctggtgaagcgatacgttgctgcaatgattagagatgctaaaactgaagaaggcctgaccgaagagaactttaaggaactaaagcaagacatttctagtttccgctttgaagtcctgggattactaagaggaagcaaactttccacaatacaatctgcgaatgcctcgaaggagtcttcaaattcggcagactcagatgaaaagagtgatagcgaagaagaagttgctcgtcaacaggctgcaggaccacttgagagaaatattcaactggaatctcgaggattagcttcacggggtgacctgagcattcccggtctcagtgaacaatgtgtgttagtagaccatagagaaaggaatacggacacactggggttacaggtaggaaagagagtgtgtccattcaagtcagagaaggtggtggtggaggacacggttcctataataccaaaggagaaacatgcaaaagaagaggactctagtatagactatgatctaaacctcccagacacagtcacccacgaagattacgtgaccacaagattgtgatacttgaaggaggaagcgtttaccatacacatacgtat

SEQ ID NO: 192742 - DNA, 2475 bp, Homo sapiens
  Payload ID: 18048
  Gene Name: transient receptor potential cation channel, subfamily C, member 4
  Uniprot ID: Q9UBN4
  ENST ID: ENST00000379679
  CDS Start-End: 1-2415
atggctcagttctattacaaaagaaatgttaatgctccctatagagaccgcatccctctaaggatagtaagagcagaatcagaactctcgccatcagaaaaagcctacttgaatgctgtggaaaagggagattatgccagtgtcaagaaatccctagaggaagctgaaatttattttaaaatcaatattaattgcattgatcctctcggaagaactgctctcctcattgcaattgaaaatgagaacttggagctcatcgaactactcttaagctttaatgtctatgttggagatgctctattacatgctatcagaaaagaagtcgtcggagctgttgagctgttattgaaccacaaaaaacctagtggagaaaaacagtttgttgcccagcccaattgtcaacagctgctggcatctcgctggtacgatgagtttccaggctggaggagaagacactgggcagtgaagatggtgacatgtttcataataggacttctttttcctgtcttctctgtgtgctacctgatagctcccaaaagcccacttggactgttcatcaggaagccatttatcaagtttatctgccacacagcctcctatttgacttttttgttcctgctgctgcttgcctctcagcacatcgacaggtcagacttgaacaggcaaggtccaccaccaaccatcgtcgagtggatgatattaccgtgggtcctgggcttcatatggggagaaattaaacagatgtgggatggcggacttcaggactacatccatgattggtggaatctaatggactttgtaatgaactccttatatttagcaacaatctccttgaaaattgttgcatttgtaaagtacagtgcccttaatccacgagaatcatgggacatgtggcatcccactctggtggcagaggctttatttgctattgcaaacatcttcagttctctgcgtctgatctcactgtttactgcaaattctcacctgggacctctgcaaatatctctgggaagaatgctcctggacattttgaagtttctattcatatactgccttgtgttgctagcatttgcaaatggcctaaatcaattgtacttctattatgaagaaacgaaagggttaacctgcaaaggcataagatgtgaaaagcagaataatgcattttcaacgttatttgagacactgcagtccctgttttggtcaatatttgggctcatcaatttatatgtgaccaatgtcaaagcacagcatgaatttactgagtttgttggtgccaccatgtttgggacatacaatgtcatctctctggttgttctactcaacatgttaatagctatgatgaataattcttaccaactgattgctgaccatgcagatatagaatggaaatttgcacgaacaaagctttggatgagttattttgaagaaggaggtactctgcctactcccttcaatgtcatcccgagccccaagtctctctggtacctgatcaaatggatctggacacacttgtgcaagaaaaagatgagaagaaagccagaaagttttggaacaatagggaggcgagctgctgataacttgagaagacatcaccaataccaagaagttatgaggaacctggtgaagcgatacgttgctgcaatgattagagatgctaaaactgaagaaggcctgaccgaagagaactttaaggaactaaagcaagacatttctagtttccgctttgaagtcctgggattactaagaggaagcaaactttccacaatacaatctgcgaatgcctcgaaggagtcttcaaattcggcagactcagatgaaaagagtgatagcgaaggtaatagcaaggacaagaaaaagaatttcagcctttttgatttaaccaccctgattcatccgagatcagcagcaattgcctctgaaagacataacataagcaatggctctgccctggtggttcaggagccgcccagggagaagcagagaaaagtgaattttgtgaccgatatcaaaaactttgggttatttcatagacgatcaaaacaaaatgctgctgagcaaaatgcaaaccaaatcttctctgtttcagaagaagttgctcgtcaacaggctgcaggaccacttgagagaaatattcaactggaatctcgaggattagcttcacggggtgacctgagcattcccggtctcagtgaacaatgtgtgttagtagaccatagagaaaggaatacggacacactggggttacaggtaggaaagagagtgtgtccattcaagtcagagaaggtggtggtggaggacacggttcctataataccaaaggagaaacatgcaaaagaagaggactctagtatagactatgatctaaacctcccagacacagtcacccacgaagattacgtgaccacaagattgtgatacttgaaggaggaagcgtttaccatacacatacgtattttccgtagtgctctgggtggg

SEQ ID NO: 192743 - DNA, 4059 bp, Homo sapiens
  Payload ID: 18048
  Gene Name: transient receptor potential cation channel, subfamily C, member 4
  Uniprot ID: Q9UBN4
  ENST ID: ENST00000379705
  CDS Start-End: 859-3792
agtcgcccagagaagcgggagtgggagaagctttgagagttgcaggggactacttttttccggtcgggcggcgggcctcatgggtgcttgtttaccgggctgggagcagggcattcaaaagctgggtgtcggagcgcactgaagtccaacacgcctgcagagaccgccctaagcctggaggtgtgtctggcttgcatccagaaccacagggtggattctcgccaccgacttggctggatgacggctggctggtggtgagctcccctgcccactggctgacctcaagcagttggccccggtaggtggaggctattcgagggggacaagctggggacgcagcgtcagctcctgccagcgcgcgggtctcctccacctccaagcagtgtggtgcgtgggacgcgcatcttcccggactatccctttccagcgcggtctgtgcggaccccgagcccggcagccaccagggacggagggcggggtgcctttctctgggctcatccgctgtcagccgtgggaactcttaactttatccagagggatctgtgcaggcgggggtgggagaggttctcctcccctggcggttacctccccctcccgggccgcccctcccccgcctcccatggcttcgctttcagagcatcctcactccgcccagttcggtgccagctgcgtgggctccagcttcgatcgttttccttggaatgctccaaaactcagcagcgactaagggaattccattggaatttgccgggcgtgctctcaccccgcacggcacccgcgccgtcagtcctcggatcccatcacttcagcccgaagattgcaactttgcagagacgaagaaatagcatggcatgaaacatggctcagttctattacaaaagaaatgttaatgctccctatagagaccgcatccctctaaggatagtaagagcagaatcagaactctcgccatcagaaaaagcctacttgaatgctgtggaaaagggagattatgccagtgtcaagaaatccctagaggaagctgaaatttattttaaaatcaatattaattgcattgatcctctcggaagaactgctctcctcattgcaattgaaaatgagaacttggagctcatcgaactactcttaagctttaatgtctatgttggagatgctctattacatgctatcagaaaagaagtcgtcggagctgttgagctgttattgaaccacaaaaaacctagtggagaaaaacaggtgcctcctatactccttgataagcagttctctgaattcactccagacattacaccaatcattttggcagcccatacaaataattatgagataataaaactcttggttcagaaaggagtctcagtgcctcgaccccacgaggtccgctgtaactgtgtggaatgcgtgtccagttcagatgtggacagcctccgtcactcacgctccagactcaacatctacaaggccttggccagtccctctctcattgcactgtcaagcgaagatccttttctcacagcctttcagttaagttgggaacttcaggaactgagcaaggtggaaaatgaattcaagtcggagtatgaagagctgtcacggcagtgcaaacaatttgctaaggacctactggatcagacgagaagttccagagaactggaaatcattcttaattaccgagatgacaatagtctcatagaagaacaaagtggaaatgatcttgcaagactaaaattggccattaagtaccgtcaaaaagagtttgttgcccagcccaattgtcaacagctgctggcatctcgctggtacgatgagtttccaggctggaggagaagacactgggcagtgaagatggtgacatgtttcataataggacttctttttcctgtcttctctgtgtgctacctgatagctcccaaaagcccacttggactgttcatcaggaagccatttatcaagtttatctgccacacagcctcctatttgacttttttgttcctgctgctgcttgcctctcagcacatcgacaggtcagacttgaacaggcaaggtccaccaccaaccatcgtcgagtggatgatattaccgtgggtcctgggcttcatatggggagaaattaaacagatgtgggatggcggacttcaggactacatccatgattggtggaatctaatggactttgtaatgaactccttatatttagcaacaatctccttgaaaattgttgcatttgtaaagtacagtgcccttaatccacgagaatcatgggacatgtggcatcccactctggtggcagaggctttatttgctattgcaaacatcttcagttctctgcgtctgatctcactgtttactgcaaattctcacctgggacctctgcaaatatctctgggaagaatgctcctggacattttgaagtttctattcatatactgccttgtgttgctagcatttgcaaatggcctaaatcaattgtacttctattatgaagaaacgaaagggttaacctgcaaaggcataagatgtgaaaagcagaataatgcattttcaacgttatttgagacactgcagtccctgttttggtcaatatttgggctcatcaatttatatgtgaccaatgtcaaagcacagcatgaatttactgagtttgttggtgccaccatgtttgggacatacaatgtcatctctctggttgttctactcaacatgttaatagctatgatgaataattcttaccaactgattgctgaccatgcagatatagaatggaaatttgcacgaacaaagctttggatgagttattttgaagaaggaggtactctgcctactcccttcaatgtcatcccgagccccaagtctctctggtacctgatcaaatggatctggacacacttgtgcaagaaaaagatgagaagaaagccagaaagttttggaacaatagggaggcgagctgctgataacttgagaagacatcaccaataccaagaagttatgaggaacctggtgaagcgatacgttgctgcaatgattagagatgctaaaactgaagaaggcctgaccgaagagaactttaaggaactaaagcaagacatttctagtttccgctttgaagtcctgggattactaagaggaagcaaactttccacaatacaatctgcgaatgcctcgaaggagtcttcaaattcggcagactcagatgaaaagagtgatagcgaaggtaatagcaaggacaagaaaaagaatttcagcctttttgatttaaccaccctgattcatccgagatcagcagcaattgcctctgaaagacataacataagcaatggctctgccctggtggttcaggagccgcccagggagaagcagagaaaagtgaattttgtgaccgatatcaaaaactttgggttatttcatagacgatcaaaacaaaatgctgctgagcaaaatgcaaaccaaatcttctctgtttcagaagaagttgctcgtcaacaggctgcaggaccacttgagagaaatattcaactggaatctcgaggattagcttcacggggtgacctgagcattcccggtctcagtgaacaatgtgtgttagtagaccatagagaaaggaatacggacacactggggttacaggtaggaaagagagtgtgtccattcaagtcagagaaggtggtggtggaggacacggttcctataataccaaaggagaaacatgcaaaagaagaggactctagtatagactatgatctaaacctcccagacacagtcacccacgaagattacgtgaccacaagattgtgatacttgaaggaggaagcgtttaccatacacatacgtattttccgtagtgctctgggtgggggaaaatgtttaaattgtattagcaaatgctaacttacactttatagcgtttatcagctgtggcatattacctgtaacatgtttaaataaggcaaaggcaatcaaaaacctttttgttttgtagcctgcttttgctttcacaatttgtcttacaattgtttttgttaataaataaatgcaccttgtattcttgtactgttgcaataa

SEQ ID NO: 192744 - DNA, 2709 bp, Homo sapiens
  Payload ID: 18048
  Gene Name: transient receptor potential cation channel, subfamily C, member 4
  ENST ID: ENST00000426868
  CDS Start-End: 157-1539
tgctccaaaactcagcagcgactaagggaattccattggaatttgccgggcgtgctctcaccccgcacggcacccgcgccgtcagtcctcggatcccatcacttcagcccgaagattgcaactttgcagagacgaagaaatagcatggcatgaaacatggctcagttctattacaaaagaaatgttaatgctccctatagagaccgcatccctctaaggatagtaagagcagaatcagaactctcgccatcagaaaaagcctacttgaatgctgtggaaaagggagattatgccagtgtcaagaaatccctagaggaagctgaaatttattttaaaatcaatattaattgcattgatcctctcggaagaactgctctcctcattgcaattgaaaatgagaacttggagctcatcgaactactcttaagctttaatgtctatgttggagatgctctattacatgctatcagaaaagaagtcgtcggagctgttgagctgttattgaaccacaaaaaacctagtggagaaaaacaggtgcctcctatactccttgataagcagttctctgaattcactccagacattacaccaatcattttggcagcccatacaaataattatgagataataaaactcttggttcagaaaggagtctcagtgcctcgaccccacgaggtccgctgtaactgtgtggaatgcgtgtccagttcagatgtggacagcctccgtcactcacgctccagactcaacatctacaaggccttggccagtccctctctcattgcactgtcaagcgaagatccttttctcacagcctttcagttaagttgggaacttcaggaactgagcaaggtggaaaatgaattcaagtcggagtatgaagagctgtcacggcagtgcaaacaatttgctaaggacctactggatcagacgagaagttccagagaactggaaatcattcttaattaccgagatgacaatagtctcatagaagaacaaagtggaaatgatcttgcaagactaaaattggccattaagtaccgtcaaaaagagtttgttgcccagcccaattgtcaacagctgctggcatctcgctggtacgatgagtttccaggctggaggagaagacactgggcagtgaagatggtgacatgtttcataataggacttctttttcctgtcttctctgtgtgctacctgatagctcccaaaagcccacttggactgttcatcaggaagccatttatcaagtttatctgccacacagcctcctatttgacttttttgttcctgctgctgcttgcctctcagcacatcgacaggtcagacttgaacaggcaaggtccaccaccaaccatcgtcgagtggatgatattaccgtgggtcctgggcttcatatggggagaaattaaacagatgtgggatggcggacttcaggactacatccatgattggtggaatctaatggactttgtaatgaactccttatatttagcaacaatctccttgaaaattgttgcatttgtaaaggttatttgagacactgcagtccctgttttggtcaatatttgggctcatcaatttatatgtgaccaatgtcaaagcacagcatgaatttactgagtttgttggtgccaccatgtttgggacatacaatgtcatctctctggttgttctactcaacatgttaatagctatgatgaataattcttaccaactgattgctgaccatgcagatatagaatggaaatttgcacgaacaaagctttggatgagttattttgaagaaggaggtactctgcctactcccttcaatgtcatcccgagccccaagtctctctggtacctgatcaaatggatctggacacacttgtgcaagaaaaagatgagaagaaagccagaaagttttggaacaatagggaggcgagctgctgataacttgagaagacatcaccaataccaagtaagttgtccttgtactatgtcttgaaattttcactaaaataaaatgcagtccccccttcagaactgactcaggaggaaatttatttactcattgagtatcaatactcttgttctaaaatgcctcaggaagttatgaggaacctggtgaagcgatacgttgctgcaatgattagagatgctaaaactgaagaaggcctgaccgaagagaactttaaggaactaaagcaagacatttctagtttccgctttgaagtcctgggattactaagaggaagcaaactttccacaatacaatctgcgaatgcctcgaaggagtcttcaaattcggcagactcagatgaaaagagtgatagcgaagaagttgctcgtcaacaggctgcaggaccacttgagagaaatattcaactggaatctcgaggattagcttcacggggtgacctgagcattcccggtctcagtgaacaatgtgtgttagtagaccatagagaaaggaatacggacacactggggttacaggtaggaaagagagtgtgtccattcaagtcagagaaggtggtggtggaggacacggttcctataataccaaaggagaaacatgcaaaagaagaggactctagtatagactatgatctaaacctcccagacacagtcacccacgaagattacgtgaccacaagattgtgatacttgaaggaggaagcgtttaccatacacatacgtattttccgtagtgctctgggtggg

SEQ ID NO: 192745 - DNA, 2657 bp, Homo sapiens
  Payload ID: 18048
  Gene Name: transient receptor potential cation channel, subfamily C, member 4
  Uniprot ID: Q9UBN4
  ENST ID: ENST00000488717
  CDS Start-End: 1-972
atggctcagttctattacaaaagaaatgttaatgctccctatagagaccgcatccctctaaggatagtaagagcagaatcagaactctcgccatcagaaaaagcctacttgaatgctgtggaaaagggagattatgccagtgtcaagaaatccctagaggaagctgaaatttattttaaaatcaatattaattgcattgatcctctcggaagaactgctctcctcattgcaattgaaaatgagaacttggagctcatcgaactactcttaagctttaatgtctatgttggagatgctctattacatgctatcagaaaagaagtcgtcggagctgttgagctgttattgaaccacaaaaaacctagtggagaaaaacaggtgcctcctatactccttgataagcagttctctgaattcactccagacattacaccaatcattttggcagcccatacaaataattatgagataataaaactcttggttcagaaaggagtctcagtgcctcgaccccacgaggtccgctgtaactgtgtggaatgcgtgtccagttcagatgtggacagcctccgtcactcacgctccagactcaacatctacaaggccttggccagtccctctctcattgcactgtcaagcgaagatccttttctcacagcctttcagttaagttgggaacttcaggaactgagcaaggtggaaaatgaattcaagtcggagtatgaagagctgtcacggcagtgcaaacaatttgctaaggacctactggatcagacgagaagttccagagaactggaaatcattcttaattaccgagatgacaatagtctcatagaagaacaaagtggaaatgatcttgcaagactaaaattggccattaagtaccgtcaaaaagaggcttcatatggggagaaattaaacagatgtgggatggcggacttcaggactacatccatgattggtggaatctaatggactttgtaatgaactccttatatttagcaacaatctccttgaaaattgttgcatttgtaaagtacagtgcccttaatccacgagaatcatgggacatgtggcatcccactctggtggcagaggctttatttgctattgcaaacatcttcagttctctgcgtctgatctcactgtttactgcaaattctcacctgggacctctgcaaatatctctgggaagaatgctcctggacattttgaagtttctattcatatactgccttgtgttgctagcatttgcaaatggcctaaatcaattgtacttctattatgaagaaacgaaagggttaacctgcaaaggcataagatgtgaaaagcagaataatgcattttcaacgttatttgagacactgcagtccctgttttggtcaatatttgggctcatcaatttatatgtgaccaatgtcaaagcacagcatgaatttactgagtttgttggtgccaccatgtttgggacatacaatgtcatctctctggttgttctactcaacatgttaatagctatgatgaataattcttaccaactgattgctgaccatgcagatatagaatggaaatttgcacgaacaaagctttggatgagttattttgaagaaggaggtactctgcctactcccttcaatgtcatcccgagccccaagtctctctggtacctgatcaaatggatctggacacacttgtgcaagaaaaagatgagaagaaagccagaaagttttggaacaatagggaggcgagctgctgataacttgagaagacatcaccaataccaagaagttatgaggaacctggtgaagcgatacgttgctgcaatgattagagatgctaaaactgaagaaggcctgaccgaagagaactttaaggaactaaagcaagacatttctagtttccgctttgaagtcctgggattactaagaggaagcaaactttccacaatacaatctgcgaatgcctcgaaggagtcttcaaattcggcagactcagatgaaaagagtgatagcgaaggtaatagcaaggacaagaaaaagaatttcagcctttttgatttaaccaccctgattcatccgagatcagcagcaattgcctctgaaagacataacataagcaatggctctgccctggtggttcaggagccgcccagggagaagcagagaaaagtgaattttgtgaccgatatcaaaaactttgggttatttcatagacgatcaaaacaaaatgctgctgagcaaaatgcaaaccaaatcttctctgtttcagaagaagttgctcgtcaacaggctgcaggaccacttgagagaaatattcaactggaatctcgaggattagcttcacggggtgacctgagcattcccggtctcagtgaacaatgtgtgttagtagaccatagagaaaggaatacggacacactggggttacaggtaggaaagagagtgtgtccattcaagtcagagaaggtggtggtggaggacacggttcctataataccaaaggagaaacatgcaaaagaagaggactctagtatagactatgatctaaacctcccagacacagtcacccacgaagattacgtgaccacaagattgtgatacttgaaggaggaagcgtttaccatacacatacgtattttccgtagtgctctgggtggg

SEQ ID NO: 192746 - DNA, 3009 bp, Homo sapiens
  Payload ID: 18048
  Gene Name: transient receptor potential cation channel, subfamily C, member 4
  Uniprot ID: Q9UBN4
  ENST ID: ENST00000625583
  CDS Start-End: 1-2949
atggctcagttctattacaaaagaaatgttaatgctccctatagagaccgcatccctctaaggatagtaagagcagaatcagaactctcgccatcagaaaaagcctacttgaatgctgtggaaaagggagattatgccagtgtcaagaaatccctagaggaagctgaaatttattttaaaatcaatattaattgcattgatcctctcggaagaactgctctcctcattgcaattgaaaatgagaacttggagctcatcgaactactcttaagctttaatgtctatgttggagatgctctattacatgctatcagaaaagaagtcgtcggagctgttgagctgttattgaaccacaaaaaacctagtggagaaaaacaggtgcctcctatactccttgataagcagttctctgaattcactccagacattacaccaatcattttggcagcccatacaaataattatgagataataaaactcttggttcagaaaggagtctcagtgcctcgaccccacgaggtccgctgtaactgtgtggaatgcgtgtccagttcagatgtggacagcctccgtcactcacgctccagactcaacatctacaaggccttggccagtccctctctcattgcactgtcaagcgaagatccttttctcacagcctttcagttaagttgggaacttcaggaactgagcaaggtggaaaatgaattcaagtcggagtatgaagagctgtcacggcagtgcaaacaatttgctaaggacctactggatcagacgagaagttccagagaactggaaatcattcttaattaccgagatgacaatagtctcatagaagaacaaagtggaaatgatcttgcaagactaaaattggccattaagtaccgtcaaaaagagtttgttgcccagcccaattgtcaacagctgctggcatctcgctggtacgatgagtttccaggctggaggagaagacactgggcagtgaagatggtgacatgtttcataataggacttctttttcctgtcttctctgtgtgctacctgatagctcccaaaagcccacttggactgttcatcaggaagccatttatcaagtttatctgccacacagcctcctatttgacttttttgttcctgctgctgcttgcctctcagcacatcgacaggtcagacttgaacaggcaaggtccaccaccaaccatcgtcgagtggatgatattaccgtgggtcctgggcttcatatggggagaaattaaacagatgtgggatggcggacttcaggactacatccatgattggtggaatctaatggactttgtaatgaactccttatatttagcaacaatctccttgaaaattgttgcatttgtaaagtacagtgcccttaatccacgagaatcatgggacatgtggcatcccactctggtggcagaggctttatttgctattgcaaacatcttcagttctctgcgtctgatctcactgtttactgcaaattctcacctgggacctctgcaaatatctctgggaagaatgctcctggacattttgaagtttctattcatatactgccttgtgttgctagcatttgcaaatggcctaaatcaattgtacttctattatgaagaaacgaaagggttaacctgcaaaggcataagatgtgaaaagcagaataatgcattttcaacgttatttgagacactgcagtccctgttttggtcaatatttgggctcatcaatttatatgtgaccaatgtcaaagcacagcatgaatttactgagtttgttggtgccaccatgtttgggacatacaatgtcatctctctggttgttctactcaacatgttaatagctatgatgaataattcttaccaactgattgctgaccatgcagatatagaatggaaatttgcacgaacaaagctttggatgagttattttgaagaaggaggtactctgcctactcccttcaatgtcatcccgagccccaagtctctctggtacctgatcaaatggatctggacacacttgtgcaagaaaaagatgagaagaaagccagaaagttttggaacaataggggtaagaacacagcataggcgagctgctgataacttgagaagacatcaccaataccaagaagttatgaggaacctggtgaagcgatacgttgctgcaatgattagagatgctaaaactgaagaaggcctgaccgaagagaactttaaggaactaaagcaagacatttctagtttccgctttgaagtcctgggattactaagaggaagcaaactttccacaatacaatctgcgaatgcctcgaaggagtcttcaaattcggcagactcagatgaaaagagtgatagcgaaggtaatagcaaggacaagaaaaagaatttcagcctttttgatttaaccaccctgattcatccgagatcagcagcaattgcctctgaaagacataacataagcaatggctctgccctggtggttcaggagccgcccagggagaagcagagaaaagtgaattttgtgaccgatatcaaaaactttgggttatttcatagacgatcaaaacaaaatgctgctgagcaaaatgcaaaccaaatcttctctgtttcagaagaagttgctcgtcaacaggctgcaggaccacttgagagaaatattcaactggaatctcgaggattagcttcacggggtgacctgagcattcccggtctcagtgaacaatgtgtgttagtagaccatagagaaaggaatacggacacactggggttacaggtaggaaagagagtgtgtccattcaagtcagagaaggtggtggtggaggacacggttcctataataccaaaggagaaacatgcaaaagaagaggactctagtatagactatgatctaaacctcccagacacagtcacccacgaagattacgtgaccacaagattgtgatacttgaaggaggaagcgtttaccatacacatacgtattttccgtagtgctctgggtggg

SEQ ID NO: 192747 - DNA, 3226 bp, Homo sapiens
  Payload ID: 18049
  Gene Name: transient receptor potential cation channel, subfamily C, member 4 associated protein
  Uniprot ID: Q8TEL6
  ENST ID: ENST00000252015
  CDS Start-End: 91-2484
actgggggcgctgcggcgacccctccgccgccccgtagaaatctccgcggccccgaggccgcttgcttcctgtttgtccgacgaggagacatggcggcggcgccggtagcggctgggtctggagccggccgagggagacggtcggcagccacagtggcggcttggggcggatggggcggccggccgcggcctggtaacattctgctgcagctgcggcagggccagctgaccggccggggcctggtccgggcggtgcagttcactgagacttttttgacggagagggacaaacaatccaagtggagtggaattcctcagctgctcctcaagctgcacaccaccagccacctccacagtgactttgttgagtgtcaaaacatcctcaaggaaatttctcctcttctctccatggaggctatggcatttgttactgaagagaggaaacttacccaagaaaccacttatccaaatacttacatttttgacttgtttggaggtgttgatcttcttgtagaaattcttatgaggcctacgatctctatccggggacagaaactgaaaataagtgatgaaatgtccaaggactgcttgagtatcctgtataatacctgtgtctgtacagagggagttacaaagcgtttggcagaaaagaatgactttgtgatcttcctgtttacattgatgacaagtaagaagacattcttacaaacagcaaccctcattgaagatattttgggtgttaaaaaggaaatgatccgactagatgaagtccccaatctgagttccttagtatccaatttcgatcagcagcagctcgctaatttctgccggattctggctgtcaccatttcagagatggatacagggaatgatgacaagcacacgcttcttgccaaaaatgctcaacagaagaagagcttgagtttggggccttctgcagctgaaatcaatcaagcggcccttctcagcattcctggctttgttgagcggctttgcaaactggcgactcgaaaggtgtcagagtcaacgggcacagccagcttccttcaggagttggaagagtggtacacatggctagacaatgctttggtgctagatgccctgatgcgagtggccaatgaggagtcagagcacaatcaagcctccattgtgttccctcctccaggggcttctgaggagaatggcctgcctcacacgtcagccagaacccagctgccccagtcaatgaagattatgcatgagatcatgtacaaactggaagtgctctatgtcctctgcgtgctgctgatggggcgtcagcgaaaccaggttcacagaatgattgcagagttcaagctgatccctggacttaataatttgtttgacaaactgatttggaggaagcattcagcatctgcccttgtcctccatggtcacaaccagaactgtgactgtagcccggacatcaccttgaagatacagtttttgaggcttcttcagagcttcagtgaccaccacgagaacaagtacttgttactcaacaaccaggagctgaatgaactcagtgccatctctctcaaggccaacatccctgaggtggaagctgtcctcaacaccgacaggagtttggtgtgtgatgggaagaggggcttattaactcgtctgctgcaggtcatgaagaaggagccagcagagtcgtctttcaggttttggcaagctcgggctgtggagagtttcctccgagggaccacctcctatgcagaccagatgttcctgctgaagcgaggcctcttggagcacatcctttactgcattgtggacagcgagtgtaagtcaagggatgtgctccagagttactttgacctcctgggggagctgatgaagttcaacgttgatgcattcaagagattcaataaatatatcaacaccgatgcaaagttccaggtattcctgaagcagatcaacagctccctggtggactccaacatgctggtgcgctgtgtcactctgtccctggaccgatttgaaaaccaggtggatatgaaagttgccgaggtactgtctgaatgccgcctgctcgcctacatatcccaggtgcccacgcagatgtccttcctcttccgcctcatcaacatcatccacgtgcagacgctgacccaggagaacgtcagctgcctcaacaccagcctggtgatcctgatgctggcccgacggaaagagcggctgcccctgtacctgcggctgctgcagcggatggagcacagcaagaagtaccccggcttcctgctcaacaacttccacaacctgctgcgcttctggcagcagcactacctgcacaaggacaaggacagcacctgcctagagaacagctcctgcatcagcttctcatactggaaggagacagtgtccatcctgttgaacccggaccggcagtcaccctctgctctcgttagctacattgaggagccctacatggacatagacagggacttcactgaggagtgaccttgggccaggcctcgggaggctgctgggccagtgtgggtgagcgtgggtacgatgccacacgccctgccctgttcccgttcctccctgctgctctctgcctgccccaggtctttgggtacaggcttggtgggagggaagtcctagaagcccttggtccccctgggtctgagggccctaggtcatggagagcctcagtccccataatgaggacagggtaccatgcccacctttccttcagaaccctggggcccagggccacccagaggtaagaggacatttagcattagctctgtgtgagctcctgccggtttcttggctgtcagtcagtcccagagtggggaggaagatatgggtgacccccaccccccatctgtgagccaagcctcccttgtccctggcctttggacccaggcaaaggcttctgagccctgggcaggggtggtgggtaccagagaatgctgccttcccccaagcctgcccctctgcctcattttcctgtagctcctctggttctgtttgctcattggccgctgtgttcatccaagggggttctcccagaagtgaggggcctttccctccatcccttggggcacggggcagctgtgcctgccctgcctctgcctgaggcagccgctcctgcctgagcctggacatggggcccttccttgtgttgccaatttattaacagcaaataaaccaattaaatggagactattaaataactttattttaaaaatga

SEQ ID NO: 192748 - DNA, 3138 bp, Homo sapiens
  Payload ID: 18049
  Gene Name: transient receptor potential cation channel, subfamily C, member 4 associated protein
  Uniprot ID: Q8TEL6
  ENST ID: ENST00000451813
  CDS Start-End: 27-2396
gcttcctgtttgtccgacgaggagacatggcggcggcgccggtagcggctgggtctggagccggccgagggagacggtcggcagccacagtggcggcttggggcggatggggcggccggccgcggcctggtaacattctgctgcagctgcggcagggccagctgaccggccggggcctggtccgggcggtgcagttcactgagacttttttgacggagagggacaaacaatccaagtggagtggaattcctcagctgctcctcaagctgcacaccaccagccacctccacagtgactttgttgagtgtcaaaacatcctcaaggaaatttctcctcttctctccatggaggctatggcatttgttactgaagagaggaaacttacccaagaaaccacttatccaaatacttacatttttgacttgtttggaggtgttgatcttcttgtagaaattcttatgaggcctacgatctctatccggggacagaaactgaaaataagtgatgaaatgtccaaggactgcttgagtatcctgtataatacctgtgtctgtacagagggagttacaaagcgtttggcagaaaagaatgactttgtgatcttcctgtttacattgatgacaagtaagaagacattcttacaaacagcaaccctcattgaagatattttgggtgttaaaaaggaaatgatccgactagatgaagtccccaatctgagttccttagtatccaatttcgatcagcagcagctcgctaatttctgccggattctggctgtcaccatttcagagatggatacagggaatgatgacaagcacacgcttcttgccaaaaatgctcaacagaagaagagcttgagtttggggccttctgcagctgaaatcaatcaagcggcccttctcagcattcctggctttgttgagcggctttgcaaactggcgactcgaaaggtgtcagagtcaacgggcacagccagcttccttcaggagttggaagagtggtacacatggctagacaatgctttggtgctagatgccctgatgcgagtggccaatgaggagtcagagcacaatcaaggggcttctgaggagaatggcctgcctcacacgtcagccagaacccagctgccccagtcaatgaagattatgcatgagatcatgtacaaactggaagtgctctatgtcctctgcgtgctgctgatggggcgtcagcgaaaccaggttcacagaatgattgcagagttcaagctgatccctggacttaataatttgtttgacaaactgatttggaggaagcattcagcatctgcccttgtcctccatggtcacaaccagaactgtgactgtagcccggacatcaccttgaagatacagtttttgaggcttcttcagagcttcagtgaccaccacgagaacaagtacttgttactcaacaaccaggagctgaatgaactcagtgccatctctctcaaggccaacatccctgaggtggaagctgtcctcaacaccgacaggagtttggtgtgtgatgggaagaggggcttattaactcgtctgctgcaggtcatgaagaaggagccagcagagtcgtctttcaggttttggcaagctcgggctgtggagagtttcctccgagggaccacctcctatgcagaccagatgttcctgctgaagcgaggcctcttggagcacatcctttactgcattgtggacagcgagtgtaagtcaagggatgtgctccagagttactttgacctcctgggggagctgatgaagttcaacgttgatgcattcaagagattcaataaatatatcaacaccgatgcaaagttccaggtattcctgaagcagatcaacagctccctggtggactccaacatgctggtgcgctgtgtcactctgtccctggaccgatttgaaaaccaggtggatatgaaagttgccgaggtactgtctgaatgccgcctgctcgcctacatatcccaggtgcccacgcagatgtccttcctcttccgcctcatcaacatcatccacgtgcagacgctgacccaggagaacgtcagctgcctcaacaccagcctggtgatcctgatgctggcccgacggaaagagcggctgcccctgtacctgcggctgctgcagcggatggagcacagcaagaagtaccccggcttcctgctcaacaacttccacaacctgctgcgcttctggcagcagcactacctgcacaaggacaaggacagcacctgcctagagaacagctcctgcatcagcttctcatactggaaggagacagtgtccatcctgttgaacccggaccggcagtcaccctctgctctcgttagctacattgaggagccctacatggacatagacagggacttcactgaggagtgaccttgggccaggcctcgggaggctgctgggccagtgtgggtgagcgtgggtacgatgccacacgccctgccctgttcccgttcctccctgctgctctctgcctgccccaggtctttgggtacaggcttggtgggagggaagtcctagaagcccttggtccccctgggtctgagggccctaggtcatggagagcctcagtccccataatgaggacagggtaccatgcccacctttccttcagaaccctggggcccagggccacccagaggtaagaggacatttagcattagctctgtgtgagctcctgccggtttcttggctgtcagtcagtcccagagtggggaggaagatatgggtgacccccaccccccatctgtgagccaagcctcccttgtccctggcctttggacccaggcaaaggcttctgagccctgggcaggggtggtgggtaccagagaatgctgccttcccccaagcctgcccctctgcctcattttcctgtagctcctctggttctgtttgctcattggccgctgtgttcatccaagggggttctcccagaagtgaggggcctttccctccatcccttggggcacggggcagctgtgcctgccctgcctctgcctgaggcagccgctcctgcctgagcctggacatggggcccttccttgtgttgccaatttattaacagcaaataaaccaattaaatggagactattaaataactttattttaaaaatga

SEQ ID NO: 192749 - DNA, 5839 bp, Homo sapiens
  Payload ID: 18050
  Gene Name: transient receptor potential cation channel, subfamily C, member 5
  Uniprot ID: Q9UL62
  ENST ID: ENST00000262839
  CDS Start-End: 920-3841
accccacatcacaaccacgacgggttgtccgcagctcgcagccaccccaaagggaggaataaagaacaggagcagagggaagccgggcgcagaaagaagggaaaaggaagagctcagggttggacatttttggagacaggggtggggaggataaagggagcgtgcctccttgattttcccctccccacccctctttgcttttctctccccttctctgtatagcatattccagaaacggcagcagaaggggacagaaacctctagtgtagaaaagggttttggaggggtagccagcgctcccgccagccgctacctaacagctggagcttgagtgtgcgtgtaagagtgtgaatgcggctctctctctttttttctctctctctcccctctctctccatcccttccttcctccctccttctccctctccttcacactacagtgtcagctacccctgtcagtttccccgtgtcagtttcttccctagctcttattgtgtgtgactggctgcgtgaagggagtgggtgcgcttgaaggggctcaggttgggttagagagctgggagaacagggtagggacattggtagagcaaagagtttcagggcactggcgaaggtgaaaggtgaggagggccgatctgttacaggcaagtttggcaataactgagcatccaaaggggaagccaaggtaggagccagtacttgcgctcgtctttacaccccgcccctttccctgtgctcatccgcccacccacccatcagcctagaggccccgggctgtcccagtcggctgctgtttcgcgccgcaaaagaggagtccggcaaggcgccgcaccacgcatcctggccggtggacatccagacgacacagattttatccgaaaaaaccacttggctcaggatttctgcattgctatgaaccatggcccaactgtactacaaaaaggtcaactactcaccgtacagagaccgcatccccctgcaaattgtgagggctgagacagagctctctgcagaggagaaggccttcctcaatgctgtggagaagggggactatgccactgtgaagcaggcccttcaggaggctgagatctactataatgttaacatcaactgcatggaccccttgggccggagtgccctgctcattgccattgagaacgagaacctggagatcatggagctactgctgaaccacagcgtgtatgtgggtgatgcattgctctatgccatacgcaaggaagtggtgggcgctgtggagcttctgctcagctacaggcggcccagcggagagaagcaggtccccactctgatgatggacacgcagttctctgaattcacaccggacatcactcccatcatgctggctgcccacaccaacaactacgaaatcatcaaattgcttgtccaaaaacgggtcactatcccacggccccaccagatccgctgcaactgtgtggagtgtgtgtctagttcagaggtagacagcctgcgccactctcgctcccgactgaacatctataaggctctggcaagcccctcactcattgccttatcaagtgaggaccccatcctaactgccttccgtctgggctgggagctcaaggagctcagcaaggtggagaatgagttcaaggccgagtatgaggagctctctcagcagtgcaagctctttgccaaagacctgctggaccaagctcggagctccagggaactggagatcatcctcaaccatcgagatgaccacagtgaagagcttgaccctcagaagtaccatgacctggccaagttgaaggtggcaatcaaataccaccagaaagagtttgttgctcagcccaactgccaacagttgcttgccaccctgtggtatgatggcttccctggatggcggcggaaacactgggtagtcaagcttctaacctgcatgaccattgggttcctgtttcccatgctgtctatagcctacctgatctcacccaggagcaaccttgggctgttcatcaagaaaccctttatcaagtttatctgccacacagcatcctatttgaccttcctctttatgcttctcctggcttctcagcacattgtcaggacagaccttcatgtacaggggcctcccccaactgtcgtggaatggatgatattgccttgggttctaggtttcatttggggtgagattaaggaaatgtgggatggtggatttactgaatacatccatgactggtggaacctgatggattttgcaatgaactccctctacctggcaactatttccctgaagattgtggcctatgtcaagtataatggttctcgtccaagggaggaatgggaaatgtggcacccgactctgattgcggaagcactcttcgcaatatccaacattttaagttcgttgcgtctcatatccctgttcacagccaactcccacttaggacctctgcagatctctttgggacgcatgctgcttgatatcctcaaattcctctttatctactgcctggtactactagcttttgccaatggactgaaccagctttacttctattatgaaaccagagctatcgatgagcctaacaactgcaaggggatccgatgtgagaaacagaacaatgccttctccacgctctttgagactcttcagtcactcttctggtctgtatttggccttttaaatctatatgtcaccaatgtgaaagccagacacgaattcaccgagtttgtaggagctaccatgtttggaacatacaatgtcatctccctggtagtgctgctgaacatgctgattgctatgatgaacaactcctatcagcttattgccgatcatgctgatatcgagtggaagtttgcaaggacgaagctctggatgagttactttgatgaaggtggcaccttgccacctcctttcaacatcatccccagccccaagtcatttctataccttggtaactggttcaacaacaccttctgccccaaaagagaccctgacggtagacggagaaggcgcaacttgagaagtttcacagaacgcaatgctgacagcctgatacaaaatcaacattatcaggaagttatcaggaatttagtcaaaagatatgtggctgctatgataagaaattccaaaacacatgagggacttacagaagaaaattttaaggaattaaagcaagacatctccagctttcggtatgaagtgcttgacctcttgggaaatagaaaacatccaaggagcttttccactagcagcactgaactgtctcagagagacgataataatgatggcagtggtggggctcgggccaaatccaagagtgtctcttttaatttaggctgcaagaaaaagacttgccatgggccacctctcatcagaaccatgccaaggtccagtggtgcccaaggaaagtcaaaagctgagtcatcaagcaaacgctccttcatgggtccttctctcaagaaactgggtctcctattctccaaatttaatggtcatatgtctgaacccagttcagagccaatgtacacaatttctgatggaattgttcagcagcactgtatgtggcaggacatcagatattctcagatggagaaagggaaagcagaggcctgttctcaaagtgaaattaacctcagtgaggtagaattaggtgaagtccagggcgctgctcagagcagtgaatgccctctagcctgttccagctctcttcactgtgcatccagcatctgctcctcaaattctaaacttttagactcctcagaggatgtatttgaaacttggggagaggcttgtgacttgctcatgcacaaatggggtgatggacaggaagaacaagttacaactcgcctctaagtcaagccctaatcatctgttctggaactcaacagaaatctgtaatttccttgctctcagaggtgacacagaatatgattccctcactgcccctgccccccagaaaggagagtgaaactcttatttgcaccatcttttatagccacattctccatttttgttcttgttttattattactttcattattatttgcctttttaatacctatacacactaagtccatcttacaaccgactgaaggggtgttgcacctaatcatcagaggtgcagttgggtgcttaacctttttgctttgcttttctcacccatgcttccttgaagccccaggtgccactttgctggtcttgttgccgcacagattcctgaccatcctcagaatctcatgccattttcccgcagagctgagggatgtggtcagcagtccccaccagctatcagataaggcaaactaccctgcccatctttgttgccattcagtgctacgcgctgcccatgctgggtcaatgaacagcatcaaagggaggctgaagagatttcaaagaattgtcagcttgtggtttctgggtataagtggcttgtttcgttcttaaatactacaacttcttattgtgggggctattgagttttcttgtttcttaaagatgtgttagtttcctaatgtgtgccaatgaaatatttaccccatagtatatgtcatatctaataagttaggcgaattatttttctgtttgtgtgtttcagttaacttactacatttgaaaatttgatagtatcaaaattagtatttagaatttgtgctattttttaaaaacatctactacactctaaccaatagtcactacatctcatacattggcaagataaatagttgtcatatttgttgggtcctattctactgttgatagttttaattatcattgctatcaaataatttctaagataaaagcctgaatttgaaatatttttatcagaaaaatggcatattgctgaagtgtcaaaatatgagaaaagagcatcttcattttaattaactgctttataaaaatggcaactttaggtatagataacctaattcaggttgcagttttaatattcattgggggcagtggaattgcatgtgtaaattatgttagatatatatcataacaaccctagtggattcatggaattataaacgtgatccaaattctactgtcttccaagaaagctacatttatacatccaaacaaattcttttccacagcttaagagtacctcatcagaatacagtggttcaagttaaaaaataaagtccataatgcatatggtcatcattctagacctgataaccactgagaacctgctgagcaaggacggcttttaccaacattagcacaaaggtttcctcagtttagactctaacatatgacctgaaacaactctaggtctgagtcctagagattacataaatagtgtgtagcccagaaaagtaaaataggtgtcacgctgttttttttaatgtcaacaccaataggaatccatttagattaatgtatgtaatttctgataaaagtaagagaaatgaggaactttcgaactgcaaatatgcctccaaactagcttttgataagtgtggtttctgttatttgaatggattcccatctttgtctctagcctggagaagagcaaaatggagggggaggggccagaaataggaggaggttttgaagaataaagcctcatatccaggaaaaagtgatcaagtgaaaaagctgcatcaagacccatttggcaagaggttgtccgaaaataattccttgatcatatctgaagtggttatttactcaaatcaatttctcccctgcttcgctaagactgtcataaaatggccttgacatttaatcacaggttactttccagaaaggtttctaaagttacagattcagcttttcaaattgtcaaattcactttgaataataatagaacctgggctacattcctaactcatattaacagca

SEQ ID NO: 192750 - DNA, 4612 bp, Homo sapiens
  Payload ID: 18051
  Gene Name: transient receptor potential cation channel, subfamily C, member 6
  Uniprot ID: Q9Y210
  ENST ID: ENST00000344327
  CDS Start-End: 426-3221
gggatcttgacggagagtgcgggggatgaaggcgggagctgagggctggagagtctctgttgacatagtaactcttcagctccgtctcccttgctctccgctcttacgcttcgctaccaccagcggccccgcctgtgccctctctgcccgggcgccccagacgcatcctcgcggggtctcctcggcctgacctgctcaggtcaagatcctctttgcacccccttaagtggtgacttttccccgggccagtgggcgagccacttgcggcgggcgtctgcaccccctgcttcaccgtcgtcccctgggcaccggtctgcccaggtccagttcggccgctgacgcgaaccctccgcaccgggtccccgctggaactgcccactcggctcccccgggagcggggcccaggccagtcgggcgttcccgccatgagccagagcccggcgttcgggccccggaggggcagttctccccggggcgctgccggagccgctgcgcggcgcaacgagagccaggactatctgctcatggactcggagctgggagaagacggctgcccgcaagccccgctgccttgctacggctactacccctgcttccggggatctgacaacagactggctcaccggcggcagacagttctccgtgagaaggggagaaggttagctaatcgaggaccagcatacatgtttagtgatcgctccacaagcctatctatagaggaggaacgctttttggatgcagctgaatatggtaacatcccagtggtgcggaagatgttagaagaatgccactcactcaacgttaactgtgtggattacatgggccagaatgccctacagttggcagtggccaatgagcatctggaaattacagaacttcttctcaagaaagaaaacctctctcgagttggggatgctttgcttctagctattagtaaaggttatgttcggattgtggaagcaattctcagtcatccggcttttgctgaaggcaagaggttagcaaccagccctagccagtctgaactccagcaagatgatttttatgcctatgatgaagatgggacacggttctcccatgatgtgactccaatcattctggctgcccactgccaggaatatgaaattgtgcataccctcctgcggaagggtgctaggattgaacggcctcatgattatttctgcaagtgcaatgactgcaaccagaaacagaagcatgactcgtttagccactccagatctaggattaatgcctataaaggcctggcaagtccggcttacctgtcattgtctagtgaagatccagtcatgacggctttagaacttagcaatgaactggcagttctggccaatattgagaaagagttcaagaatgactacaaaaaactgtcaatgcagtgcaaagactttgttgttggactccttgatctgtgcagaaacactgaagaagtcgaggccattctgaatggggatgttgaaacgctccagagtggtgatcacggtcgcccaaatctcagccgtttaaaacttgccattaaatatgaagtaaaaaaatttgtagctcatccaaactgccaacagcaacttctctccatttggtatgagaatctttctggtttacgacagcagacaatggcggtcaagttccttgtggtccttgctgttgccattggactgcccttcctggctctcatttactggtttgctccatgcagcaagatggggaagataatgcgtggaccattcatgaagtttgtagcacacgcagcctccttcaccatttttctgggactgctagtcatgaatgcagctgacagatttgaaggcacaaaactccttcctaatgaaaccagcacagataatgcaaaacagctgttcaggatgaaaacatcctgcttctcatggatggagatgctcattatatcctgggtaataggcatgatatgggctgaatgtaaagaaatctggactcagggccccaaggaatatttgtttgagttgtggaacatgcttgattttggtatgttagcaattttcgcagcatcattcattgcgagattcatggcattttggcatgcttccaaagcccagagcatcattgacgcaaatgatactttgaaggacttgacgaaagtaacattgggagacaatgtgaaatactacaatttggccaggataaagtgggacccctctgatcctcaaataatatctgaaggtctttatgcaattgctgtagttttaagtttctctaggatagcttatattttaccagcaaatgaaagctttggacctctgcagatatcacttggaagaacagtcaaagacatcttcaagttcatggtcatattcattatggtgtttgtggcctttatgattggaatgttcaatctctactcctactacattggtgcaaaacaaaatgaagccttcacaacagttgaagagagttttaagacactgttctgggctatatttggactttctgaagtgaaatcagtggtcatcaactataaccacaaattcattgaaaacattggttacgttctttatggagtctataatgttacgatggtcattgttttgctaaatatgttaattgccatgatcaacagttcattccaggaaattgaggatgacgctgatgtggagtggaaatttgcaagggccaaactctggttttcctactttgaggagggcagaacacttcctgtacccttcaatctggtgccgagtccaaagtccctgttttatctcttactgaagcttaaaaaatggatttctgagctgttccagggccataaaaaaggtttccaggaagatgcagagatgaacaagataaatgaagaaaagaaacttggaattttaggaagtcatgaagacctttcaaaattatcacttgacaaaaaacaggttgggcacaataaacaaccaagtataaggagctcagaagatttccatctaaatagtttcaataatcctccaagacaatatcagaaaataatgaaaaggctcattaaaagatatgtactgcaggcccagatagataaggagagtgatgaagtgaacgaaggggaactgaaggaaattaagcaggacatctcaagtctccgctatgaactccttgaagaaaaatctcagaatacagaagacctagcagaacttattagagaacttggagagaaattatccatggaaccaaatcaagaggaaaccaatagataatgcgaagacttccttagaaattcatatttatttgtccacttgaagccatattattttctgatttattttcttaagtgccaatgggcccaccttttaaacaagaaaacgttaaataacttgggccatcctatcatctggagccctagtatctaatttttttggtgattaaactccattgttcagggtaaaggctgtagataatgaggaaaattatgcccagttgtttggtgcttgttttataaactgctttcttggatataactaactcttgtgatgatgtcattgccatgtagtgtctgcctgaaaatgggtcccagcggacaggggctgacccacgttactccccatgcggtttttcctctgaagtttatttcaggttccttcttgcctgctctgtggatcccctgctggggactcccagctctgaaatttgggaaaaagtagcccatgggcctttagaatgctttaatcctttctttagaatgctgtttaaacaccatttaccctacttatccctcaatgcacatgattgataccgttcatacaaaatggtcttacatctatgtaaaattttctgattcatctatttgaaaacattacacttaacaatgaaaaaagtttttcctccactgaaccctggaaacatggtccagttttgtgtgtgtgcgtgtgtgtaaatgtgtacacacagacataaagtacttgccctagtttgtggctaatgtggacacacaaaagctctttatgttataaatttttattgtcactaaaaaattttactgtctaaataagtaccttttattggagaaaaatcaaaaccccaaacaaacactgtggttgtttggttccattatagcacaattttgtgccatttctgggagcatttacagatgaatccccacacttagccattgaatgtaaaggggaaaaataaggtgagaatttgtaaatacttatctgttattttcaatatgttctatccttctacccaaatatataaaacaggaatttgcattcatgtgcatttaccaagaggttgttgttgttacttactgatcatgtgaagtggtgtcttaaacaactaaaagcgatgaaggttcatatgtttactcaaagaccattggcattcagaggatgctggacattaactggaactgctacttccaattcaataatgggagatttcaaatgcaaatctttaacttcatcttaaagatgaaatggttgcagaaaatctgtttagctccaactttggcttaatttaaatcaaagaacatttatgtaaccagatcagaaaatacagctgaaaatttatattcagtgattttgtatttgtggatactacttatggaaaagttacttggtgatacataaagatcgattttcaaata

SEQ ID NO: 192751 - DNA, 2448 bp, Homo sapiens
  Payload ID: 18051
  Gene Name: transient receptor potential cation channel, subfamily C, member 6
  Uniprot ID: Q9Y210
  ENST ID: ENST00000348423
  CDS Start-End: 1-2448
atgagccagagcccggcgttcgggccccggaggggcagttctccccggggcgctgccggagccgctgcgcggcgcaacgagagccaggactatctgctcatggactcggagctgggagaagacggctgcccgcaagccccgctgccttgctacggctactacccctgcttccggggatctgacaacagactggctcaccggcggcagacagttctccgtgagaaggggagaaggttagctaatcgaggaccagcatacatgtttagtgatcgctccacaagcctatctatagaggaggaacgctttttggatgcagctgaatatggtaacatcccagtggtgcggaagatgttagaagaatgccactcactcaacgttaactgtgtggattacatgggccagaatgccctacagttggcagtggccaatgagcatctggaaattacagaacttcttctcaagaaagaaaacctctctcgagttggggatgctttgcttctagctattagtaaaggttatgttcggattgtggaagcaattctcagtcatccggcttttgctgaaggcaagaggttagcaaccagccctagccagtctgaactccagcaagatgatttttatgcctatgatgaagatgggacacggttctcccatgatgtgactccaatcattctggctgcccactgccaggaatatgaaattgtgcataccctcctgcggaagggtgctaggattgaacggcctcatgattatttctgcaagtgcaatgactgcaaccagaaacagaagcatgactcgtttagccactccagatctaggattaatgcctataaaggcctggcaagtccggcttacctgtcattgtctagtgaagatccagtcatgacggctttagaacttagcaatgaactggcagttctggccaatattgagaaagagttcaagatggggaagataatgcgtggaccattcatgaagtttgtagcacacgcagcctccttcaccatttttctgggactgctagtcatgaatgcagctgacagatttgaaggcacaaaactccttcctaatgaaaccagcacagataatgcaaaacagctgttcaggatgaaaacatcctgcttctcatggatggagatgctcattatatcctgggtaataggcatgatatgggctgaatgtaaagaaatctggactcagggccccaaggaatatttgtttgagttgtggaacatgcttgattttggtatgttagcaattttcgcagcatcattcattgcgagattcatggcattttggcatgcttccaaagcccagagcatcattgacgcaaatgatactttgaaggacttgacgaaagtaacattgggagacaatgtgaaatactacaatttggccaggataaagtgggacccctctgatcctcaaataatatctgaaggtctttatgcaattgctgtagttttaagtttctctaggatagcttatattttaccagcaaatgaaagctttggacctctgcagatatcacttggaagaacagtcaaagacatcttcaagttcatggtcatattcattatggtgtttgtggcctttatgattggaatgttcaatctctactcctactacattggtgcaaaacaaaatgaagccttcacaacagttgaagagagttttaagacactgttctgggctatatttggactttctgaagtgaaatcagtggtcatcaactataaccacaaattcattgaaaacattggttacgttctttatggagtctataatgttacgatggtcattgttttgctaaatatgttaattgccatgatcaacagttcattccaggaaattgaggatgacgctgatgtggagtggaaatttgcaagggccaaactctggttttcctactttgaggagggcagaacacttcctgtacccttcaatctggtgccgagtccaaagtccctgttttatctcttactgaagcttaaaaaatggatttctgagctgttccagggccataaaaaaggtttccaggaagatgcagagatgaacaagataaatgaagaaaagaaacttggaattttaggaagtcatgaagacctttcaaaattatcacttgacaaaaaacaggttgggcacaataaacaaccaagtataaggagctcagaagatttccatctaaatagtttcaataatcctccaagacaatatcagaaaataatgaaaaggctcattaaaagatatgtactgcaggcccagatagataaggagagtgatgaagtgaacgaaggggaactgaaggaaattaagcaggacatctcaagtctccgctatgaactccttgaagaaaaatctcagaatacagaagacctagcagaacttattagagaacttggagagaaattatccatggaaccaaatcaagaggaaaccaatagataa

SEQ ID NO: 192752 - DNA, 2631 bp, Homo sapiens
  Payload ID: 18051
  Gene Name: transient receptor potential cation channel, subfamily C, member 6
  Uniprot ID: Q9Y210
  ENST ID: ENST00000360497
  CDS Start-End: 1-2631
atgagccagagcccggcgttcgggccccggaggggcagttctccccggggcgctgccggagccgctgcgcggcgcaacgagagccaggactatctgctcatggactcggagctgggagaagacggctgcccgcaagccccgctgccttgctacggctactacccctgcttccggggatctgacaacagactggctcaccggcggcagacagttctccgtgagaaggggagaaggttagctaatcgaggaccagcatacatgtttagtgatcgctccacaagcctatctatagaggaggaacgctttttggatgcagctgaatatggtaacatcccagtggtgcggaagatgttagaagaatgccactcactcaacgttaactgtgtggattacatgggccagaatgccctacagttggcagtggccaatgagcatctggaaattacagaacttcttctcaagaaagaaaacctctctcgagttggggatgctttgcttctagctattagtaaaggttatgttcggattgtggaagcaattctcagtcatccggcttttgctgaaggcaagaggttagcaaccagccctagccagtctgaactccagcaagatgatttttatgcctatgatgaagatgggacacggttctcccatgatgtgactccaatcattctggctgcccactgccaggaatatgaaattgtgcataccctcctgcggaagggtgctaggattgaacggcctcatgattatttctgcaagtgcaatgactgcaaccagaaacagaagcatgactcgtttagccactccagatctaggattaatgcctataaaggcctggcaagtccggcttacctgtcattgtctagtgaagatccagtcatgacggctttagaacttagcaatgaactggcagttctggccaatattgagaaagagttcaagaatgactacaaaaaactgtcaatgcagtgcaaagactttgttgttggactccttgatctgtgcagaaacactgaagaagtcgaggccattctgaatggggatgttgaaacgctccagagtggtgatcacggtcgcccaaatctcagccgtttaaaacttgccattaaatatgaagtaaaaaaaatggggaagataatgcgtggaccattcatgaagtttgtagcacacgcagcctccttcaccatttttctgggactgctagtcatgaatgcagctgacagatttgaaggcacaaaactccttcctaatgaaaccagcacagataatgcaaaacagctgttcaggatgaaaacatcctgcttctcatggatggagatgctcattatatcctgggtaataggcatgatatgggctgaatgtaaagaaatctggactcagggccccaaggaatatttgtttgagttgtggaacatgcttgattttggtatgttagcaattttcgcagcatcattcattgcgagattcatggcattttggcatgcttccaaagcccagagcatcattgacgcaaatgatactttgaaggacttgacgaaagtaacattgggagacaatgtgaaatactacaatttggccaggataaagtgggacccctctgatcctcaaataatatctgaaggtctttatgcaattgctgtagttttaagtttctctaggatagcttatattttaccagcaaatgaaagctttggacctctgcagatatcacttggaagaacagtcaaagacatcttcaagttcatggtcatattcattatggtgtttgtggcctttatgattggaatgttcaatctctactcctactacattggtgcaaaacaaaatgaagccttcacaacagttgaagagagttttaagacactgttctgggctatatttggactttctgaagtgaaatcagtggtcatcaactataaccacaaattcattgaaaacattggttacgttctttatggagtctataatgttacgatggtcattgttttgctaaatatgttaattgccatgatcaacagttcattccaggaaattgaggatgacgctgatgtggagtggaaatttgcaagggccaaactctggttttcctactttgaggagggcagaacacttcctgtacccttcaatctggtgccgagtccaaagtccctgttttatctcttactgaagcttaaaaaatggatttctgagctgttccagggccataaaaaaggtttccaggaagatgcagagatgaacaagataaatgaagaaaagaaacttggaattttaggaagtcatgaagacctttcaaaattatcacttgacaaaaaacaggttgggcacaataaacaaccaagtataaggagctcagaagatttccatctaaatagtttcaataatcctccaagacaatatcagaaaataatgaaaaggctcattaaaagatatgtactgcaggcccagatagataaggagagtgatgaagtgaacgaaggggaactgaaggaaattaagcaggacatctcaagtctccgctatgaactccttgaagaaaaatctcagaatacagaagacctagcagaacttattagagaacttggagagaaattatccatggaaccaaatcaagaggaaaccaatagataa

SEQ ID NO: 192753 - DNA, 2648 bp, Homo sapiens
  Payload ID: 18051
  Gene Name: transient receptor potential cation channel, subfamily C, member 6
  ENST ID: ENST00000532133
  CDS Start-End: 4-2565
gccatgagccagagcccggcgttcgggccccggaggggcagttctccccggggcgctgccggagccgctgcgcggcgcaacgagagccaggactatctgctcatggactcggagctgggagaagacggctgcccgcaagccccgctgccttgctacggctactacccctgcttccggggatctgacaacagactggctcaccggcggcagacagttctccgtgagaaggggagaaggttagctaatcgaggaccagcatacatgtttagtgatcgctccacaagcctatctatagaggaggaacgctttttggatgcagctgaatatggtaacatcccagtggtgcggaagatgttagaagaatgccactcactcaacgttaactgtgtggattacatgggccagaatgccctacagttggcagtggccaatgagcatctggaaattacagaacttcttctcaagaaagaaaacctctctcgagttggggatgctttgcttctagctattagtaaaggttatgttcggattgtggaagcaattctcagtcatccggcttttgctgaaggcaagaggttagcaaccagccctagccagtctgaactccagcaagatgatttttatgcctatgatgaagatgggacacggttctcccatgatgtgactccaatcattctggctgcccactgccaggaatatgaaattgtgcataccctcctgcggaagggtgctaggattgaacggcctcatgattatttctgcaagtgcaatgactgcaaccagaaacagaagcatgactcgtttagccactccagatctaggattaatgcctataaaggcctggcaagtccggcttacctgtcattgtctagtgaagatccagtcatgacggctttagaacttagcaatgaactggcagttctggccaatattgagaaagagttcaagaatgactacaaaaaactgtcaatgcagtgcaaagactttgttgttggactccttgatctgtgcagaaacactgaagaagtcgaggccattctgaatggggatgttgaaacgctccagagtggtgatcacggtcgcccaaatctcagccgtttaaaacttgccattaaatatgaagtaaaaaaatttgtagctcatccaaactgccaacagcaacttctctccatttggtatgagaatctttctggtttacgacagcagacaatggcggtcaagttccttgtggtccttgctgttgccattggactgcccttcctggctctcatttactggtttgctccatgcagcaagatggggaagataatgcgtggaccattcatgaagtttgtagcacacgcagcctccttcaccatttttctgggactgctagtcatgaatgcagctgacagatttgaaggcacaaaactccttcctaatgaaaccagcacagataatgcaaaacagctgttcaggatgaaaacatcctgcttctcatggatggagatgctcattatatcctgggtaatagccaggataaagtgggacccctctgatcctcaaataatatctgaaggtctttatgcaattgctgtagttttaagtttctctaggatagcttatattttaccagcaaatgaaagctttggacctctgcagatatcacttggaagaacagtcaaagacatcttcaagttcatggtcatattcattatggtgtttgtggcctttatgattggaatgttcaatctctactcctactacattggtgcaaaacaaaatgaagccttcacaacagttgaagagagttttaagacactgttctgggctatatttggactttctgaagtgaaatcagtggtcatcaactataaccacaaattcattgaaaacattggttacgttctttatggagtctataatgttacgatggtcattgttttgctaaatatgttaattgccatgatcaacagttcattccaggaaattgaggatgacgctgatgtggagtggaaatttgcaagggccaaactctggttttcctactttgaggagggcagaacacttcctgtacccttcaatctggtgccgagtccaaagtccctgttttatctcttactgaagcttaaaaaatggatttctgagctgttccagggccataaaaaaggtttccaggaagatgcagagatgaacaagataaatgaagaaaagaaacttggaattttaggaagtcatgaagacctttcaaaattatcacttgacaaaaaacaggttgggcacaataaacaaccaagtataaggagctcagaagatttccatctaaatagtttcaataatcctccaagacaatatcagaaaataatgaaaaggctcattaaaagatatgtactgcaggcccagatagataaggagagtgatgaagtgaacgaaggggaactgaaggaaattaagcaggacatctcaagtctccgctatgaactccttgaagaaaaatctcagaatacagaagacctagcagaacttattagagaacttggagagaaattatccatggaaccaaatcaagaggaaaccaatagataatgcgaagacttccttagaaattcatatttatttgtccacttgaagccatattattttctgatttattttcttaagtgccaatg

SEQ ID NO: 192754 - DNA, 2241 bp, Homo sapiens
  Payload ID: 18052
  Gene Name: transient receptor potential cation channel, subfamily C, member 7
  Uniprot ID: Q9HCX4
  ENST ID: ENST00000352189
  CDS Start-End: 1-2241
atgttgaggaacagcaccttcaaaaacatgcagcgccggcacacaacgctgagggagaagggccgtcgccaggccatccggggtcccgcctacatgttcaacgagaagggcaccagtctgacgcccgaggaggagcgcttcctggactcggctgagtatggcaacatcccggtggtccggaaaatgctggaggagtccaagacccttaacttcaactgtgtggactacatggggcagaacgctctgcagctggccgtgggcaacgagcacctagaggtcacggagctgctgctgaagaaggagaacctggcacgggtgggggacgcgctgctgctggccatcagcaagggctatgtgcgcatcgtggaggccatcctcaaccacccggccttcgcgcagggccagcgcctgacgctcagcccgctggaacaggagctgcgcgacgacgacttctatgcctacgacgaggacggcacgcgcttctcccacgacatcacgcccatcatcctggcggcgcactgccaggagtatgagatcgtgcacatcctgctgctcaagggcgcccgcatcgagcggccccacgactacttctgcaagtgcaatgagtgcaccgagaaacagcggaaagactccttcagccactcgcgctcgcgcatgaacgcctacaaaggactggcgagtgctgcctacttgtccctgtccagcgaagaccctgtcctcaccgccctggagctcagcaacgagttagccagactagccaacattgagactgaatttaagctaggacgaaccctgaggagccctttcatgaagtttgtagctcatgcagtttcttttacaatcttcttgggattattagttgtgaatgcatctgaccgatttgaaggtgttaaaaccctgccaaacgaaaccttcacagactacccaaaacaaatcttcagagtgaaaaccacacagttctcctggacagaaatgctcattatgaagtgggtcttaggaatgatttggtccgaatgcaaggaaatctgggaggaggggccacgggagtacgtgctgcacttgtggaacctgctagatttcgggatgctgtccatcttcgtggcctccttcacagcacgcttcatggccttcctgaaggccacggaggcacagctgtacgtggaccagcacgtgcaggacgacacgctgcacaatgtctcgcttccgccggaagtggcatacttcacctacgccagggacaagtggtggccttcagaccctcagatcatatcggaagggctctacgcgatagccgtcgtgctgagcttctctcgcattgcatacattctgccagccaacgagagttttgggcccctgcagatctcgctagggagaactgtgaaagatatcttcaagttcatggtcattttcatcatggtatttgtggccttcatgattgggatgttcaacctgtactcttactaccgaggtgccaaatacaacccagcgtttacaacggttgaagaaagttttaaaactttgttttggtccatattcggcttatctgaagtaatctcagtggtgctgaaatacgaccacaaattcatcgagaacattggctacgttctctacggcgtttataacgtcaccatggtggtagtgttgctcaacatgctaatagccatgataaacaactcctatcaggaaattgaggaggatgcagatgtggaatggaagttcgcccgagcaaaactctggctgtcttactttgatgaaggaagaactctacctgctccttttaatctagtgccaagtcctaaatcattttattatctcataatgagaatcaagatgtgcctcataaaactctgcaaatctaaggccaaaagctgtgaaaatgaccttgaaatgggcatgctgaattccaaattcaagaagactcgctaccaggctggcatgaggaattctgaaaatctgacagcaaataacactttgagcaagcccaccagataccagaaaatcatgaaacggctcataaaaagatacgtcctgaaagcccaggtggacagagaaaatgacgaagtcaatgaaggcgagctgaaggaaatcaagcaagatatctccagcctgcgctatgagcttcttgaggaaaaatctcaagctactggtgagctggcagacctgattcaacaactcagcgagaagtttggaaagaacttaaacaaagaccacctgagggtgaacaagggcaaagacatttag

SEQ ID NO: 192755 - DNA, 2406 bp, Homo sapiens
  Payload ID: 18052
  Gene Name: transient receptor potential cation channel, subfamily C, member 7
  Uniprot ID: Q9HCX4
  ENST ID: ENST00000378459
  CDS Start-End: 1-2406
atgttgaggaacagcaccttcaaaaacatgcagcgccggcacacaacgctgagggagaagggccgtcgccaggccatccggggtcccgcctacatgttcaacgagaagggcaccagtctgacgcccgaggaggagcgcttcctggactcggctgagtatggcaacatcccggtggtccggaaaatgctggaggagtccaagacccttaacttcaactgtgtggactacatggggcagaacgctctgcagctggccgtgggcaacgagcacctagaggtcacggagctgctgctgaagaaggagaacctggcacgggtgggggacgcgctgctgctggccatcagcaagggctatgtgcgcatcgtggaggccatcctcaaccacccggccttcgcgcagggccagcgcctgacgctcagcccgctggaacaggagctgcgcgacgacgacttctatgcctacgacgaggacggcacgcgcttctcccacgacatcacgcccatcatcctggcggcgcactgccaggagtatgagatcgtgcacatcctgctgctcaagggcgcccgcatcgagcggccccacgactacttctgcaagtgcaatgagtgcaccgagaaacagcggaaagactccttcagccactcgcgctcgcgcatgaacgcctacaaaggactggcgagtgctgcctacttgtccctgtccagcgaagaccctgtcctcaccgccctggagctcagcaacgagttagccagactagccaacattgagactgaatttaagttcgttgctcatcctaactgtcagcagcaattgcttaccatgtggtatgaaaatctctcaggcttacgtcaacagtctatcgctgtgaaattcctggctgtctttggagtctccataggcctcccttttctcgccatagcctattggattgctccgtgcagcaagctaggacgaaccctgaggagccctttcatgaagtttgtagctcatgcagtttcttttacaatcttcttgggattattagttgtgaatgcatctgaccgatttgaaggtgttaaaaccctgccaaacgaaaccttcacagactacccaaaacaaatcttcagagtgaaaaccacacagttctcctggacagaaatgctcattatgaagtgggtcttaggaatgatttggtccgaatgcaaggaaatctgggaggaggggccacgggagtacgtgctgcacttgtggaacctgctagatttcgggatgctgtccatcttcgtggcctccttcacagcacgcttcatggccttcctgaaggccacggaggcacagctgtacgtggaccagcacgtgcaggacgacacgctgcacaatgtctcgcttccgccggaagtggcatacttcacctacgccagggacaagtggtggccttcagaccctcagatcatatcggaagggctctacgcgatagccgtcgtgctgagcttctctcgcattgcatacattctgccagccaacgagagttttgggcccctgcagatctcgctagggagaactgtgaaagatatcttcaagttcatggtcattttcatcatggtatttgtggccttcatgattgggatgttcaacctgtactcttactaccgaggtgccaaatacaacccagcgtttacaacggttgaagaaagttttaaaactttgttttggtccatattcggcttatctgaagtaatctcagtggtgctgaaatacgaccacaaattcatcgagaacattggctacgttctctacggcgtttataacgtcaccatggtggtagtgttgctcaacatgctaatagccatgataaacaactcctatcaggaaattgaggaggatgcagatgtggaatggaagttcgcccgagcaaaactctggctgtcttactttgatgaaggaagaactctacctgctccttttaatctagtgccaagtcctaaatcattttattatctcataatgagaatcaagatgtgcctcataaaactctgcaaatctaaggccaaaagctgtgaaaatgaccttgaaatgggcatgctgaattccaaattcaagaagactcgctaccaggctggcatgaggaattctgaaaatctgacagcaaataacactttgagcaagcccaccagataccagaaaatcatgaaacggctcataaaaagatacgtcctgaaagcccaggtggacagagaaaatgacgaagtcaatgaaggcgagctgaaggaaatcaagcaagatatctccagcctgcgctatgagcttcttgaggaaaaatctcaagctactggtgagctggcagacctgattcaacaactcagcgagaagtttggaaagaacttaaacaaagaccacctgagggtgaacaagggcaaagacatttag

SEQ ID NO: 192756 - DNA, 2605 bp, Homo sapiens
  Payload ID: 18052
  Gene Name: transient receptor potential cation channel, subfamily C, member 7
  ENST ID: ENST00000503275
  CDS Start-End: 1-1143
atgttgaggaacagcaccttcaaaaacatgcagcgccggcacacaacgctgagggagaagggccgtcgccaggccatccggggtcccgcctacatgttcaacgagaagggcaccagtctgacgcccgaggaggagcgcttcctggactcggctgagtatggcaacatcccggtggtccggaaaatgctggaggagtccaagacccttaacttcaactgtgtggactacatggggcagaacgctctgcagctggccgtgggcaacgagcacctagaggtcacggagctgctgctgaagaaggagaacctggcacgggtgggggacgcgctgctgctggccatcagcaagggctatgtgcgcatcgtggaggccatcctcaaccacccggccttcgcgcagggccagcgcctgacgctcagcccgctggaacaggagctgcgcgacgacgacttctatgcctacgacgaggacggcacgcgcttctcccacgacatcacgcccatcatcctggcggcgcactgccaggagtatgagatcgtgcacatcctgctgctcaagggcgcccgcatcgagcggccccacgactacttctgcaagtgcaatgagtgcaccgagaaacagcggaaagactccttcagccactcgcgctcgcgcatgaacgcctacaaaggactggcgagtgctgcctacttgtccctgtccagcgaagaccctgtcctcaccgccctggagctcagcaacgagttagccagactagccaacattgagactgaatttaagaacgattacaggaagttatctatgcaatgcaaggattttgtagtgggcgtgctggacctgtgccgagacacagaagaggtggaagcaattttaaacggtgatgtgaacttccaagtctggtccgaccaccaccgtccaagtctgagccggatcaaactcgccattaaatatgaagtcaagaagttcgttgctcatcctaactgtcagcagcaattgcttaccatgtggtatgaaaatctctcaggcttacgtcaacagtctatcgctgtgaaattcctggctgtctttggagtctccataggcctcccttttctcgccatagcctattggattgctccgtgcagcaaggtacagactgcttaagctaggacgaaccctgaggagccctttcatgaagtttgtagctcatgcagtttcttttacaatcttcttgggattattagttgtgaatgcatctgaccgatttgaaggtgttaaaaccctgccaaacgaaaccttcacagactacccaaaacaaatcttcagagtgaaaaccacacagttctcctggacagaaatgctcattatgaagtgggtcttaggaatgatttggtccgaatgcaaggaaatctgggaggaggggccacgggagtacgtgctgcacttgtggaacctgctagatttcgggatgctgtccatcttcgtggcctccttcacagcacgcttcatggccttcctgaaggccacggaggcacagctgtacgtggaccagcacgtgcaggacgacacgctgcacaatgtctcgcttccgccggaagtggcatacttcacctacgccagggacaagtggtggccttcagaccctcagatcatatcggaagggctctacgcgatagccgtcgtgctgagcttctctcgcattgcatacattctgccagccaacgagagttttgggcccctgcagatctcgctagggagaactgtgaaagatatcttcaagttcatggtcattttcatcatggtatttgtggccttcatgattgggatgttcaacctgtactcttactaccgaggtgccaaatacaacccagcgtttacaacggttgaagaaagttttaaaactttgttttggtccatattcggcttatctgaagtaatctcagtggtgctgaaatacgaccacaaattcatcgagaacattggctacgttctctacggcgtttataacgtcaccatggtggtagtgttgctcaacatgctaatagccatgataaacaactcctatcaggaaattgaggaggatgcagatgtggaatggaagttcgcccgagcaaaactctggctgtcttactttgatgaaggaagaactctacctgctccttttaatctagtgccaagtcctaaatcattttattatctcataatgagaatcaagatgtgcctcataaaactctgcaaatctaaggccaaaagctgtgaaaatgaccttgaaatgggcatgctgaattccaaattcaagaagactcgctaccaggctggcatgaggaattctgaaaatctgacagcaaataacactttgagcaagcccaccagataccagaaaatcatgaaacggctcataaaaagatacgtcctgaaagcccaggtggacagagaaaatgacgaagtcaatgaaggcgagctgaaggaaatcaagcaagatatctccagcctgcgctatgagcttcttgaggaaaaatctcaagctactggtgagctggcagacctgattcaacaactcagcgagaagtttggaaagaacttaaacaaagaccacctgagggtgaacaagggcaaagacatttag

SEQ ID NO: 192757 - DNA, 2424 bp, Homo sapiens
  Payload ID: 18052
  Gene Name: transient receptor potential cation channel, subfamily C, member 7
  ENST ID: ENST00000502753
  CDS Start-End: 1-2424
atgttgaggaacagcaccttcaaaaacatgcagcgccggcacacaacgctgagggagaagggccgtcgccaggccatccggggtcccgcctacatgttcaacgagaagggcaccagtctgacgcccgaggaggagcgcttcctggactcggctgagtatggcaacatcccggtggtccggaaaatgctggaggagtccaagacccttaacttcaactgtgtggactacatggggcagaacgctctgcagctggccgtgggcaacgagcacctagaggtcacggagctgctgctgaagaaggagaacctggcacgggtgggggacgcgctgctgctggccatcagcaagggctatgtgcgcatcgtggaggccatcctcaaccacccggccttcgcgcagggccagcgcctgacgctcagcccgctggaacaggagctgcgcgacgacgacttctatgcctacgacgaggacggcacgcgcttctcccacgacatcacgcccatcatcctggcggcgcactgccaggagtatgagatcgtgcacatcctgctgctcaagggcgcccgcatcgagcggccccacgactacttctgcaagtgcaatgagtgcaccgagaaacagcggaaagactccttcagccactcgcgctcgcgcatgaacgcctacaaaggactggcgagtgctgcctacttgtccctgtccagcgaagaccctgtcctcaccgccctggagctcagcaacgagttagccagactagccaacattgagactgaatttaagaacgattacaggaagttatctatgcaatgcaaggattttgtagtgggcgtgctggacctgtgccgagacacagaagaggtggaagcaattttaaacggtgatgtgaacttccaagtctggtccgaccaccaccgtccaagtctgagccggatcaaactcgccattaaatatgaagtcaagaagctaggacgaaccctgaggagccctttcatgaagtttgtagctcatgcagtttcttttacaatcttcttgggattattagttgtgaatgcatctgaccgatttgaaggtgttaaaaccctgccaaacgaaaccttcacagactacccaaaacaaatcttcagagtgaaaaccacacagttctcctggacagaaatgctcattatgaagtgggtcttaggaatgatttggtccgaatgcaaggaaatctgggaggaggggccacgggagtacgtgctgcacttgtggaacctgctagatttcgggatgctgtccatcttcgtggcctccttcacagcacgcttcatggccttcctgaaggccacggaggcacagctgtacgtggaccagcacgtgcaggacgacacgctgcacaatgtctcgcttccgccggaagtggcatacttcacctacgccagggacaagtggtggccttcagaccctcagatcatatcggaagggctctacgcgatagccgtcgtgctgagcttctctcgcattgcatacattctgccagccaacgagagttttgggcccctgcagatctcgctagggagaactgtgaaagatatcttcaagttcatggtcattttcatcatggtatttgtggccttcatgattgggatgttcaacctgtactcttactaccgaggtgccaaatacaacccagcgtttacaacggttgaagaaagttttaaaactttgttttggtccatattcggcttatctgaagtaatctcagtggtgctgaaatacgaccacaaattcatcgagaacattggctacgttctctacggcgtttataacgtcaccatggtggtagtgttgctcaacatgctaatagccatgataaacaactcctatcaggaaattgaggaggatgcagatgtggaatggaagttcgcccgagcaaaactctggctgtcttactttgatgaaggaagaactctacctgctccttttaatctagtgccaagtcctaaatcattttattatctcataatgagaatcaagatgtgcctcataaaactctgcaaatctaaggccaaaagctgtgaaaatgaccttgaaatgggcatgctgaattccaaattcaagaagactcgctaccaggctggcatgaggaattctgaaaatctgacagcaaataacactttgagcaagcccaccagataccagaaaatcatgaaacggctcataaaaagatacgtcctgaaagcccaggtggacagagaaaatgacgaagtcaatgaaggcgagctgaaggaaatcaagcaagatatctccagcctgcgctatgagcttcttgaggaaaaatctcaagctactggtgagctggcagacctgattcaacaactcagcgagaagtttggaaagaacttaaacaaagaccacctgagggtgaacaagggcaaagacatttag

SEQ ID NO: 192758 - DNA, 2987 bp, Homo sapiens
  Payload ID: 18052
  Gene Name: transient receptor potential cation channel, subfamily C, member 7
  Uniprot ID: Q9HCX4
  ENST ID: ENST00000513104
  CDS Start-End: 284-2872
acagatgcttctccgtcatgttctctgggaaatttccccccgattaggaaaaggacggtaacacggttctgcctcggaaggcgagtttttaccactgcaacacaaagaacagaggagcgcgctttcacatcgttgcaacttaactcacttgaccagctctatacttcagcaccacggagagcggtacatccttggctaccacccatggggagccagcttctggcgactcaacaccggattccggtcatctagaggaggaacaagcctgcgtattacaccctcaatgttgaggaacagcaccttcaaaaacatgcagcgccggcacacaacgctgagggagaagggccgtcgccaggccatccggggtcccgcctacatgttcaacgagaagggcaccagtctgacgcccgaggaggagcgcttcctggactcggctgagtatggcaacatcccggtggtccggaaaatgctggaggagtccaagacccttaacttcaactgtgtggactacatggggcagaacgctctgcagctggccgtgggcaacgagcacctagaggtcacggagctgctgctgaagaaggagaacctggcacgggtgggggacgcgctgctgctggccatcagcaagggctatgtgcgcatcgtggaggccatcctcaaccacccggccttcgcgcagggccagcgcctgacgctcagcccgctggaacaggagctgcgcgacgacgacttctatgcctacgacgaggacggcacgcgcttctcccacgacatcacgcccatcatcctggcggcgcactgccaggagtatgagatcgtgcacatcctgctgctcaagggcgcccgcatcgagcggccccacgactacttctgcaagtgcaatgagtgcaccgagaaacagcggaaagactccttcagccactcgcgctcgcgcatgaacgcctacaaaggactggcgagtgctgcctacttgtccctgtccagcgaagaccctgtcctcaccgccctggagctcagcaacgagttagccagactagccaacattgagactgaatttaagaacgattacaggaagttatctatgcaatgcaaggattttgtagtgggcgtgctggacctgtgccgagacacagaagaggtggaagcaattttaaacggtgatgtgaacttccaagtctggtccgaccaccaccgtccaagtctgagccggatcaaactcgccattaaatatgaagtcaagaagttcgttgctcatcctaactgtcagcagcaattgcttaccatgtggtatgaaaatctctcaggcttacgtcaacagtctatcgctgtgaaattcctggctgtctttggagtctccataggcctcccttttctcgccatagcctattggattgctccgtgcagcaagctaggacgaaccctgaggagccctttcatgaagtttgtagctcatgcagtttcttttacaatcttcttgggattattagttgtgaatgcatctgaccgatttgaaggtgttaaaaccctgccaaacgaaaccttcacagactacccaaaacaaatcttcagagtgaaaaccacacagttctcctggacagaaatgctcattatgaagtgggtcttaggaatgatttggtccgaatgcaaggaaatctgggaggaggggccacgggagtacgtgctgcacttgtggaacctgctagatttcgggatgctgtccatcttcgtggcctccttcacagcacgcttcatggccttcctgaaggccacggaggcacagctgtacgtggaccagcacgtgcaggacgacacgctgcacaatgtctcgcttccgccggaagtggcatacttcacctacgccagggacaagtggtggccttcagaccctcagatcatatcggaagggctctacgcgatagccgtcgtgctgagcttctctcgcattgcatacattctgccagccaacgagagttttgggcccctgcagatctcgctagggagaactgtgaaagatatcttcaagttcatggtcattttcatcatggtatttgtggccttcatgattgggatgttcaacctgtactcttactaccgaggtgccaaatacaacccagcgtttacaacggttgaagaaagttttaaaactttgttttggtccatattcggcttatctgaagtaatctcagtggtgctgaaatacgaccacaaattcatcgagaacattggctacgttctctacggcgtttataacgtcaccatggtggtagtgttgctcaacatgctaatagccatgataaacaactcctatcaggaaattgaggaggatgcagatgtggaatggaagttcgcccgagcaaaactctggctgtcttactttgatgaaggaagaactctacctgctccttttaatctagtgccaagtcctaaatcattttattatctcataatgagaatcaagatgtgcctcataaaactctgcaaatctaaggccaaaagctgtgaaaatgaccttgaaatgggcatgctgaattccaaattcaagaagactcgctaccaggctggcatgaggaattctgaaaatctgacagcaaataacactttgagcaagcccaccagataccagaaaatcatgaaacggctcataaaaagatacgtcctgaaagcccaggtggacagagaaaatgacgaagtcaatgaaggcgagctgaaggaaatcaagcaagatatctccagcctgcgctatgagcttcttgaggaaaaatctcaagctactggtgagctggcagacctgattcaacaactcagcgagaagtttggaaagaacttaaacaaagaccacctgagggtgaacaagggcaaagacatttagcagcccacatcggcgtctgtgacttctaccagcattccaaggccaggttggatgccctcgcccccatccttggtggggaggggtccccagcccactcctctaggacacgaagggg

SEQ ID NO: 192759 - DNA, 2024 bp, Homo sapiens
  Payload ID: 18052
  Gene Name: transient receptor potential cation channel, subfamily C, member 7
  ENST ID: ENST00000514963
  CDS Start-End: 1-786
atgttgaggaacagcaccttcaaaaacatgcagcgccggcacacaacgctgagggagaagggccgtcgccaggccatccggggtcccgcctacatgttcaacgagaagggcaccagtctgacgcccgaggaggagcgcttcctggactcggctgagtatggcaacatcccggtggtccggaaaatgctggaggagtccaagacccttaacttcaactgtgtggactacatggggcagaacgctctgcagctggccgtgggcaacgagcacctagaggtcacggagctgctgctgaagaaggagaacctggcacgggtgggggacgcgctgctgctggccatcagcaagggctatgtgcgcatcgtggaggccatcctcaaccacccggccttcgcgcagggccagcgcctgacgctcagcccgctggaacaggagctgcgcgacgacgacttctatgcctacgacgaggacggcacgcgcttctcccacgacatcacgcccatcatcctggcggcgcactgccaggagtatgagatcgtgcacatcctgctgctcaagggcgcccgcatcgagcggccccacgactacttctgcaagtgcaatgagtgcaccgagaaacagcggaaagactccttcagccactcgcgctcgcgcatgaacgcctacaaaggactggcgagtgctgcctacttgtccctgtccagcgaagaccctgtcctcaccgccctggagctcagcaacgagttagccagactagccaacattgagactgaatttaaggaatgatttggtccgaatgcaaggaaatctgggaggaggggccacgggagtacgtgctgcacttgtggaacctgctagatttcgggatgctgtccatcttcgtggcctccttcacagcacgcttcatggccttcctgaaggccacggaggcacagctgtacgtggaccagcacgtgcaggacgacacgctgcacaatgtctcgcttccgccggaagtggcatacttcacctacgccagggacaagtggtggccttcagaccctcagatcatatcggaagggctctacgcgatagccgtcgtgctgagcttctctcgcattgcatacattctgccagccaacgagagttttgggcccctgcagatctcgctagggagaactgtgaaagatatcttcaagttcatggtcattttcatcatggtatttgtggccttcatgattgggatgttcaacctgtactcttactaccgaggtgccaaatacaacccagcgtttacaacggttgaagaaagttttaaaactttgttttggtccatattcggcttatctgaagtaatctcagtggtgctgaaatacgaccacaaattcatcgagaacattggctacgttctctacggcgtttataacgtcaccatggtggtagtgttgctcaacatgctaatagccatgataaacaactcctatcaggaaattgaggaggatgcagatgtggaatggaagttcgcccgagcaaaactctggctgtcttactttgatgaaggaagaactctacctgctccttttaatctagtgccaagtcctaaatcattttattatctcataatgagaatcaagatgtgcctcataaaactctgcaaatctaaggccaaaagctgtgaaaatgaccttgaaatgggcatgctgaattccaaattcaagaagactcgctaccaggctggcatgaggaattctgaaaatctgacagcaaataacactttgagcaagcccaccagataccagaaaatcatgaaacggctcataaaaagatacgtcctgaaagcccaggtggacagagaaaatgacgaagtcaatgaaggcgagctgaaggaaatcaagcaagatatctccagcctgcgctatgagcttcttgaggaaaaatctcaagctactggtgagctggcagacctgattcaacaactcagcgagaagtttggaaagaacttaaacaaagaccacctgagggtgaacaagggcaaagacatttag

SEQ ID NO: 192760 - DNA, 5514 bp, Homo sapiens
  Payload ID: 18053
  Gene Name: transient receptor potential cation channel, subfamily M, member 1
  Uniprot ID: Q7Z4N2
  ENST ID: ENST00000256552
  CDS Start-End: 149-5026
gccctggccaaggaggaggctgaaagagcctgagctgtgccctctccattccactgctgtggcaggttctagaagatttctgaggactcagcagtaacttgcagtgctggactgaggctatttccttatatcaactttttgaaaactcatgggtcagaaatcttggatagagaaaaccttttgcaaacgggaatgtatctttgtaattcctagcatgaaagactctaacaggtgttgctgtggccagttcaccaaccagcatatcccccctctgccaagtgcaacacccagcaaaaatgaagaggaaagcaaacaggtggagactcagcctgagaaatggtctgttgccaagcacacccagagctacccaacagattcctatggagttcttgaattccagggtggcggatattccaataaagccatgtatatccgtgtatcctatgacaccaagccagactcactgctccatctcatggtgaaagattggcagctggaactccccaagctcttaatatctgtgcatggaggcctccagaactttgagatgcagcccaagctgaaacaagtctttgggaaaggcctgatcaaggctgctatgaccaccggggcctggatcttcaccgggggtgtcagcacaggtgttatcagccacgtaggggatgccttgaaagaccactcctccaagtccagaggccgggtttgtgctataggaattgctccatggggcatcgtggagaataaggaagacctggttggaaaggatgtaacaagagtgtaccagaccatgtccaaccctctaagtaagctctctgtgctcaacaactcccacacccacttcatcctggctgacaatggcaccctgggcaagtatggcgccgaggtgaagctgcgaaggctgctggaaaagcacatctccctgcagaagatcaacacaagactggggcagggcgtgcccctcgtgggtctcgtggtggaggggggccctaacgtggtgtccatcgtcttggaatacctgcaagaagagcctcccatccctgtggtgatttgtgatggcagcggacgtgcctcggacatcctgtcctttgcgcacaagtactgtgaagaaggcggaataataaatgagtccctcagggagcagcttctagttaccattcagaaaacatttaattataataaggcacaatcacatcagctgtttgcaattataatggagtgcatgaagaagaaagaactcgtcactgtgttcagaatgggttctgagggccagcaggacatcgagatggcaattttaactgccctgctgaaaggaacaaacgtatctgctccagatcagctgagcttggcactggcttggaaccgcgtggacatagcacgaagccagatctttgtctttgggccccactggccgcccctgggaagcctggcacccccgacggacagcaaagccacggagaaggagaagaagccacccatggccaccaccaagggaggaagaggaaaagggaaaggcaagaagaaagggaaagtgaaagaggaagtggaggaagaaactgacccccggaagatagagctgctgaactgggtgaatgctttggagcaagcgatgctagatgctttagtcttagatcgtgtcgactttgtgaagctcctgattgaaaacggagtgaacatgcaacactttctgaccattccgaggctggaggagctttataacacaagactgggtccaccaaacacacttcatctgctggtgagggatgtgaaaaagagcaaccttccgcctgattaccacatcagcctcatagacatcgggctcgtgctggagtacctcatgggaggagcctaccgctgcaactacactcggaaaaactttcggaccctttacaacaacttgtttggaccaaagaggcctaaagctcttaaacttctgggaatggaagatgatgagcctccagctaaagggaagaaaaagaaaaagaagaaaaaggaggaagagatcgacattgatgtggacgaccctgccgtgagtcggttccagtatcccttccacgagctgatggtgtgggcagtgctgatgaaacgccagaaaatggcagtgttcctctggcagcgaggggaagagagcatggccaaggccctggtggcctgcaagctctacaaggccatggcccacgagtcctccgagagtgatctggtggatgacatctcccaggacttggataacaattccaaagacttcggccagcttgctttggagttattagaccagtcctataagcatgacgagcagatcgctatgaaactcctgacctacgagctgaaaaactggagcaactcgacctgcctcaaactggccgtggcagccaaacaccgggacttcattgctcacacctgcagccagatgctgctgaccgatatgtggatgggaagactgcggatgcggaagaaccccggcctgaaggttatcatggggattcttctaccccccaccatcttgtttttggaatttcgcacatatgatgatttctcgtatcaaacatccaaggaaaatgaggatggcaaagaaaaagaagaggaaaatacggatgcaaatgcagatgctggctcaagaaagggggatgaggagaacgagcacaaaaaacagagaagtattcccatcggaacaaagatctgtgaattctataacgcgcccattgtcaagttctggttttacacaatatcatacttgggctacctgctgctgtttaactacgtcatcctggtgcggatggatggctggccgtccctccaggagtggatcgtcatctcctacatcgtgagcctggcgttagagaagatacgagagatcctcatgtcagaaccaggcaaactcagccagaaaatcaaagtttggcttcaggagtactggaacatcacagatctcgtggccatttccacattcatgattggagcaattcttcgcctacagaaccagccctacatgggctatggccgggtgatctactgtgtggatatcatcttctggtacatccgtgtcctggacatctttggtgtcaacaagtatctggggccatacgtgatgatgattggaaagatgatgatcgacatgctgtactttgtggtcatcatgctggtcgtgctcatgagtttcggagtagcccgtcaagccattctgcatccagaggagaagccctcttggaaactggcccgaaacatcttctacatgccctactggatgatctatggagaggtgtttgcagaccagatagacctctacgccatggaaattaatcctccttgtggtgagaacctatatgatgaggagggcaagcggcttcctccctgtatccccggcgcctggctcactccagcactcatggcgtgctatctactggtcgccaacatcctgctggtgaacctgctgattgctgtgttcaacaataccttctttgaagtaaaatcaatatccaaccaggtgtggaagttccagcgatatcagctgattatgacatttcatgacaggccagtcctgcccccaccgatgatcattttaagccacatctacatcatcattatgcgtctcagcggccgctgcaggaaaaagagagaaggggaccaagaggaacgggatcgtggattgaagctcttccttagcgacgaggagctaaagaggctgcatgagttcgaggagcagtgcgtgcaggagcacttccgggagaaggaggatgagcagcagtcgtccagcgacgagcgcatccgggtcacttctgaaagagttgaaaatatgtcaatgaggttggaagaaatcaatgaaagagaaacttttatgaaaacttccctgcagactgttgaccttcgacttgctcagctagaagaattatctaacagaatggtgaatgctcttgaaaatcttgcgggaatcgacaggtctgacctgatccaggcacggtcccgggcttcttctgaatgtgaggcaacgtatcttctccggcaaagcagcatcaatagcgctgatggctacagcttgtatcgatatcattttaacggagaagagttattatttgaggatacatctctctccacgtcaccagggacaggagtcaggaaaaaaacctgttccttccgtataaaggaagagaaggacgtgaaaacgcacctagtcccagaatgtcagaacagtcttcacctttcactgggcacaagcacatcagcaaccccagatggcagtcaccttgcagtagatgacttaaagaacgctgaagagtcaaaattaggtccagatattgggatttcaaaggaagatgatgaaagacagacagactctaaaaaagaagaaactatttccccaagtttaaataaaacagatgtgatacatggacaggacaaatcagatgttcaaaacactcagctaacagtggaaacgacaaatatagaaggcactatttcctatcccctggaagaaaccaaaattacacgctatttccccgatgaaacgatcaatgcttgtaaaacaatgaagtccagaagcttcgtctattcccggggaagaaagctggtcggtggggttaaccaggatgtagagtacagttcaatcacggaccagcaattgacgacggaatggcaatgccaagttcaaaagatcacgcgctctcatagcacagatattccttacattgtgtcggaagctgcagtgcaagctgagcataaagagcagtttgcagatatgcaagatgaacaccatgtcgctgaagcaattcctcgaatccctcgcttgtccctaaccattactgacagaaatgggatggaaaacttactgtctgtgaagccagatcaaactttgggattcccatctctcaggtcaaaaagtttacatggacatcctaggaatgtgaaatccattcagggaaagttagacagatctggacatgccagtagtgtaagcagcttagtaattgtgtctggaatgacagcagaagaaaaaaaggttaagaaagagaaagcttccacagaaactgaatgctagtctgttttgtttctttaatttttttttttaacagtcagaaccactaatgggtgtcatcttggccatctaaacatcatcaatttctaaaaacattttccttaaaaaattttggaaattcagacttgatttacaatttaatgcactaaaagtagtattttgttagcatatgttagtaggcttagttttttcagttgcagtagtatcaaatgaaagtgatgatactgtaacgaagataaattggctaatcagtatacaagattatacaatctctttattactgagggccaccaaatagcctaggaagtgccctcgagcactgaagtcaccattaggtcacttaagaagtaagcaactagctgggcacagtggctcatgcctgtaatcctagcactttgggaggccaaggcagaaagatagcttgagtccaggagtttgagaccagcctgggcaacatagtgataccccatctcttaaaaaaaaaaaaaaaa

SEQ ID NO: 192761 - DNA, 5687 bp, Homo sapiens
  Payload ID: 18053
  Gene Name: transient receptor potential cation channel, subfamily M, member 1
  Uniprot ID: Q7Z4N2
  ENST ID: ENST00000397795
  CDS Start-End: 115-4926
ggaggctgaaagagcctgagctgtgccctctccattccactgctgtggcagggtcagaaatcttggatagagaaaaccttttgcaaacgggaatgtatctttgtaattcctagcatgaaagactctaacaggtgttgctgtggccagttcaccaaccagcatatcccccctctgccaagtgcaacacccagcaaaaatgaagaggaaagcaaacaggtggagactcagcctgagaaatggtctgttgccaagcacacccagagctacccaacagattcctatggagttcttgaattccagggtggcggatattccaataaagccatgtatatccgtgtatcctatgacaccaagccagactcactgctccatctcatggtgaaagattggcagctggaactccccaagctcttaatatctgtgcatggaggcctccagaactttgagatgcagcccaagctgaaacaagtctttgggaaaggcctgatcaaggctgctatgaccaccggggcctggatcttcaccgggggtgtcagcacaggtgttatcagccacgtaggggatgccttgaaagaccactcctccaagtccagaggccgggtttgtgctataggaattgctccatggggcatcgtggagaataaggaagacctggttggaaaggatgtaacaagagtgtaccagaccatgtccaaccctctaagtaagctctctgtgctcaacaactcccacacccacttcatcctggctgacaatggcaccctgggcaagtatggcgccgaggtgaagctgcgaaggctgctggaaaagcacatctccctgcagaagatcaacacaagactggggcagggcgtgcccctcgtgggtctcgtggtggaggggggccctaacgtggtgtccatcgtcttggaatacctgcaagaagagcctcccatccctgtggtgatttgtgatggcagcggacgtgcctcggacatcctgtcctttgcgcacaagtactgtgaagaaggcggaataataaatgagtccctcagggagcagcttctagttaccattcagaaaacatttaattataataaggcacaatcacatcagctgtttgcaattataatggagtgcatgaagaagaaagaactcgtcactgtgttcagaatgggttctgagggccagcaggacatcgagatggcaattttaactgccctgctgaaaggaacaaacgtatctgctccagatcagctgagcttggcactggcttggaaccgcgtggacatagcacgaagccagatctttgtctttgggccccactggccgcccctgggaagcctggcacccccgacggacagcaaagccacggagaaggagaagaagccacccatggccaccaccaagggaggaagaggaaaagggaaaggcaagaagaaagggaaagtgaaagaggaagtggaggaagaaactgacccccggaagatagagctgctgaactgggtgaatgctttggagcaagcgatgctagatgctttagtcttagatcgtgtcgactttgtgaagctcctgattgaaaacggagtgaacatgcaacactttctgaccattccgaggctggaggagctttataacacaagactgggtccaccaaacacacttcatctgctggtgagggatgtgaaaaagagcaaccttccgcctgattaccacatcagcctcatagacatcgggctcgtgctggagtacctcatgggaggagcctaccgctgcaactacactcggaaaaactttcggaccctttacaacaacttgtttggaccaaagaggcctaaagctcttaaacttctgggaatggaagatgatgagcctccagctaaagggaagaaaaagaaaaagaagaaaaaggaggaagagatcgacattgatgtggacgaccctgccgtgagtcggttccagtatcccttccacgagctgatggtgtgggcagtgctgatgaaacgccagaaaatggcagtgttcctctggcagcgaggggaagagagcatggccaaggccctggtggcctgcaagctctacaaggccatggcccacgagtcctccgagagtgatctggtggatgacatctcccaggacttggataacaattccaaagacttcggccagcttgctttggagttattagaccagtcctataagcatgacgagcagatcgctatgaaactcctgacctacgagctgaaaaactggagcaactcgacctgcctcaaactggccgtggcagccaaacaccgggacttcattgctcacacctgcagccagatgctgctgaccgatatgtggatgggaagactgcggatgcggaagaaccccggcctgaaggttatcatggggattcttctaccccccaccatcttgtttttggaatttcgcacatatgatgatttctcgtatcaaacatccaaggaaaatgaggatggcaaagaaaaagaagaggaaaatacggatgcaaatgcagatgctggctcaagaaagggggatgaggagaacgagcacaaaaaacagagaagtattcccatcggaacaaagatctgtgaattctataacgcgcccattgtcaagttctggttttacacaatatcatacttgggctacctgctgctgtttaactacgtcatcctggtgcggatggatggctggccgtccctccaggagtggatcgtcatctcctacatcgtgagcctggcgttagagaagatacgagagatcctcatgtcagaaccaggcaaactcagccagaaaatcaaagtttggcttcaggagtactggaacatcacagatctcgtggccatttccacattcatgattggagcaattcttcgcctacagaaccagccctacatgggctatggccgggtgatctactgtgtggatatcatcttctggtacatccgtgtcctggacatctttggtgtcaacaagtatctggggccatacgtgatgatgattggaaagatgatgatcgacatgctgtactttgtggtcatcatgctggtcgtgctcatgagtttcggagtagcccgtcaagccattctgcatccagaggagaagccctcttggaaactggcccgaaacatcttctacatgccctactggatgatctatggagaggtgtttgcagaccagatagacctctacgccatggaaattaatcctccttgtggtgagaacctatatgatgaggagggcaagcggcttcctccctgtatccccggcgcctggctcactccagcactcatggcgtgctatctactggtcgccaacatcctgctggtgaacctgctgattgctgtgttcaacaataccttctttgaagtaaaatcaatatccaaccaggtgtggaagttccagcgatatcagctgattatgacatttcatgacaggccagtcctgcccccaccgatgatcattttaagccacatctacatcatcattatgcgtctcagcggccgctgcaggaaaaagagagaaggggaccaagaggaacgggatcgtggattgaagctcttccttagcgacgaggagctaaagaggctgcatgagttcgaggagcagtgcgtgcaggagcacttccgggagaaggaggatgagcagcagtcgtccagcgacgagcgcatccgggtcacttctgaaagagttgaaaatatgtcaatgaggttggaagaaatcaatgaaagagaaacttttatgaaaacttccctgcagactgttgaccttcgacttgctcagctagaagaattatctaacagaatggtgaatgctcttgaaaatcttgcgggaatcgacaggtctgacctgatccaggcacggtcccgggcttcttctgaatgtgaggcaacgtatcttctccggcaaagcagcatcaatagcgctgatggctacagcttgtatcgatatcattttaacggagaagagttattatttgaggatacatctctctccacgtcaccagggacaggagtcaggaaaaaaacctgttccttccgtataaaggaagagaaggacgtgaaaacgcacctagtcccagaatgtcagaacagtcttcacctttcactgggcacaagcacatcagcaaccccagatggcagtcaccttgcagtagatgacttaaagaacgctgaagagtcaaaattaggtccagatattgggatttcaaaggaagatgatgaaagacagacagactctaaaaaagaagaaactatttccccaagtttaaataaaacagatgtgatacatggacaggacaaatcagatgttcaaaacactcagctaacagtggaaacgacaaatatagaaggcactatttcctatcccctggaagaaaccaaaattacacgctatttccccgatgaaacgatcaatgcttgtaaaacaatgaagtccagaagcttcgtctattcccggggaagaaagctggtcggtggggttaaccaggatgtagagtacagttcaatcacggaccagcaattgacgacggaatggcaatgccaagttcaaaagatcacgcgctctcatagcacagatattccttacattgtgtcggaagctgcagtgcaagctgagcataaagagcagtttgcagatatgcaagatgaacaccatgtcgctgaagcaattcctcgaatccctcgcttgtccctaaccattactgacagaaatgggatggaaaacttactgtctgtgaagccagatcaaactttgggattcccatctctcaggtcaaaaagtttacatggacatcctaggaatgtgaaatccattcagggaaagttagacagatctggacatgccagtagtgtaagcagcttagtaattgtgtctggaatgacagcagaagaaaaaaaggttaagaaagagaaagcttccacagaaactgaatgctagtctgttttgtttctttaatttttttttttaacagtcagaaccactaatgggtgtcatcttggccatctaaacatcatcaatttctaaaaacattttccttaaaaaattttggaaattcagacttgatttacaatttaatgcactaaaagtagtattttgttagcatatgttagtaggcttagttttttcagttgcagtagtatcaaatgaaagtgatgatactgtaacgaagataaattggctaatcagtatacaagattatacaatctctttattactgagggccaccaaatagcctaggaagtgccctcgagcactgaagtcaccattaggtcacttaagaagtaagcaactagctgggcacagtggctcatgcctgtaatcctagcactttgggaggccaaggcagaaagatagcttgagtccaggagtttgagaccagcctgggcaacatagtgataccccatctcttaaaaaaaaaaaaaaaagtaagcaactgtgtaagaaagagaaactaaagagaaagcaaacatgaaaaaagggaggggtggaaagaagaaaaataaaattgtgaggcacaataagtgggaaggagccacaaatatgtttttatggggtctttgttttctgttttaatgttttattttaaactacacaatgggaaaaaaagtacacaattatatcaaacatcatactctaataatttagggtgacctagagttttgttaatgtgcaaaaataaagtatccaatatgcatttt

SEQ ID NO: 192762 - DNA, 6004 bp, Homo sapiens
  Payload ID: 18053
  Gene Name: transient receptor potential cation channel, subfamily M, member 1
  Uniprot ID: Q7Z4N2
  ENST ID: ENST00000542188
  CDS Start-End: 315-5243
ctaaatctcttccctctaaaccttttggggatggagggattaagcctgattacagatgttgggggtggtagcaggagtcgggcaggaggggccaccaaaagccagcacatgctcctcctaggctgaaccagcctccggccggcctcgccccaggatctcggccccctcgcccagtgcgtggggctgccgccgagtgtggggctgccgccgagtgtgtggctccgctcctgcccacccagggagggcagcccctgtgccactggcctggccacccgagggagtcagcagggtggctcacaggctcactgagagagatgagctccttcaagcggggctcgctcaagagctccacatcagggtcgcagaagggtcagaaatcttggatagagaaaaccttttgcaaacgggaatgtatctttgtaattcctagcatgaaagactctaacaggtgttgctgtggccagttcaccaaccagcatatcccccctctgccaagtgcaacacccagcaaaaatgaagaggaaagcaaacaggtggagactcagcctgagaaatggtctgttgccaagcacacccagagctacccaacagattcctatggagttcttgaattccagggtggcggatattccaataaagccatgtatatccgtgtatcctatgacaccaagccagactcactgctccatctcatggtgaaagattggcagctggaactccccaagctcttaatatctgtgcatggaggcctccagaactttgagatgcagcccaagctgaaacaagtctttgggaaaggcctgatcaaggctgctatgaccaccggggcctggatcttcaccgggggtgtcagcacaggtgttatcagccacgtaggggatgccttgaaagaccactcctccaagtccagaggccgggtttgtgctataggaattgctccatggggcatcgtggagaataaggaagacctggttggaaaggatgtaacaagagtgtaccagaccatgtccaaccctctaagtaagctctctgtgctcaacaactcccacacccacttcatcctggctgacaatggcaccctgggcaagtatggcgccgaggtgaagctgcgaaggctgctggaaaagcacatctccctgcagaagatcaacacaagactggggcagggcgtgcccctcgtgggtctcgtggtggaggggggccctaacgtggtgtccatcgtcttggaatacctgcaagaagagcctcccatccctgtggtgatttgtgatggcagcggacgtgcctcggacatcctgtcctttgcgcacaagtactgtgaagaaggcggaataataaatgagtccctcagggagcagcttctagttaccattcagaaaacatttaattataataaggcacaatcacatcagctgtttgcaattataatggagtgcatgaagaagaaagaactcgtcactgtgttcagaatgggttctgagggccagcaggacatcgagatggcaattttaactgccctgctgaaaggaacaaacgtatctgctccagatcagctgagcttggcactggcttggaaccgcgtggacatagcacgaagccagatctttgtctttgggccccactggccgcccctgggaagcctggcacccccgacggacagcaaagccacggagaaggagaagaagccacccatggccaccaccaagggaggaagaggaaaagggaaaggcaagaagaaagggaaagtgaaagaggaagtggaggaagaaactgacccccggaagatagagctgctgaactgggtgaatgctttggagcaagcgatgctagatgctttagtcttagatcgtgtcgactttgtgaagctcctgattgaaaacggagtgaacatgcaacactttctgaccattccgaggctggaggagctttataacacaagactgggtccaccaaacacacttcatctgctggtgagggatgtgaaaaagagcaaccttccgcctgattaccacatcagcctcatagacatcgggctcgtgctggagtacctcatgggaggagcctaccgctgcaactacactcggaaaaactttcggaccctttacaacaacttgtttggaccaaagaggcctaaagctcttaaacttctgggaatggaagatgatgagcctccagctaaagggaagaaaaagaaaaagaagaaaaaggaggaagagatcgacattgatgtggacgaccctgccgtgagtcggttccagtatcccttccacgagctgatggtgtgggcagtgctgatgaaacgccagaaaatggcagtgttcctctggcagcgaggggaagagagcatggccaaggccctggtggcctgcaagctctacaaggccatggcccacgagtcctccgagagtgatctggtggatgacatctcccaggacttggataacaattccaaagacttcggccagcttgctttggagttattagaccagtcctataagcatgacgagcagatcgctatgaaactcctgacctacgagctgaaaaactggagcaactcgacctgcctcaaactggccgtggcagccaaacaccgggacttcattgctcacacctgcagccagatgctgctgaccgatatgtggatgggaagactgcggatgcggaagaaccccggcctgaaggttatcatggggattcttctaccccccaccatcttgtttttggaatttcgcacatatgatgatttctcgtatcaaacatccaaggaaaatgaggatggcaaagaaaaagaagaggaaaatacggatgcaaatgcagatgctggctcaagaaagggggatgaggagaacgagcacaaaaaacagagaagtattcccatcggaacaaagatctgtgaattctataacgcgcccattgtcaagttctggttttacacaatatcatacttgggctacctgctgctgtttaactacgtcatcctggtgcggatggatggctggccgtccctccaggagtggatcgtcatctcctacatcgtgagcctggcgttagagaagatacgagagatcctcatgtcagaaccaggcaaactcagccagaaaatcaaagtttggcttcaggagtactggaacatcacagatctcgtggccatttccacattcatgattggagcaattcttcgcctacagaaccagccctacatgggctatggccgggtgatctactgtgtggatatcatcttctggtacatccgtgtcctggacatctttggtgtcaacaagtatctggggccatacgtgatgatgattggaaagatgatgatcgacatgctgtactttgtggtcatcatgctggtcgtgctcatgagtttcggagtagcccgtcaagccattctgcatccagaggagaagccctcttggaaactggcccgaaacatcttctacatgccctactggatgatctatggagaggtgtttgcagaccagatagacctctacgccatggaaattaatcctccttgtggtgagaacctatatgatgaggagggcaagcggcttcctccctgtatccccggcgcctggctcactccagcactcatggcgtgctatctactggtcgccaacatcctgctggtgaacctgctgattgctgtgttcaacaataccttctttgaagtaaaatcaatatccaaccaggtgtggaagttccagcgatatcagctgattatgacatttcatgacaggccagtcctgcccccaccgatgatcattttaagccacatctacatcatcattatgcgtctcagcggccgctgcaggaaaaagagagaaggggaccaagaggaacgggatcgtggattgaagctcttccttagcgacgaggagctaaagaggctgcatgagttcgaggagcagtgcgtgcaggagcacttccgggagaaggaggatgagcagcagtcgtccagcgacgagcgcatccgggtcacttctgaaagagttgaaaatatgtcaatgaggttggaagaaatcaatgaaagagaaacttttatgaaaacttccctgcagactgttgaccttcgacttgctcagctagaagaattatctaacagaatggtgaatgctcttgaaaatcttgcgggaatcgacaggtctgacctgatccaggcacggtcccgggcttcttctgaatgtgaggcaacgtatcttctccggcaaagcagcatcaatagcgctgatggctacagcttgtatcgatatcattttaacggagaagagttattatttgaggatacatctctctccacgtcaccagggacaggagtcaggaaaaaaacctgttccttccgtataaaggaagagaaggacgtgaaaacgcacctagtcccagaatgtcagaacagtcttcacctttcactgggcacaagcacatcagcaaccccagatggcagtcaccttgcagtagatgacttaaagaacgctgaagagtcaaaattaggtccagatattgggatttcaaaggaagatgatgaaagacagacagactctaaaaaagaagaaactatttccccaagtttaaataaaacagatgtgatacatggacaggacaaatcagatgttcaaaacactcagctaacagtggaaacgacaaatatagaaggcactatttcctatcccctggaagaaaccaaaattacacgctatttccccgatgaaacgatcaatgcttgtaaaacaatgaagtccagaagcttcgtctattcccggggaagaaagctggtcggtggggttaaccaggatgtagagtacagttcaatcacggaccagcaattgacgacggaatggcaatgccaagttcaaaagatcacgcgctctcatagcacagatattccttacattgtgtcggaagctgcagtgcaagctgagcataaagagcagtttgcagatatgcaagatgaacaccatgtcgctgaagcaattcctcgaatccctcgcttgtccctaaccattactgacagaaatgggatggaaaacttactgtctgtgaagccagatcaaactttgggattcccatctctcaggtcaaaaagtttacatggacatcctaggaatgtgaaatccattcagggaaagttagacagatctggacatgccagtagtgtaagcagcttagtaattgtgtctggaatgacagcagaagaaaaaaaggttaagaaagagaaagcttccacagaaactgaatgctagtctgttttgtttctttaatttttttttttaacagtcagaaccactaatgggtgtcatcttggccatctaaacatcatcaatttctaaaaacattttccttaaaaaattttggaaattcagacttgatttacaatttaatgcactaaaagtagtattttgttagcatatgttagtaggcttagttttttcagttgcagtagtatcaaatgaaagtgatgatactgtaacgaagataaattggctaatcagtatacaagattatacaatctctttattactgagggccaccaaatagcctaggaagtgccctcgagcactgaagtcaccattaggtcacttaagaagtaagcaactagctgggcacagtggctcatgcctgtaatcctagcactttgggaggccaaggcagaaagatagcttgagtccaggagtttgagaccagcctgggcaacatagtgataccccatctcttaaaaaaaaaaaaaaaagtaagcaactgtgtaagaaagagaaactaaagagaaagcaaacatgaaaaaagggaggggtggaaagaagaaaaataaaattgtgaggcacaataagtgggaaggagccacaaatatgtttttatggggtctttgttttctgttttaatgttttattttaaactacacaatgggaaaaaaagtacacaattatatcaaacatcatactctaataatttagggtgacctagagttttgttaatgtgcaaaaataaagtatccaatatgcatttt

SEQ ID NO: 192763 - DNA, 4282 bp, Homo sapiens
  Payload ID: 18053
  Gene Name: transient receptor potential cation channel, subfamily M, member 1
  ENST ID: ENST00000558445
  CDS Start-End: 113-4282
ctccttcaagcggggctcgctcaagagctccacatcagggtcgcagaagggtcagaaatcttggatagagaaaaccttttgcaaacgggaatgtatctttgtaattcctagcatgaaagactctaacaggtgttgctgtggccagttcaccaaccagcatatcccccctctgccaagtgcaacacccagcaaaaatgaagaggaaagcaaacaggtggagactcagcctgagaaatggtctgttgccaagcacacccagagctacccaacagattcctatggagttcttgaattccagggtggcggatattccaataaagccatgtatatccgtgtatcctatgacaccaagccagactcactgctccatctcatggtgaaagattggcagctggaactccccaagctcttaatatctgtgcatggaggcctccagaactttgagatgcagcccaagctgaaacaagtctttgggaaaggcctgatcaaggctgctatgaccaccggggcctggatcttcaccgggggtgtcagcacaggtgttatcagccacgtaggggatgccttgaaagaccactcctccaagtccagaggccgggtttgtgctataggaattgctccatggggcatcgtggagaataaggaagacctggttggaaaggatgtaacaagagtgtaccagaccatgtccaaccctctaagtaagctctctgtgctcaacaactcccacacccacttcatcctggctgacaatggcaccctgggcaagtatggcgccgaggtgaagctgcgaaggctgctggaaaagcacatctccctgcagaagatcaacacaagactggggcagggcgtgcccctcgtgggtctcgtggtggaggggggccctaacgtggtgtccatcgtcttggaatacctgcaagaagagcctcccatccctgtggtgatttgtgatggcagcggacgtgcctcggacatcctgtcctttgcgcacaagtactgtgaagaaggcggaataataaatgagtccctcagggagcagcttctagttaccattcagaaaacatttaattataataaggcacaatcacatcagctgtttgcaattataatggagtgcatgaagaagaaagaactcgtcactgtgttcagaatgggttctgagggccagcaggacatcgagatggcaattttaactgccctgctgaaaggaacaaacgtatctgctccagatcagctgagcttggcactggcttggaaccgcgtggacatagcacgaagccagatctttgtctttgggccccactggccgcccctgggaagcctggcacccccgacggacagcaaagccacggagaaggagaagaagccacccatggccaccaccaagggaggaagaggaaaagggaaaggcaagaagaaagggaaagtgaaagaggaagtggaggaagaaactgacccccggaagatagagctgctgaactgggtgaatgctttggagcaagcgatgctagatgctttagtcttagatcgtgtcgactttgtgaagctcctgattgaaaacggagtgaacatgcaacactttctgaccattccgaggctggaggagctttataacacaagactgggtccaccaaacacacttcatctgctggtgagggatgtgaaaaagagcaaccttccgcctgattaccacatcagcctcatagacatcgggctcgtgctggagtacctcatgggaggagcctaccgctgcaactacactcggaaaaactttcggaccctttacaacaacttgtttggaccaaagaggcctaaagctcttaaacttctgggaatggaagatgatgagcctccagctaaagggaagaaaaagaaaaagaagaaaaaggaggaagagatcgacattgatgtggacgaccctgccgtgagtcggttccagtatcccttccacgagctgatggtgtgggcagtgctgatgaaacgccagaaaatggcagtgttcctctggcagcgaggggaagagagcatggccaaggccctggtggcctgcaagctctacaaggccatggcccacgagtcctccgagagtgatctggtggatgacatctcccaggacttggataacaattccaaagacttcggccagcttgctttggagttattagaccagtcctataagcatgacgagcagatcgctatgaaactcctgacctacgagctgaaaaactggagcaactcgacctgcctcaaactggccgtggcagccaaacaccgggacttcattgctcacacctgcagccagatgctgctgaccgatatgtggatgggaagactgcggatgcggaagaaccccggcctgaaggttatcatggggattcttctaccccccaccatcttgtttttggaatttcgcacatatgatgatttctcgtatcaaacatccaaggaaaatgaggatggcaaagaaaaagaagaggaaaatacggatgcaaatgcagatgctggctcaagaaagggggatgaggagaacgagcacaaaaaacagagaagtattcccatcggaacaaagatctgtgaattctataacgcgcccattgtcaagttctggttttacacaatatcatacttgggctacctgctgctgtttaactacgtcatcctggtgcggatggatggctggccgtccctccaggagtggatcgtcatctcctacatcgtgagcctggcgttagagaagatacgagagatcctcatgtcagaaccaggcaaactcagccagaaaatcaaagtttggcttcaggagtactggaacatcacagatctcgtggccatttccacattcatgattggagcaattcttcgcctacagaaccagccctacatgggctatggccgggtgatctactgtgtggatatcatcttctggtacatccgtgtcctggacatctttggtgtcaacaagtatctggggccatacgtgatgatgattggaaagatgatgatcgacatgctgtactttgtggtcatcatgctggtcgtgctcatgagtttcggagtagcccgtcaagccattctgcatccagaggagaagccctcttggaaactggcccgaaacatcttctacatgccctactggatgatctatggagaggtgtttgcagaccagatagacctctacgccatggaaattaatcctccttgtggtgagaacctatatgatgaggagggcaagcggcttcctccctgtatccccggcgcctggctcactccagcactcatggcgtgctatctactggtcgccaacatcctgctggtgaacctgctgattgctgtgttcaacaataccttctttgaagtaaaatcaatatccaaccaggtgtggaagttccagcgatatcagctgattatgacatttcatgacaggccagtcctgcccccaccgatgatcattttaagccacatctacatcatcattatgcgtctcagcggccgctgcaggaaaaagagagaaggggaccaagaggaacgggatcgtggattgaagctcttccttagcgacgaggagctaaagaggctgcatgagttcgaggagcagtgcgtgcaggagcacttccgggagaaggaggatgagcagcagtcgtccagcgacgagcgcatccgggtcacttctgaaagagttgaaaatatgtcaatgaggttggaagaaatcaatgaaagagaaacttttatgaaaacttccctgcagactgttgaccttcgacttgctcagctagaagaattatctaacagaatggtgaatgctcttgaaaatcttgcgggaatcgacaggtctgacctgatccaggcacggtcccgggcttcttctgaatgtgaggcaacgtatcttctccggcaaagcagcatcaatagcgctgatggctacagcttgtatcgatatcattttaacggagaagagttattatttgaggatacatctctctccacgtcaccagggacaggagtcaggaaaaaaacctgttccttccgtataaaggaagagaaggacgtgaaaacgcacctagtcccagaatgtcagaacagtcttcacctttcactgggcacaagcacatcagcaaccccagatggcagtcaccttgcagtagatgacttaaagaacgctgaagagtcaaaattaggtccagatattgggatttcaaaggaagatgatgaaagacagacagactctaaaaaagaagaaactatttccccaagtttaaataaaacagatgtgatacatggacag

SEQ ID NO: 192764 - DNA, 4581 bp, Homo sapiens
  Payload ID: 18053
  Gene Name: transient receptor potential cation channel, subfamily M, member 1
  ENST ID: ENST00000558768
  CDS Start-End: 1-4581
tatatccgtgtatcctatgacaccaagccagactcactgctccatctcatggtgaaagattggcagctggaactccccaagctcttaatatctgtgcatggaggcctccagaactttgagatgcagcccaagctgaaacaagtctttgggaaaggcctgatcaaggctgctatgaccaccggggcctggatcttcaccgggggtgtcagcacaggtgttatcagccacgtaggggatgccttgaaagaccactcctccaagtccagaggccgggtttgtgctataggaattgctccatggggcatcgtggagaataaggaagacctggttggaaaggatgtaacaagagtgtaccagaccatgtccaaccctctaagtaagctctctgtgctcaacaactcccacacccacttcatcctggctgacaatggcaccctgggcaagtatggcgccgaggtgaagctgcgaaggctgctggaaaagcacatctccctgcagaagatcaacacaagactggggcagggcgtgcccctcgtgggtctcgtggtggaggggggccctaacgtggtgtccatcgtcttggaatacctgcaagaagagcctcccatccctgtggtgatttgtgatggcagcggacgtgcctcggacatcctgtcctttgcgcacaaaataataaatgagtccctcagggagcagcttctagttaccattcagaaaacatttaattataataaggcacaatcacatcagctgtttgcaattataatggagtgcatgaagaagaaagaactcgtcactgtgttcagaatgggttctgagggccagcaggacatcgagatggcaattttaactgccctgctgaaaggaacaaacgtatctgctccagatcagctgagcttggcactggcttggaaccgcgtggacatagcacgaagccagatctttgtctttgggccccactggccgcccctgggaagcctggcacccccgacggacagcaaagccacggagaaggagaagaagccacccatggccaccaccaagggaggaagaggaaaagggaaaggcaagaagaaagggaaagtgaaagaggaagtggaggaagaaactgacccccggaagatagagctgctgaactgggtgaatgctttggagcaagcgatgctagatgctttagtcttagatcgtgtcgactttgtgaagctcctgattgaaaacggagtgaacatgcaacactttctgaccattccgaggctggaggagctttataacacaagactgggtccaccaaacacacttcatctgctggtgagggatgtgaaaaagagcaaccttccgcctgattaccacatcagcctcatagacatcgggctcgtgctggagtacctcatgggaggagcctaccgctgcaactacactcggaaaaactttcggaccctttacaacaacttgtttggaccaaagaggcctaaagctcttaaacttctgggaatggaagatgatgagcctccagctaaagggaagaaaaagaaaaagaagaaaaaggaggaagagatcgacattgatgtggacgaccctgccgtgagtcggttccagtatcccttccacgagctgatggtgtgggcagtgctgatgaaacgccagaaaatggcagtgttcctctggcagcgaggggaagagagcatggccaaggccctggtggcctgcaagctctacaaggccatggcccacgagtcctccgagagtgatctggtggatgacatctcccaggacttggataacaattccaaagacttcggccagcttgctttggagttattagaccagtcctataagcatgacgagcagatcgctatgaaactcctgacctacgagctgaaaaactggagcaactcgacctgcctcaaactggccgtggcagccaaacaccgggacttcattgctcacacctgcagccagatgctgctgaccgatatgtggatgggaagactgcggatgcggaagaaccccggcctgaaggttatcatggggattcttctaccccccaccatcttgtttttggaatttcgcacatatgatgatttctcgtatcaaacatccaaggaaaatgaggatggcaaagaaaaagaagaggaaaatacggatgcaaatgcagatgctggctcaagaaagggggatgaggagaacgagcacaaaaaacagagaagtattcccatcggaacaaagatctgtgaattctataacgcgcccattgtcaagttctggttttacacaatatcatacttgggctacctgctgctgtttaactacgtcatcctggtgcggatggatggctggccgtccctccaggagtggatcgtcatctcctacatcgtgagcctggcgttagagaagatacgagagatcctcatgtcagaaccaggcaaactcagccagaaaatcaaagtttggcttcaggagtactggaacatcacagatctcgtggccatttccacattcatgattggagcaattcttcgcctacagaaccagccctacatgggctatggccgggtgatctactgtgtggatatcatcttctggtacatccgtgtcctggacatctttggtgtcaacaagtatctggggccatacgtgatgatgattggaaagatgatgatcgacatgctgtactttgtggtcatcatgctggtcgtgctcatgagtttcggagtagcccgtcaagccattctgcatccagaggagaagccctcttggaaactggcccgaaacatcttctacatgccctactggatgatctatggagaggtgtttgcagaccagatagacctctacgccatggaaattaatcctccttgtggtgagaacctatatgatgaggagggcaagcggcttcctccctgtatccccggcgcctggctcactccagcactcatggcgtgctatctactggtcgccaacatcctgctggtgaacctgctgattgctgtgttcaacaataccttctttgaagtaaaatcaatatccaaccaggtgtggaagttccagcgatatcagctgattatgacatttcatgacaggccagtcctgcccccaccgatgatcattttaagccacatctacatcatcattatgcgtctcagcggccgctgcaggaaaaagagagaaggggaccaagaggaacgggatcgtggattgaagctcttccttagcgacgaggagctaaagaggctgcatgagttcgaggagcagtgcgtgcaggagcacttccgggagaaggaggatgagcagcagtcgtccagcgacgagcgcatccgggtcacttctgaaagagttgaaaatatgtcaatgaggttggaagaaatcaatgaaagagaaacttttatgaaaacttccctgcagactgttgaccttcgacttgctcagctagaagaattatctaacagaatggtgaatgctcttgaaaatcttgcgggaatcgacaggtctgacctgatccaggcacggtcccgggcttcttctgaatgtgaggcaacgtatcttctccggcaaagcagcatcaatagcgctgatggctacagcttgtatcgatatcattttaacggagaagagttattatttgaggatacatctctctccacgtcaccagggacaggagtcaggaaaaaaacctgttccttccgtataaaggaagagaaggacgtgaaaacgcacctagtcccagaatgtcagaacagtcttcacctttcactgggcacaagcacatcagcaaccccagatggcagtcaccttgcagtagatgacttaaagaacgctgaagagtcaaaattaggtccagatattgggatttcaaaggaagatgatgaaagacagacagactctaaaaaagaagaaactatttccccaagtttaaataaaacagatgtgatacatggacaggacaaatcagatgttcaaaacactcagctaacagtggaaacgacaaatatagaaggcactatttcctatcccctggaagaaaccaaaattacacgctatttccccgatgaaacgatcaatgcttgtaaaacaatgaagtccagaagcttcgtctattcccggggaagaaagctggtcggtggggttaaccaggatgtagagtacagttcaatcacggaccagcaattgacgacggaatggcaatgccaagttcaaaagatcacgcgctctcatagcacagatattccttacattgtgtcggaagctgcagtgcaagctgagcataaagagcagtttgcagatatgcaagatgaacaccatgtcgctgaagcaattcctcgaatccctcgcttgtccctaaccattactgacagaaatgggatggaaaacttactgtctgtgaagccagatcaaactttgggattcccatctctcaggtcaaaaagtttacatggacatcctaggaatgtgaaatccattcagggaaagttagacagatctggacatgccagtagtgtaagcagcttagtaattgtgtctggaatgacagcagaagaaaaaaaggttaagaaagagaaagcttccacagaaactgaatgctag

SEQ ID NO: 192765 - DNA, 1627 bp, Homo sapiens
  Payload ID: 18053
  Gene Name: transient receptor potential cation channel, subfamily M, member 1
  ENST ID: ENST00000559177
  CDS Start-End: 113-1627
ctccttcaagcggggctcgctcaagagctccacatcagggtcgcagaagggtcagaaatcttggatagagaaaaccttttgcaaacgggaatgtatctttgtaattcctagcatgaaagactctaacaggtgttgctgtggccagttcaccaaccagcatatcccccctctgccaagtgcaacacccagcaaaaatgaagaggaaagcaaacaggtggagactcagcctgagaaatggtctgttgccaagcacacccagagctacccaacagattcctatggagttcttgaattccagggtggcggatattccaataaagccatgtatatccgtgtatcctatgacaccaagccagactcactgctccatctcatggtgaaagattggcagctggaactccccaagctcttaatatctgtgcatggaggcctccagaactttgagatgcagcccaagctgaaacaagtctttgggaaaggcctgatcaaggctgctatgaccaccggggcctggatcttcaccgggggtgtcagcacagctccttgtggtgagaacctatatgatgaggagggcaagcggcttcctccctgtatccccggcgcctggctcactccagcactcatggcgtgctatctactggtcgccaacatcctgctggtgaacctgctgattgctgtgttcaacaataccttctttgaagtaaaatcaatatccaaccaggtgtggaagttccagcgatatcagctgattatgacatttcatgacaggccagtcctgcccccaccgatgatcattttaagccacatctacatcatcattatgcgtctcagcggccgctgcaggaaaaagagagaaggggaccaagaggaacgggatcgtggattgaagctcttccttagcgacgaggagctaaagaggctgcatgagttcgaggagcagtgcgtgcaggagcacttccgggagaaggaggatgagcagcagtcgtccagcgacgagcgcatccgggtcacttctgaaagagttgaaaatatgtcaatgaggttggaagaaatcaatgaaagagaaacttttatgaaaacttccctgcagactgttgaccttcgacttgctcagctagaagaattatctaacagaatggtgaatgctcttgaaaatcttgcgggaatcgacaggtctgacctgatccaggcacggtcccgggcttcttctgaatgtgaggcaacgtatcttctccggcaaagcagcatcaatagcgctgatggctacagcttgtatcgatatcattttaacggagaagagttattatttgaggatacatctctctccacgtcaccagggacaggagtcaggaaaaaaacctgttccttccgtataaaggaagagaaggacgtgaaaacgcacctagtcccagaatgtcagaacagtcttcacctttcactgggcacaagcacatcagcaaccccagatggcagtcaccttgcagtagatgacttaaagaacgctgaagagtcaaaattaggtccagatattgggatttcaaaggaagatgatgaaagacagacagactctaaaaaagaagaaactatttccccaagtttaaataaaacagatgtgatacatggacag

SEQ ID NO: 192766 - DNA, 4454 bp, Homo sapiens
  Payload ID: 18053
  Gene Name: transient receptor potential cation channel, subfamily M, member 1
  ENST ID: ENST00000560801
  CDS Start-End: 1-690
tatatccgtgtatcctatgacaccaagccagactcactgctccatctcatggtgaaagattggcagctggaactccccaagctcttaatatctgtgcatggaggcctccagaactttgagatgcagcccaagctgaaacaagtctttgggaaaggcctgatcaaggctgctatgaccaccggggcctggatcttcaccgggggtgtcagcacaggtgttatcagccacgtaggggatgccttgaaagaccactcctccaagtccagaggccgggtttgtgctataggaattgctccatggggcatcgtggagaataaggaagacctggttggaaaggatgtaacaagagtgtaccagaccatgtccaaccctctaagtaagctctctgtgctcaacaactcccacacccacttcatcctggctgacaatggcaccctgggcaagtatggcgccgaggtgaagctgcgaaggctgctggaaaagcacatctccctgcagaagatcaacacaagactggggcagggcgtgcccctcgtgggtctcgtggtggaggggggccctaacgtggtgtccatcgtcttggaatacctgcaagaagagcctcccatccctgtggtgatttgtgatggcagcggacgtgcctcggacatcctgtcctttgcgcacaagtactgtgaagaaggcgggtaggatttctgacgcgcgaggaagggcggaataataaatgagtccctcagggagcagcttctagttaccattcagaaaacatttaattataataaggcacaatcacatcagctgtttgcaattataatggagtgcatgaagaagaaagaactcgtcactgtgttcagaatgggttctgagggccagcaggacatcgagatggcaattttaactgccctgctgaaaggaacaaacgtatctgctccagatcagctgagcttggcactggcttggaaccgcgtggacatagcacgaagccagatctttgtctttgggccccactggccgcccctgggaagcctggcacccccgacggacagcaaagccacggagaaggagaagaagccacccatggccaccaccaagggaggaagaggaaaagggaaaggcaagaagaaagggaaagtgaaagaggaagtggaggaagaaactgacccccggaagatagagctgctgaactgggtgaatgctttggagcaagcgatgctagatgctttagtcttagatcgtgtcgactttgtgaagctcctgattgaaaacggagtgaacatgcaacactttctgaccattccgaggctggaggagctttataacacaagactgggtccaccaaacacacttcatctgctggtgagggatgtgaaaaagagcaaccttccgcctgattaccacatcagcctcatagacatcgggctcgtgctggagtacctcatgggaggagcctaccgctgcaactacactcggaaaaactttcggaccctttacaacaacttgtttggaccaaagaggcctaaagctcttaaacttctgggaatggaagatgatgagcctccagctaaagggaagaaaaagaaaaagaagaaaaaggaggaagagatcgacattgatgtggacgaccctgccgtgagtcggttccagtatcccttccacgagctgatggtgtgggcagtgctgatgaaacgccagaaaatggcagtgttcctctggcagcgaggggaagagagcatggccaaggccctggtggcctgcaagctctacaaggccatggcccacgagtcctccgagagtgatctggtggatgacatctcccaggacttggataacaattccaaagacttcggccagcttgctttggagttattagaccagtcctataagcatgacgagcagatcgctatgaaactcctgacctacgagctgaaaaactggagcaactcgacctgcctcaaactggccgtggcagccaaacaccgggacttcattgctcacacctgcagccagatgctgctgaccgatatgtggatgggaagactgcggatgcggaagaaccccggcctgaaggttatcatggggattcttctaccccccaccatcttgtttttggaatttcgcacatatgatgatttctcgtatcaaacatccaaggaaaatgaggatggcaaagaaaaagaagaggaaaatacggatgcaaatgcagatgctggctcaagaaagggggatgaggagaacgagcacaaaaaacagagaagtattcccatcggaacaaagatctgtgaattctataacgcgcccattgtcaagttctggttttacacaatatcatacttgggctacctgctgctgtttaactacgtcatcctggtgcggatggatggctggccgtccctccaggagtggatcgtcatctcctacatcgtgagcctggcgttagagaagatacgagagatcctcatgtcagaaccaggcaaactcagccagaaaatcaaagtttggcttcaggagtactggaacatcacagatctcgtggccatttccacattcatgattggagcaattcttcgcctacagaaccagccctacatgggctatggccgggtgatctactgtgtggatatcatcttctggtacatccgtgtcctggacatctttggtgtcaacaagtatctggggccatacgtgatgatgattggaaagatgtctacgccatggaaattaatcctccttgtggtgagaacctatatgatgaggagggcaagcggcttcctccctgtatccccggcgcctggctcactccagcactcatggcgtgctatctactggtcgccaacatcctgctggtgaacctgctgattgctgtgttcaacaataccttctttgaagtaaaatcaatatccaaccaggtgtggaagttccagcgatatcagctgattatgacatttcatgacaggccagtcctgcccccaccgatgatcattttaagccacatctacatcatcattatgcgtctcagcggccgctgcaggaaaaagagagaaggggaccaagaggaacgggatcgtggattgaagctcttccttagcgacgaggagctaaagaggctgcatgagttcgaggagcagtgcgtgcaggagcacttccgggagaaggaggatgagcagcagtcgtccagcgacgagcgcatccgggtcacttctgaaagagttgaaaatatgtcaatgaggttggaagaaatcaatgaaagagaaacttttatgaaaacttccctgcagactgttgaccttcgacttgctcagctagaagaattatctaacagaatggtgaatgctcttgaaaatcttgcgggaatcgacaggtctgacctgatccaggcacggtcccgggcttcttctgaatgtgaggcaacgtatcttctccggcaaagcagcatcaatagcgctgatggctacagcttgtatcgatatcattttaacggagaagagttattatttgaggatacatctctctccacgtcaccagggacaggagtcaggaaaaaaacctgttccttccgtataaaggaagagaaggacgtgaaaacgcacctagtcccagaatgtcagaacagtcttcacctttcactgggcacaagcacatcagcaaccccagatggcagtcaccttgcagtagatgacttaaagaacgctgaagagtcaaaattaggtccagatattgggatttcaaaggaagatgatgaaagacagacagactctaaaaaagaagaaactatttccccaagtttaaataaaacagatgtgatacatggacaggacaaatcagatgttcaaaacactcagctaacagtggaaacgacaaatatagaaggcactatttcctatcccctggaagaaaccaaaattacacgctatttccccgatgaaacgatcaatgcttgtaaaacaatgaagtccagaagcttcgtctattcccggggaagaaagctggtcggtggggttaaccaggatgtagagtacagttcaatcacggaccagcaattgacgacggaatggcaatgccaagttcaaaagatcacgcgctctcatagcacagatattccttacattgtgtcggaagctgcagtgcaagctgagcataaagagcagtttgcagatatgcaagatgaacaccatgtcgctgaagcaattcctcgaatccctcgcttgtccctaaccattactgacagaaatgggatggaaaacttactgtctgtgaagccagatcaaactttgggattcccatctctcaggtcaaaaagtttacatggacatcctaggaatgtgaaatccattcagggaaagttagacagatctggacatgccagtagtgtaagcagcttagtaattgtgtctggaatgacagcagaagaaaaaaaggttaagaaagagaaagcttccacagaaactgaatgctag

SEQ ID NO: 192767 - DNA, 1002 bp, Homo sapiens
  Payload ID: 18053
  Gene Name: transient receptor potential cation channel, subfamily M, member 1
  Uniprot ID: Q7Z4N2
  ENST ID: ENST00000559179
  CDS Start-End: 135-545
ctccctgccctggccaaggaggaggctgaaagagcctgagctgtgccctctccattccactgctgtggcagggtcagaaatcttggatagagaaaaccttttgcaaacgggaatgtatctttgtaattcctagcatgaaagactctaacaggtgttgctgtggccagttcaccaaccagcatatcccccctctgccaagtgcaacacccagcaaaaatgaagaggaaagcaaacaggtggagactcagcctgagaaatggtctgttgccaagcacacccagagctacccaacagattcctatggagttcttgaattccagggtggcggatattccaataaagccatggtgagaaaggcattcagacatggtgccactaggatcacagctttcattggcggccagtctcccagccccaaactgcagatacctggtcttcttcatggctgtggctcaatcttcctagatatttcattgaaaaaccaagagatatatctgtgcacatggcttttagccatgaggcttggaaactggacaccactgtaaagaacatctagtgtcccgtaaatccataccaaagctctgaatccacaaaccaggctctggcccaaccctgcaaacacactccattgctccatcttcagtaaaggaagacaaattcatttttctaataactgtggacctgcagcccccttagatgtgttgagagtctttggaaatattttcctctgaggtctgtccacagcttccctgggcctgcgctcagctggcccgagaaggaccaaggtccctcacatttgcatgtaaacagggagtgccctctgcccttccagtgagccctgccagcgtgggggaggcttcagctctgtgatccgttccagctcactctgaattacactcctacatgcccagtcacagactttttgcaatttcattttatttcactggcccaacatcattgttaaaataaaatttagctgtgttccaaatgctgcaatataca

SEQ ID NO: 192768 - DNA, 1649 bp, Homo sapiens
  Payload ID: 18053
  Gene Name: transient receptor potential cation channel, subfamily M, member 1
  Uniprot ID: Q7Z4N2
  ENST ID: ENST00000560658
  CDS Start-End: 114-1016
gaggctgaaagagcctgagctgtgccctctccattccactgctgtggcagggtcagaaatcttggatagagaaaaccttttgcaaacgggaatgtatctttgtaattcctagcatgaaagactctaacaggtgttgctgtggccagttcaccaaccagcatatcccccctctgccaagtgcaacacccagcaaaaatgaagaggaaagcaaacaggtggagactcagcctgagaaatggtctgttgccaagcacacccagagctacccaacagattcctatggagttcttgaattccagggtggcggatattccaataaagccatgtatatccgtgtatcctatgacaccaagccagactcactgctccatctcatggtgaaagattggcagctggaactccccaagctcttaatatctgtgcatggaggcctccagaactttgagatgcagcccaagctgaaacaagtctttgggaaaggcctgatcaaggctgctatgaccaccggggcctggatcttcaccgggggtgtcagcacaggtgttatcagccacgtaggggatgccttgaaagaccactcctccaagtccagaggccgggtttgtgctataggaattgctccatggggcatcgtggagaataaggaagacctggttggaaaggatgtaacaagagtgtaccagaccatgtccaaccctctaagtaagctctctgtgctcaacaactcccacacccacttcatcctggctgacaatggcaccctgggcaagtatggcgccgaggtgaagctgcgaaggctgctggaaaagcacatctccctgcagaagatcaacacaagactggggcagggcgtgcccctcgtgggtctcgtggtggaggggggccctaacgtggtgtccatcgtcttggaatacctgcaagaagagcctcccatccctgtggtgatttgtgatggcagcggacgtgcctcggacatcctgtcctttgcgcacaagtactgtgaagaaggcgggtaggatttctgacgcgcgaggaagggcggaataataaatgagtccctcagggagcagcttctagttaccattcagaaaacatttaattataataaggcacaatcacatcagctgtttgcaattataatggagtgcatgaagaagaaagaactcgtcactgtgttcagaatgggttctgagggccagcaggacatcgagatggcaattttaactgccctgctgaaaggaacaaacgtatctgctccagatcagctgagcttggcactggcttggaaccgcgtggacatagcacgaagccagatctttgtctttgggccccactggccggtgaaactgttttttttcgattcatatcattgatcttgactttgtacaagtgacctattagtatgttctcccttgtgacatggaattcaggaaattatgtggggtttctgatgatatgatatgtaatctattaggctcattagaagatgtcactgtttaacttcaaagaaccaacaagaagtaattccacattcaaaccagtactcctgaagaaattaatcaccaaatattttatcgttgctgatgaaagtgggtttttacctttttaaagaaaaagaagaagaaataaaatagcttattaaaatttaa

SEQ ID NO: 192769 - DNA, 5706 bp, Homo sapiens
  Payload ID: 18053
  Gene Name: transient receptor potential cation channel, subfamily M, member 1
  ENST ID: ENST00000617515
  CDS Start-End: 134-4945
tccctgccctggccaaggaggaggctgaaagagcctgagctgtgccctctccattccactgctgtggcagggtcagaaatcttggatagagaaaaccttttgcaaacgggaatgtatctttgtaattcctagcacgaaagactctaacaggtgttgctgtggccagttcaccaaccagcatatcccccctctgccaagtgcaacacccagcaaaaatgaagaggaaaacaaacaggtggagactcagcctgagaaatggtctgttgccaagcacacccagagctacccaacagattcctatggagttcttgaattccagggtggcggatattccaataaagccatgtatatccgtgtatcctatgacaccaagccagactcactgctccatctcatggtgaaagattggcagctggaactccccaagctcttaatatctgtgcatggaggcctccagaactttgagatgcagcccaagctgaaacaagtctttgggaaaggcctgatcaaggctgctatgaccaccggggcctggatcttcaccgggggtgtcagcacaggtgttatcagccacgtaggggatgccttgaaagaccactcctccaagtccagaggccgggtttgtgctataggaattgctccatggggcatcgtggagaataaggaagacctggttggaaaggatgtaacaagagtgtaccagaccatgtccaaccctctaagtaagctctctgtgctcaacaactcccacacccacttcatcctggctgacaatggcaccctgggcaagtatggcgccgaggtgaagctgcgaaggctgctggaaaagcacatctccctgcagaagatcaacacaagactggggcagggcgtgcccctcgtgggtctcgtggtggaggggggccctaacgtggtgtccatcgtcttggaatacctgcaagaagagcctcccatccctgtggtgatttgtgatggcagcggacgtgcctcggacatcctgtcctttgcgcacaagtactgtgaagaaggcggaataataaatgagtccctcagggagcagcttctagttaccattcagaaaacatttaattataataaggcacaatcacatcagctgtttgcaattataatggagtgcatgaagaagaaagaactcgtcactgtgttcagaatgggttctgagggccagcaggacatcgagatggcaattttaactgccctgctgaaaggaacaaacgtatctgctccagatcagctgagcttggcactggcttggaaccgcgtggacatagcacgaagccagatctttgtctttgggccccactggccgcccctgggaagcctggcacccccgacggacagcaaagccacagagaaggagaagaagccacccatggccaccaccaagggaggaagaggaaaagggaaaggcaagaagaaagggaaagtgaaagaggaagtggaggaagaaactgacccccggaagatagagctgctgaactgggtgaatgctttggagcaagcgatgctagatgctttagtcttagatcgtgtcgactttgtgaagctcctgattgaaaacggagtgaacatgcaacactttctgaccattccgaggctggaggagctttataacacaagactgggtccaccaaacacacttcatctgctggtgagggatgtgaaaaagagcaaccttccgcctgattaccacatcagcctcatagacatcgggctcgtgctggagtacctcatgggaggagcctaccgctgcaactacactcggaaaaactttcggaccctttacaacaacttgtttggaccaaagaggcctaaagctcttaaacttctgggaatggaagatgatgagcctccagctaaagggaagaaaaagaaaaagaagaaaaaggaggaagagatcgacattgatgtggacgaccctgccgtgagtcggttccagtatcccttccacgagctgatggtgtgggcagtgctgatgaaacgccagaaaatggcagtgttcctctggcagcgaggggaagagagcatggccaaggccctggtggcctgcaagctctacaaggccatggcccacgagtcctccgagagtgatctggtggatgacatctcccaggacttggataacaattccaaagacttcggccagcttgctttggagttattagaccagtcctataagcatgacgagcagatcgctatgaaactcctgacctacgagctgaaaaactggagcaactcgacctgcctcaaactggccgtggcagccaaacaccgggacttcattgctcacacctgcagccagatgctgctgaccgatatgtggatgggaagactgcggatgcggaagaaccccggcctgaaggttatcatggggattcttctaccccccaccatcttgtttttggaatttcgcacatatgatgatttctcgtatcaaacatccaaggaaaacgaggatggcaaagaaaaagaagaggaaaatacggatgcaaatgcagatgctggctcaagaaagggggatgaggagaacgagcacaaaaaacagagaagtattcccatcggaacaaagatctgtgaattctataacgcgcccattgtcaagttctggttttacacaatatcatacttgggctacctgctgctgtttaactacgtcatcctggtgcggatggatggctggccgtccctccaggagtggatcgtcatctcctacatcgtgagcctggcgttagagaagatacgagagatcctcatgtcagaaccaggcaaactcagccagaaaatcaaagtttggcttcaggagtactggaacatcacagatctcgtggccatttccacattcatgattggagcaattcttcgcctacagaaccagccctacatgggctatggccgggtgatctactgtgtggatatcatcttctggtacatccgtgtcctggacatctttggtgtcaacaagtatctggggccatacgtgatgatgattggaaagatgatgatcgacatgctgtactttgtggtcatcatgctggtcgtgctcatgagtttcggagtagcccgtcaagccattctgcatccagaggagaagccctcttggaaactggcccgaaacatcttctacatgccctactggatgatctatggagaggtgtttgcagaccagatagacctctacgccatggaaattaatcctccttgtggtgagaacctatatgatgaggagggcaagcggcttcctccctgtatccccggcgcctggctcactccagcactcatggcgtgctatctactggtcgccaacatcctgctggtgaacctgctgattgctgtgttcaacaataccttctttgaagtaaaatcaatatccaaccaggtgtggaagttccagcgatatcagctgattatgacatttcatgacaggccagtcctgcccccaccgatgatcattttaagccacatctacatcatcattatgcgtctcagcggccgctgcaggaaaaagagagaaggggaccaagaggaacgggatcgtggattgaagctcttccttagcgacgaggagctaaagaggctgcatgagttcgaggagcagtgcgtgcaggagcacttccgggagaaggaggatgagcagcagtcgtccagcgacgagcgcatccgggtcacttctgaaagagttgaaaatatgtcaatgaggttggaagaaatcaatgaaagagaaacttttatgaaaacttccctgcagactgttgaccttcgacttgctcagctagaagaattatctaacagaatggtgaatgctcttgaaaatcttgcgggaatcgacaggtctgacctgatccaggcacggtcccgggcttcttctgaatgtgaggcaacgtatcttctccggcaaagcagcatcaatagcgctgatggctacagcttgtatcgatatcattttaacggagaagagttattatttgaggatacatctctctccacgtcaccagggacaggagtcaggaaaaaaacctgttccttccgtataaaggaagagaaggacgtgaaaacgcacctagtcccagaatgtcagaacagtcttcacctttcactgggcacaagcacatcagcaaccccagatggcagtcaccttgcagtagatgacttaaagaacgctgaagagtcaaaattaggtccagatattgggatttcaaaggaagatgatgaaagacagacagactctaaaaaagaagaaactatttccccaagtttaaataaaacagatgtgatacatggacaggacaaatcagatgttcaaaacactcagctaacagtggaaacgacaaatatagaaggcactatttcctatcccctggaagaaaccaaaattacacgctatttccccgatgaaacgatcaatgcttgtaaaacaatgaagtccagaagcttcgtctattcccggggaagaaagctggtcggtggggttaaccaggatgtagagtacagttcaatcacggaccagcaattgacgacggaatggcaatgccaagttcaaaagatcacgcgctctcatagcacagatattccttacattgtgtcggaagctgcagtgcaagctgagcataaagagcagtttgcagatatgcaagatgaacaccatgtcgctgaagcaattcctcgaatccctcgcttgtccctaaccattactgacagaaatgggatggaaaacttactgtctgtgaagccagatcaaactttgggattcccatctctcaggtcaaaaagtttacatggacatcctaggaatgtgaaatccattcagggaaagttagacagatctggacatgccagtagtgtaagcagcttagtaattgtgtctggaatgacagcagaagaaaaaaaggttaagaaagagaaagcttccacagaaactgaatgctagtctgttttgtttctttaatttttttttttaacagtcagaaccactaatgggtgtcatcttggccatctaaacatcatcaatttctaaaaacattttccttaaaaaattttggaaattcagacttgatttacaatttaatgcactaaaagtagtattttgttagcatatgttagtaggcttagttttttcagttgcagtagtatcaaatgaaagtgatgatactgtaacgaagataaattggctaatcagtatacaagattatacaatctctttattactgagggccaccaaatagcctaggaagtgccctcgagcactgaagtcaccattaggtcacttaagaagtaagcaactagctgggcacagtggctcatgcctgtaatcctagcactttgggaggccaaggcagaaagatagcttgagtccaggagtttgagaccagcctgggcaacatagtgataccccatctcttaaaaaaaaaaaaaaaagtaagcaactgtgtaagaaagagaaactaaagagaaagcaaacatgaaaaaagggaggggtggaaagaagaaaaataaaattatgaggcacaataagtgggaaggagccacaaatatgtttttatggggtctttgttttctgttttaatgttttattttaaactacacaatgggaaaaaaagtacacaattatatcaaacatcatactctaataatttagggtgacctagagttttgttaatgtgcaaaaataaagtatccaatatgcatttt

SEQ ID NO: 192770 - DNA, 5792 bp, Homo sapiens
  Payload ID: 18053
  Gene Name: transient receptor potential cation channel, subfamily M, member 1
  ENST ID: ENST00000615583
  CDS Start-End: 154-5031
tccctgccctggccaaggaggaggctgaaagagcctgagctgtgccctctccattccactgctgtggcaggttctagaagatttctgaggactcagcagtaacttgcagtgctggactgaggctatttccttatatcaactttttgaaaactcatgggtcagaaatcttggatagagaaaaccttttgcaaacgggaatgtatctttgtaattcctagcacgaaagactctaacaggtgttgctgtggccagttcaccaaccagcatatcccccctctgccaagtgcaacacccagcaaaaatgaagaggaaaacaaacaggtggagactcagcctgagaaatggtctgttgccaagcacacccagagctacccaacagattcctatggagttcttgaattccagggtggcggatattccaataaagccatgtatatccgtgtatcctatgacaccaagccagactcactgctccatctcatggtgaaagattggcagctggaactccccaagctcttaatatctgtgcatggaggcctccagaactttgagatgcagcccaagctgaaacaagtctttgggaaaggcctgatcaaggctgctatgaccaccggggcctggatcttcaccgggggtgtcagcacaggtgttatcagccacgtaggggatgccttgaaagaccactcctccaagtccagaggccgggtttgtgctataggaattgctccatggggcatcgtggagaataaggaagacctggttggaaaggatgtaacaagagtgtaccagaccatgtccaaccctctaagtaagctctctgtgctcaacaactcccacacccacttcatcctggctgacaatggcaccctgggcaagtatggcgccgaggtgaagctgcgaaggctgctggaaaagcacatctccctgcagaagatcaacacaagactggggcagggcgtgcccctcgtgggtctcgtggtggaggggggccctaacgtggtgtccatcgtcttggaatacctgcaagaagagcctcccatccctgtggtgatttgtgatggcagcggacgtgcctcggacatcctgtcctttgcgcacaagtactgtgaagaaggcggaataataaatgagtccctcagggagcagcttctagttaccattcagaaaacatttaattataataaggcacaatcacatcagctgtttgcaattataatggagtgcatgaagaagaaagaactcgtcactgtgttcagaatgggttctgagggccagcaggacatcgagatggcaattttaactgccctgctgaaaggaacaaacgtatctgctccagatcagctgagcttggcactggcttggaaccgcgtggacatagcacgaagccagatctttgtctttgggccccactggccgcccctgggaagcctggcacccccgacggacagcaaagccacagagaaggagaagaagccacccatggccaccaccaagggaggaagaggaaaagggaaaggcaagaagaaagggaaagtgaaagaggaagtggaggaagaaactgacccccggaagatagagctgctgaactgggtgaatgctttggagcaagcgatgctagatgctttagtcttagatcgtgtcgactttgtgaagctcctgattgaaaacggagtgaacatgcaacactttctgaccattccgaggctggaggagctttataacacaagactgggtccaccaaacacacttcatctgctggtgagggatgtgaaaaagagcaaccttccgcctgattaccacatcagcctcatagacatcgggctcgtgctggagtacctcatgggaggagcctaccgctgcaactacactcggaaaaactttcggaccctttacaacaacttgtttggaccaaagaggcctaaagctcttaaacttctgggaatggaagatgatgagcctccagctaaagggaagaaaaagaaaaagaagaaaaaggaggaagagatcgacattgatgtggacgaccctgccgtgagtcggttccagtatcccttccacgagctgatggtgtgggcagtgctgatgaaacgccagaaaatggcagtgttcctctggcagcgaggggaagagagcatggccaaggccctggtggcctgcaagctctacaaggccatggcccacgagtcctccgagagtgatctggtggatgacatctcccaggacttggataacaattccaaagacttcggccagcttgctttggagttattagaccagtcctataagcatgacgagcagatcgctatgaaactcctgacctacgagctgaaaaactggagcaactcgacctgcctcaaactggccgtggcagccaaacaccgggacttcattgctcacacctgcagccagatgctgctgaccgatatgtggatgggaagactgcggatgcggaagaaccccggcctgaaggttatcatggggattcttctaccccccaccatcttgtttttggaatttcgcacatatgatgatttctcgtatcaaacatccaaggaaaacgaggatggcaaagaaaaagaagaggaaaatacggatgcaaatgcagatgctggctcaagaaagggggatgaggagaacgagcacaaaaaacagagaagtattcccatcggaacaaagatctgtgaattctataacgcgcccattgtcaagttctggttttacacaatatcatacttgggctacctgctgctgtttaactacgtcatcctggtgcggatggatggctggccgtccctccaggagtggatcgtcatctcctacatcgtgagcctggcgttagagaagatacgagagatcctcatgtcagaaccaggcaaactcagccagaaaatcaaagtttggcttcaggagtactggaacatcacagatctcgtggccatttccacattcatgattggagcaattcttcgcctacagaaccagccctacatgggctatggccgggtgatctactgtgtggatatcatcttctggtacatccgtgtcctggacatctttggtgtcaacaagtatctggggccatacgtgatgatgattggaaagatgatgatcgacatgctgtactttgtggtcatcatgctggtcgtgctcatgagtttcggagtagcccgtcaagccattctgcatccagaggagaagccctcttggaaactggcccgaaacatcttctacatgccctactggatgatctatggagaggtgtttgcagaccagatagacctctacgccatggaaattaatcctccttgtggtgagaacctatatgatgaggagggcaagcggcttcctccctgtatccccggcgcctggctcactccagcactcatggcgtgctatctactggtcgccaacatcctgctggtgaacctgctgattgctgtgttcaacaataccttctttgaagtaaaatcaatatccaaccaggtgtggaagttccagcgatatcagctgattatgacatttcatgacaggccagtcctgcccccaccgatgatcattttaagccacatctacatcatcattatgcgtctcagcggccgctgcaggaaaaagagagaaggggaccaagaggaacgggatcgtggattgaagctcttccttagcgacgaggagctaaagaggctgcatgagttcgaggagcagtgcgtgcaggagcacttccgggagaaggaggatgagcagcagtcgtccagcgacgagcgcatccgggtcacttctgaaagagttgaaaatatgtcaatgaggttggaagaaatcaatgaaagagaaacttttatgaaaacttccctgcagactgttgaccttcgacttgctcagctagaagaattatctaacagaatggtgaatgctcttgaaaatcttgcgggaatcgacaggtctgacctgatccaggcacggtcccgggcttcttctgaatgtgaggcaacgtatcttctccggcaaagcagcatcaatagcgctgatggctacagcttgtatcgatatcattttaacggagaagagttattatttgaggatacatctctctccacgtcaccagggacaggagtcaggaaaaaaacctgttccttccgtataaaggaagagaaggacgtgaaaacgcacctagtcccagaatgtcagaacagtcttcacctttcactgggcacaagcacatcagcaaccccagatggcagtcaccttgcagtagatgacttaaagaacgctgaagagtcaaaattaggtccagatattgggatttcaaaggaagatgatgaaagacagacagactctaaaaaagaagaaactatttccccaagtttaaataaaacagatgtgatacatggacaggacaaatcagatgttcaaaacactcagctaacagtggaaacgacaaatatagaaggcactatttcctatcccctggaagaaaccaaaattacacgctatttccccgatgaaacgatcaatgcttgtaaaacaatgaagtccagaagcttcgtctattcccggggaagaaagctggtcggtggggttaaccaggatgtagagtacagttcaatcacggaccagcaattgacgacggaatggcaatgccaagttcaaaagatcacgcgctctcatagcacagatattccttacattgtgtcggaagctgcagtgcaagctgagcataaagagcagtttgcagatatgcaagatgaacaccatgtcgctgaagcaattcctcgaatccctcgcttgtccctaaccattactgacagaaatgggatggaaaacttactgtctgtgaagccagatcaaactttgggattcccatctctcaggtcaaaaagtttacatggacatcctaggaatgtgaaatccattcagggaaagttagacagatctggacatgccagtagtgtaagcagcttagtaattgtgtctggaatgacagcagaagaaaaaaaggttaagaaagagaaagcttccacagaaactgaatgctagtctgttttgtttctttaatttttttttttaacagtcagaaccactaatgggtgtcatcttggccatctaaacatcatcaatttctaaaaacattttccttaaaaaattttggaaattcagacttgatttacaatttaatgcactaaaagtagtattttgttagcatatgttagtaggcttagttttttcagttgcagtagtatcaaatgaaagtgatgatactgtaacgaagataaattggctaatcagtatacaagattatacaatctctttattactgagggccaccaaatagcctaggaagtgccctcgagcactgaagtcaccattaggtcacttaagaagtaagcaactagctgggcacagtggctcatgcctgtaatcctagcactttgggaggccaaggcagaaagatagcttgagtccaggagtttgagaccagcctgggcaacatagtgataccccatctcttaaaaaaaaaaaaaaaagtaagcaactgtgtaagaaagagaaactaaagagaaagcaaacatgaaaaaagggaggggtggaaagaagaaaaataaaattatgaggcacaataagtgggaaggagccacaaatatgtttttatggggtctttgttttctgttttaatgttttattttaaactacacaatgggaaaaaaagtacacaattatatcaaacatcatactctaataatttagggtgacctagagttttgttaatgtgcaaaaataaagtatccaatatgcatttt

SEQ ID NO: 192771 - DNA, 6004 bp, Homo sapiens
  Payload ID: 18053
  Gene Name: transient receptor potential cation channel, subfamily M, member 1
  ENST ID: ENST00000611448
  CDS Start-End: 315-5243
ctaaatctcttccctctaaaccttttggggatggagggattaagcctgattacagatgttgggggtggtagcaggagtcgggcaggaggggccaccaaaagccagcacatgctcctcctaggctgaaccagcctccggccggcctcgccccaggatctcggccccctcgcccagtgcgtggggctgccgccgagtgtggggctgccgccgagtgtgtggctccgctcctgcccacccagggagggcagcccctgtgccactggcctggccacccgagggagtcagcagggtggctcacaggctcactgagagagatgagctccttcaagcggggctcgctcaagagctccacatcagggtcgcagaagggtcagaaatcttggatagagaaaaccttttgcaaacgggaatgtatctttgtaattcctagcacgaaagactctaacaggtgttgctgtggccagttcaccaaccagcatatcccccctctgccaagtgcaacacccagcaaaaatgaagaggaaaacaaacaggtggagactcagcctgagaaatggtctgttgccaagcacacccagagctacccaacagattcctatggagttcttgaattccagggtggcggatattccaataaagccatgtatatccgtgtatcctatgacaccaagccagactcactgctccatctcatggtgaaagattggcagctggaactccccaagctcttaatatctgtgcatggaggcctccagaactttgagatgcagcccaagctgaaacaagtctttgggaaaggcctgatcaaggctgctatgaccaccggggcctggatcttcaccgggggtgtcagcacaggtgttatcagccacgtaggggatgccttgaaagaccactcctccaagtccagaggccgggtttgtgctataggaattgctccatggggcatcgtggagaataaggaagacctggttggaaaggatgtaacaagagtgtaccagaccatgtccaaccctctaagtaagctctctgtgctcaacaactcccacacccacttcatcctggctgacaatggcaccctgggcaagtatggcgccgaggtgaagctgcgaaggctgctggaaaagcacatctccctgcagaagatcaacacaagactggggcagggcgtgcccctcgtgggtctcgtggtggaggggggccctaacgtggtgtccatcgtcttggaatacctgcaagaagagcctcccatccctgtggtgatttgtgatggcagcggacgtgcctcggacatcctgtcctttgcgcacaagtactgtgaagaaggcggaataataaatgagtccctcagggagcagcttctagttaccattcagaaaacatttaattataataaggcacaatcacatcagctgtttgcaattataatggagtgcatgaagaagaaagaactcgtcactgtgttcagaatgggttctgagggccagcaggacatcgagatggcaattttaactgccctgctgaaaggaacaaacgtatctgctccagatcagctgagcttggcactggcttggaaccgcgtggacatagcacgaagccagatctttgtctttgggccccactggccgcccctgggaagcctggcacccccgacggacagcaaagccacagagaaggagaagaagccacccatggccaccaccaagggaggaagaggaaaagggaaaggcaagaagaaagggaaagtgaaagaggaagtggaggaagaaactgacccccggaagatagagctgctgaactgggtgaatgctttggagcaagcgatgctagatgctttagtcttagatcgtgtcgactttgtgaagctcctgattgaaaacggagtgaacatgcaacactttctgaccattccgaggctggaggagctttataacacaagactgggtccaccaaacacacttcatctgctggtgagggatgtgaaaaagagcaaccttccgcctgattaccacatcagcctcatagacatcgggctcgtgctggagtacctcatgggaggagcctaccgctgcaactacactcggaaaaactttcggaccctttacaacaacttgtttggaccaaagaggcctaaagctcttaaacttctgggaatggaagatgatgagcctccagctaaagggaagaaaaagaaaaagaagaaaaaggaggaagagatcgacattgatgtggacgaccctgccgtgagtcggttccagtatcccttccacgagctgatggtgtgggcagtgctgatgaaacgccagaaaatggcagtgttcctctggcagcgaggggaagagagcatggccaaggccctggtggcctgcaagctctacaaggccatggcccacgagtcctccgagagtgatctggtggatgacatctcccaggacttggataacaattccaaagacttcggccagcttgctttggagttattagaccagtcctataagcatgacgagcagatcgctatgaaactcctgacctacgagctgaaaaactggagcaactcgacctgcctcaaactggccgtggcagccaaacaccgggacttcattgctcacacctgcagccagatgctgctgaccgatatgtggatgggaagactgcggatgcggaagaaccccggcctgaaggttatcatggggattcttctaccccccaccatcttgtttttggaatttcgcacatatgatgatttctcgtatcaaacatccaaggaaaacgaggatggcaaagaaaaagaagaggaaaatacggatgcaaatgcagatgctggctcaagaaagggggatgaggagaacgagcacaaaaaacagagaagtattcccatcggaacaaagatctgtgaattctataacgcgcccattgtcaagttctggttttacacaatatcatacttgggctacctgctgctgtttaactacgtcatcctggtgcggatggatggctggccgtccctccaggagtggatcgtcatctcctacatcgtgagcctggcgttagagaagatacgagagatcctcatgtcagaaccaggcaaactcagccagaaaatcaaagtttggcttcaggagtactggaacatcacagatctcgtggccatttccacattcatgattggagcaattcttcgcctacagaaccagccctacatgggctatggccgggtgatctactgtgtggatatcatcttctggtacatccgtgtcctggacatctttggtgtcaacaagtatctggggccatacgtgatgatgattggaaagatgatgatcgacatgctgtactttgtggtcatcatgctggtcgtgctcatgagtttcggagtagcccgtcaagccattctgcatccagaggagaagccctcttggaaactggcccgaaacatcttctacatgccctactggatgatctatggagaggtgtttgcagaccagatagacctctacgccatggaaattaatcctccttgtggtgagaacctatatgatgaggagggcaagcggcttcctccctgtatccccggcgcctggctcactccagcactcatggcgtgctatctactggtcgccaacatcctgctggtgaacctgctgattgctgtgttcaacaataccttctttgaagtaaaatcaatatccaaccaggtgtggaagttccagcgatatcagctgattatgacatttcatgacaggccagtcctgcccccaccgatgatcattttaagccacatctacatcatcattatgcgtctcagcggccgctgcaggaaaaagagagaaggggaccaagaggaacgggatcgtggattgaagctcttccttagcgacgaggagctaaagaggctgcatgagttcgaggagcagtgcgtgcaggagcacttccgggagaaggaggatgagcagcagtcgtccagcgacgagcgcatccgggtcacttctgaaagagttgaaaatatgtcaatgaggttggaagaaatcaatgaaagagaaacttttatgaaaacttccctgcagactgttgaccttcgacttgctcagctagaagaattatctaacagaatggtgaatgctcttgaaaatcttgcgggaatcgacaggtctgacctgatccaggcacggtcccgggcttcttctgaatgtgaggcaacgtatcttctccggcaaagcagcatcaatagcgctgatggctacagcttgtatcgatatcattttaacggagaagagttattatttgaggatacatctctctccacgtcaccagggacaggagtcaggaaaaaaacctgttccttccgtataaaggaagagaaggacgtgaaaacgcacctagtcccagaatgtcagaacagtcttcacctttcactgggcacaagcacatcagcaaccccagatggcagtcaccttgcagtagatgacttaaagaacgctgaagagtcaaaattaggtccagatattgggatttcaaaggaagatgatgaaagacagacagactctaaaaaagaagaaactatttccccaagtttaaataaaacagatgtgatacatggacaggacaaatcagatgttcaaaacactcagctaacagtggaaacgacaaatatagaaggcactatttcctatcccctggaagaaaccaaaattacacgctatttccccgatgaaacgatcaatgcttgtaaaacaatgaagtccagaagcttcgtctattcccggggaagaaagctggtcggtggggttaaccaggatgtagagtacagttcaatcacggaccagcaattgacgacggaatggcaatgccaagttcaaaagatcacgcgctctcatagcacagatattccttacattgtgtcggaagctgcagtgcaagctgagcataaagagcagtttgcagatatgcaagatgaacaccatgtcgctgaagcaattcctcgaatccctcgcttgtccctaaccattactgacagaaatgggatggaaaacttactgtctgtgaagccagatcaaactttgggattcccatctctcaggtcaaaaagtttacatggacatcctaggaatgtgaaatccattcagggaaagttagacagatctggacatgccagtagtgtaagcagcttagtaattgtgtctggaatgacagcagaagaaaaaaaggttaagaaagagaaagcttccacagaaactgaatgctagtctgttttgtttctttaatttttttttttaacagtcagaaccactaatgggtgtcatcttggccatctaaacatcatcaatttctaaaaacattttccttaaaaaattttggaaattcagacttgatttacaatttaatgcactaaaagtagtattttgttagcatatgttagtaggcttagttttttcagttgcagtagtatcaaatgaaagtgatgatactgtaacgaagataaattggctaatcagtatacaagattatacaatctctttattactgagggccaccaaatagcctaggaagtgccctcgagcactgaagtcaccattaggtcacttaagaagtaagcaactagctgggcacagtggctcatgcctgtaatcctagcactttgggaggccaaggcagaaagatagcttgagtccaggagtttgagaccagcctgggcaacatagtgataccccatctcttaaaaaaaaaaaaaaaagtaagcaactgtgtaagaaagagaaactaaagagaaagcaaacatgaaaaaagggaggggtggaaagaagaaaaataaaattatgaggcacaataagtgggaaggagccacaaatatgtttttatggggtctttgttttctgttttaatgttttattttaaactacacaatgggaaaaaaagtacacaattatatcaaacatcatactctaataatttagggtgacctagagttttgttaatgtgcaaaaataaagtatccaatatgcatttt

SEQ ID NO: 192772 - DNA, 4454 bp, Homo sapiens
  Payload ID: 18053
  Gene Name: transient receptor potential cation channel, subfamily M, member 1
  ENST ID: ENST00000621076
  CDS Start-End: 1-690
tatatccgtgtatcctatgacaccaagccagactcactgctccatctcatggtgaaagattggcagctggaactccccaagctcttaatatctgtgcatggaggcctccagaactttgagatgcagcccaagctgaaacaagtctttgggaaaggcctgatcaaggctgctatgaccaccggggcctggatcttcaccgggggtgtcagcacaggtgttatcagccacgtaggggatgccttgaaagaccactcctccaagtccagaggccgggtttgtgctataggaattgctccatggggcatcgtggagaataaggaagacctggttggaaaggatgtaacaagagtgtaccagaccatgtccaaccctctaagtaagctctctgtgctcaacaactcccacacccacttcatcctggctgacaatggcaccctgggcaagtatggcgccgaggtgaagctgcgaaggctgctggaaaagcacatctccctgcagaagatcaacacaagactggggcagggcgtgcccctcgtgggtctcgtggtggaggggggccctaacgtggtgtccatcgtcttggaatacctgcaagaagagcctcccatccctgtggtgatttgtgatggcagcggacgtgcctcggacatcctgtcctttgcgcacaagtactgtgaagaaggcgggtaggatttctgacgcgcgaggaagggcggaataataaatgagtccctcagggagcagcttctagttaccattcagaaaacatttaattataataaggcacaatcacatcagctgtttgcaattataatggagtgcatgaagaagaaagaactcgtcactgtgttcagaatgggttctgagggccagcaggacatcgagatggcaattttaactgccctgctgaaaggaacaaacgtatctgctccagatcagctgagcttggcactggcttggaaccgcgtggacatagcacgaagccagatctttgtctttgggccccactggccgcccctgggaagcctggcacccccgacggacagcaaagccacagagaaggagaagaagccacccatggccaccaccaagggaggaagaggaaaagggaaaggcaagaagaaagggaaagtgaaagaggaagtggaggaagaaactgacccccggaagatagagctgctgaactgggtgaatgctttggagcaagcgatgctagatgctttagtcttagatcgtgtcgactttgtgaagctcctgattgaaaacggagtgaacatgcaacactttctgaccattccgaggctggaggagctttataacacaagactgggtccaccaaacacacttcatctgctggtgagggatgtgaaaaagagcaaccttccgcctgattaccacatcagcctcatagacatcgggctcgtgctggagtacctcatgggaggagcctaccgctgcaactacactcggaaaaactttcggaccctttacaacaacttgtttggaccaaagaggcctaaagctcttaaacttctgggaatggaagatgatgagcctccagctaaagggaagaaaaagaaaaagaagaaaaaggaggaagagatcgacattgatgtggacgaccctgccgtgagtcggttccagtatcccttccacgagctgatggtgtgggcagtgctgatgaaacgccagaaaatggcagtgttcctctggcagcgaggggaagagagcatggccaaggccctggtggcctgcaagctctacaaggccatggcccacgagtcctccgagagtgatctggtggatgacatctcccaggacttggataacaattccaaagacttcggccagcttgctttggagttattagaccagtcctataagcatgacgagcagatcgctatgaaactcctgacctacgagctgaaaaactggagcaactcgacctgcctcaaactggccgtggcagccaaacaccgggacttcattgctcacacctgcagccagatgctgctgaccgatatgtggatgggaagactgcggatgcggaagaaccccggcctgaaggttatcatggggattcttctaccccccaccatcttgtttttggaatttcgcacatatgatgatttctcgtatcaaacatccaaggaaaacgaggatggcaaagaaaaagaagaggaaaatacggatgcaaatgcagatgctggctcaagaaagggggatgaggagaacgagcacaaaaaacagagaagtattcccatcggaacaaagatctgtgaattctataacgcgcccattgtcaagttctggttttacacaatatcatacttgggctacctgctgctgtttaactacgtcatcctggtgcggatggatggctggccgtccctccaggagtggatcgtcatctcctacatcgtgagcctggcgttagagaagatacgagagatcctcatgtcagaaccaggcaaactcagccagaaaatcaaagtttggcttcaggagtactggaacatcacagatctcgtggccatttccacattcatgattggagcaattcttcgcctacagaaccagccctacatgggctatggccgggtgatctactgtgtggatatcatcttctggtacatccgtgtcctggacatctttggtgtcaacaagtatctggggccatacgtgatgatgattggaaagatgtctacgccatggaaattaatcctccttgtggtgagaacctatatgatgaggagggcaagcggcttcctccctgtatccccggcgcctggctcactccagcactcatggcgtgctatctactggtcgccaacatcctgctggtgaacctgctgattgctgtgttcaacaataccttctttgaagtaaaatcaatatccaaccaggtgtggaagttccagcgatatcagctgattatgacatttcatgacaggccagtcctgcccccaccgatgatcattttaagccacatctacatcatcattatgcgtctcagcggccgctgcaggaaaaagagagaaggggaccaagaggaacgggatcgtggattgaagctcttccttagcgacgaggagctaaagaggctgcatgagttcgaggagcagtgcgtgcaggagcacttccgggagaaggaggatgagcagcagtcgtccagcgacgagcgcatccgggtcacttctgaaagagttgaaaatatgtcaatgaggttggaagaaatcaatgaaagagaaacttttatgaaaacttccctgcagactgttgaccttcgacttgctcagctagaagaattatctaacagaatggtgaatgctcttgaaaatcttgcgggaatcgacaggtctgacctgatccaggcacggtcccgggcttcttctgaatgtgaggcaacgtatcttctccggcaaagcagcatcaatagcgctgatggctacagcttgtatcgatatcattttaacggagaagagttattatttgaggatacatctctctccacgtcaccagggacaggagtcaggaaaaaaacctgttccttccgtataaaggaagagaaggacgtgaaaacgcacctagtcccagaatgtcagaacagtcttcacctttcactgggcacaagcacatcagcaaccccagatggcagtcaccttgcagtagatgacttaaagaacgctgaagagtcaaaattaggtccagatattgggatttcaaaggaagatgatgaaagacagacagactctaaaaaagaagaaactatttccccaagtttaaataaaacagatgtgatacatggacaggacaaatcagatgttcaaaacactcagctaacagtggaaacgacaaatatagaaggcactatttcctatcccctggaagaaaccaaaattacacgctatttccccgatgaaacgatcaatgcttgtaaaacaatgaagtccagaagcttcgtctattcccggggaagaaagctggtcggtggggttaaccaggatgtagagtacagttcaatcacggaccagcaattgacgacggaatggcaatgccaagttcaaaagatcacgcgctctcatagcacagatattccttacattgtgtcggaagctgcagtgcaagctgagcataaagagcagtttgcagatatgcaagatgaacaccatgtcgctgaagcaattcctcgaatccctcgcttgtccctaaccattactgacagaaatgggatggaaaacttactgtctgtgaagccagatcaaactttgggattcccatctctcaggtcaaaaagtttacatggacatcctaggaatgtgaaatccattcagggaaagttagacagatctggacatgccagtagtgtaagcagcttagtaattgtgtctggaatgacagcagaagaaaaaaaggttaagaaagagaaagcttccacagaaactgaatgctag

SEQ ID NO: 192773 - DNA, 5573 bp, Homo sapiens
  Payload ID: 18053
  Gene Name: transient receptor potential cation channel, subfamily M, member 1
  ENST ID: ENST00000618210
  CDS Start-End: 1-4812
atcaagacatcaaaaaggtgttgctgtggccagttcaccaaccagcatatcccccctctgccaagtgcaacacccagcaaaaatgaagaggaaaacaaacaggtggagactcagcctgagaaatggtctgttgccaagcacacccagagctacccaacagattcctatggagttcttgaattccagggtggcggatattccaataaagccatgtatatccgtgtatcctatgacaccaagccagactcactgctccatctcatggtgaaagattggcagctggaactccccaagctcttaatatctgtgcatggaggcctccagaactttgagatgcagcccaagctgaaacaagtctttgggaaaggcctgatcaaggctgctatgaccaccggggcctggatcttcaccgggggtgtcagcacaggtgttatcagccacgtaggggatgccttgaaagaccactcctccaagtccagaggccgggtttgtgctataggaattgctccatggggcatcgtggagaataaggaagacctggttggaaaggatgtaacaagagtgtaccagaccatgtccaaccctctaagtaagctctctgtgctcaacaactcccacacccacttcatcctggctgacaatggcaccctgggcaagtatggcgccgaggtgaagctgcgaaggctgctggaaaagcacatctccctgcagaagatcaacacaagactggggcagggcgtgcccctcgtgggtctcgtggtggaggggggccctaacgtggtgtccatcgtcttggaatacctgcaagaagagcctcccatccctgtggtgatttgtgatggcagcggacgtgcctcggacatcctgtcctttgcgcacaagtactgtgaagaaggcggaataataaatgagtccctcagggagcagcttctagttaccattcagaaaacatttaattataataaggcacaatcacatcagctgtttgcaattataatggagtgcatgaagaagaaagaactcgtcactgtgttcagaatgggttctgagggccagcaggacatcgagatggcaattttaactgccctgctgaaaggaacaaacgtatctgctccagatcagctgagcttggcactggcttggaaccgcgtggacatagcacgaagccagatctttgtctttgggccccactggccgcccctgggaagcctggcacccccgacggacagcaaagccacagagaaggagaagaagccacccatggccaccaccaagggaggaagaggaaaagggaaaggcaagaagaaagggaaagtgaaagaggaagtggaggaagaaactgacccccggaagatagagctgctgaactgggtgaatgctttggagcaagcgatgctagatgctttagtcttagatcgtgtcgactttgtgaagctcctgattgaaaacggagtgaacatgcaacactttctgaccattccgaggctggaggagctttataacacaagactgggtccaccaaacacacttcatctgctggtgagggatgtgaaaaagagcaaccttccgcctgattaccacatcagcctcatagacatcgggctcgtgctggagtacctcatgggaggagcctaccgctgcaactacactcggaaaaactttcggaccctttacaacaacttgtttggaccaaagaggcctaaagctcttaaacttctgggaatggaagatgatgagcctccagctaaagggaagaaaaagaaaaagaagaaaaaggaggaagagatcgacattgatgtggacgaccctgccgtgagtcggttccagtatcccttccacgagctgatggtgtgggcagtgctgatgaaacgccagaaaatggcagtgttcctctggcagcgaggggaagagagcatggccaaggccctggtggcctgcaagctctacaaggccatggcccacgagtcctccgagagtgatctggtggatgacatctcccaggacttggataacaattccaaagacttcggccagcttgctttggagttattagaccagtcctataagcatgacgagcagatcgctatgaaactcctgacctacgagctgaaaaactggagcaactcgacctgcctcaaactggccgtggcagccaaacaccgggacttcattgctcacacctgcagccagatgctgctgaccgatatgtggatgggaagactgcggatgcggaagaaccccggcctgaaggttatcatggggattcttctaccccccaccatcttgtttttggaatttcgcacatatgatgatttctcgtatcaaacatccaaggaaaacgaggatggcaaagaaaaagaagaggaaaatacggatgcaaatgcagatgctggctcaagaaagggggatgaggagaacgagcacaaaaaacagagaagtattcccatcggaacaaagatctgtgaattctataacgcgcccattgtcaagttctggttttacacaatatcatacttgggctacctgctgctgtttaactacgtcatcctggtgcggatggatggctggccgtccctccaggagtggatcgtcatctcctacatcgtgagcctggcgttagagaagatacgagagatcctcatgtcagaaccaggcaaactcagccagaaaatcaaagtttggcttcaggagtactggaacatcacagatctcgtggccatttccacattcatgattggagcaattcttcgcctacagaaccagccctacatgggctatggccgggtgatctactgtgtggatatcatcttctggtacatccgtgtcctggacatctttggtgtcaacaagtatctggggccatacgtgatgatgattggaaagatgatgatcgacatgctgtactttgtggtcatcatgctggtcgtgctcatgagtttcggagtagcccgtcaagccattctgcatccagaggagaagccctcttggaaactggcccgaaacatcttctacatgccctactggatgatctatggagaggtgtttgcagaccagatagacctctacgccatggaaattaatcctccttgtggtgagaacctatatgatgaggagggcaagcggcttcctccctgtatccccggcgcctggctcactccagcactcatggcgtgctatctactggtcgccaacatcctgctggtgaacctgctgattgctgtgttcaacaataccttctttgaagtaaaatcaatatccaaccaggtgtggaagttccagcgatatcagctgattatgacatttcatgacaggccagtcctgcccccaccgatgatcattttaagccacatctacatcatcattatgcgtctcagcggccgctgcaggaaaaagagagaaggggaccaagaggaacgggatcgtggattgaagctcttccttagcgacgaggagctaaagaggctgcatgagttcgaggagcagtgcgtgcaggagcacttccgggagaaggaggatgagcagcagtcgtccagcgacgagcgcatccgggtcacttctgaaagagttgaaaatatgtcaatgaggttggaagaaatcaatgaaagagaaacttttatgaaaacttccctgcagactgttgaccttcgacttgctcagctagaagaattatctaacagaatggtgaatgctcttgaaaatcttgcgggaatcgacaggtctgacctgatccaggcacggtcccgggcttcttctgaatgtgaggcaacgtatcttctccggcaaagcagcatcaatagcgctgatggctacagcttgtatcgatatcattttaacggagaagagttattatttgaggatacatctctctccacgtcaccagggacaggagtcaggaaaaaaacctgttccttccgtataaaggaagagaaggacgtgaaaacgcacctagtcccagaatgtcagaacagtcttcacctttcactgggcacaagcacatcagcaaccccagatggcagtcaccttgcagtagatgacttaaagaacgctgaagagtcaaaattaggtccagatattgggatttcaaaggaagatgatgaaagacagacagactctaaaaaagaagaaactatttccccaagtttaaataaaacagatgtgatacatggacaggacaaatcagatgttcaaaacactcagctaacagtggaaacgacaaatatagaaggcactatttcctatcccctggaagaaaccaaaattacacgctatttccccgatgaaacgatcaatgcttgtaaaacaatgaagtccagaagcttcgtctattcccggggaagaaagctggtcggtggggttaaccaggatgtagagtacagttcaatcacggaccagcaattgacgacggaatggcaatgccaagttcaaaagatcacgcgctctcatagcacagatattccttacattgtgtcggaagctgcagtgcaagctgagcataaagagcagtttgcagatatgcaagatgaacaccatgtcgctgaagcaattcctcgaatccctcgcttgtccctaaccattactgacagaaatgggatggaaaacttactgtctgtgaagccagatcaaactttgggattcccatctctcaggtcaaaaagtttacatggacatcctaggaatgtgaaatccattcagggaaagttagacagatctggacatgccagtagtgtaagcagcttagtaattgtgtctggaatgacagcagaagaaaaaaaggttaagaaagagaaagcttccacagaaactgaatgctagtctgttttgtttctttaatttttttttttaacagtcagaaccactaatgggtgtcatcttggccatctaaacatcatcaatttctaaaaacattttccttaaaaaattttggaaattcagacttgatttacaatttaatgcactaaaagtagtattttgttagcatatgttagtaggcttagttttttcagttgcagtagtatcaaatgaaagtgatgatactgtaacgaagataaattggctaatcagtatacaagattatacaatctctttattactgagggccaccaaatagcctaggaagtgccctcgagcactgaagtcaccattaggtcacttaagaagtaagcaactagctgggcacagtggctcatgcctgtaatcctagcactttgggaggccaaggcagaaagatagcttgagtccaggagtttgagaccagcctgggcaacatagtgataccccatctcttaaaaaaaaaaaaaaaagtaagcaactgtgtaagaaagagaaactaaagagaaagcaaacatgaaaaaagggaggggtggaaagaagaaaaataaaattatgaggcacaataagtgggaaggagccacaaatatgtttttatggggtctttgttttctgttttaatgttttattttaaactacacaatgggaaaaaaagtacacaattatatcaaacatcatactctaataatttagggtgacctagagttttgttaatgtgcaaaaataaagtatccaatatgcatttt

SEQ ID NO: 192774 - DNA, 5627 bp, Homo sapiens
  Payload ID: 18054
  Gene Name: transient receptor potential cation channel, subfamily M, member 2
  Uniprot ID: O94759
  ENST ID: ENST00000300481
  CDS Start-End: 14-4363
tgggggtctcagaatggagccctcagccctgaggaaagctggctcggagcaggaggagggctttgaggggctgcccagaagggtcactgacctggggatggtctccaatctccggcgcagcaacagcagcctcttcaagagctggaggctacagtgccccttcggcaacaatgacaagcaagaaagcctcagttcgtggattcctgaaaacatcaagaagaaagaatgcgtgtattttgtggaaagttccaaactgtctgatgctgggaaggtggtgtgtcagtgtggctacacgcatgagcagcacttggaggaggctaccaagccccacaccttccagggcacacagtgggacccaaagaaacatgtccaggagatgccaaccgatgcctttggcgacatcgtcttcacgggcctgagccagaaggtgaaaaagtacgtccgagtctcccaggacacgccctccagcgtgatctaccacctcatgacccagcactgggggctggacgtccccaatctcttgatctcggtgaccgggggggccaagaacttcaacatgaagccgcggctgaagagcattttccgcagaggcctggtcaaggtggctcagaccacaggggcctggatcatcacaggggggtcccacaccggcgtcatgaagcaggtaggcgaggcggtgcgggacttcagcctgagcagcagctacaaggaaggcgagctcatcaccatcggagtcgccacctggggcactgtccaccgccgcgagggcctgatccatcccacgggcagcttccccgccgagtacatactggatgaggatggccaagggaacctgacctgcctagacagcaaccactctcacttcatcctcgtggacgacgggacccacggccagtacggggtggagattcctctgaggaccaggctggagaagttcatatcggagcagaccaaggaaagaggaggtgtggccatcaagatccccatcgtgtgcgtggtgctggagggcggcccgggcacgttgcacaccatcgacaacgccaccaccaacggcaccccctgtgtggttgtggagggctcgggccgcgtggccgacgtcattgcccaggtggccaacctgcctgtctcggacatcactatctccctgatccagcagaaactgagcgtgttcttccaggagatgtttgagaccttcacggaaagcaggattgtcgagtggaccaaaaagatccaagatatcgtccggaggcggcagctgctgactgtcttccgggaaggcaaggatggtcagcaggacgtggatgtggccatcttgcaggccttgctgaaagcctcacggagccaagaccactttggccacgagaactgggaccaccagctgaaactggcagtggcatggaatcgcgtggacattgcccgcagtgagatcttcatggatgagtggcagtggaagccttcagatctgcaccccacgatgacagctgcactcatctccaacaagcctgagtttgtgaagctcttcctggagaacggggtgcagctgaaggagtttgtcacctgggacaccttgctctacctgtacgagaacctggacccctcctgcctgttccacagcaagctgcagatgcaccacgtggcccaggtgctgcgggagctgctgggggacttcacgcagccgctttatccccggccccggcacaacgaccggctgcggctcctgctgcccgttccccacgtcaagctcaacgtgcagggagtgagcctccggtccctctacaagcgttcctcaggccatgtgaccttcaccatggaccccatccgtgaccttctcatttgggccattgtccagaaccgtcgggagctggcaggaatcatctgggctcagagccaggactgcatcgcagcggccttggcctgcagcaagatcctgaaggaactgtccaaggaggaggaggacacggacagctcggaggagatgctggcgctggcggaggagtatgagcacagagccatcggggtcttcaccgagtgctaccggaaggacgaagagagagcccagaaactgctcacccgcgtgtccgaggcctgggggaagaccacctgcctgcagctcgccctggaggccaaggacatgaagtttgtgtctcacgggggcatccaggccttcctgaccaaggtgtggtggggccagctctccgtggacaatgggctgtggcgtgtgaccctgtgcatgctggccttcccgctgctcctcaccggcctcatctccttcagggagaagaggctgcaggatgtgggcacccccgcggcccgcgcccgtgccttcttcaccgcacccgtggtggtcttccacctgaacatcctctcctacttcgccttcctctgcctgttcgcctacgtgctcatggtggacttccagcctgtgccctcctggtgcgagtgtgccatctacctctggctcttctccttggtgtgcgaggagatgcggcagctcttctatgaccctgacgagtgcgggctgatgaagaaggcagccttgtacttcagtgacttctggaataagctggacgtcggcgcaatcttgctcttcgtggcagggctgacctgcaggctcatcccggcgacgctgtaccccgggcgcgtcatcctctctctggacttcatcctgttctgcctccggctcatgcacatttttaccatcagtaagacgctggggcccaagatcatcattgtgaagcggatgatgaaggacgtcttcttcttcctcttcctgctggctgtgtgggtggtgtccttcggggtggccaagcaggccatcctcatccacaacgagcgccgggtggactggctgttccgaggggccgtctaccactcctacctcaccatcttcgggcagatcccgggctacatcgacggtgtgaacttcaacccggagcactgcagccccaatggcaccgacccctacaagcctaagtgccccgagagcgacgcgacgcagcagaggccggccttccctgagtggctgacggtcctcctactctgcctctacctgctcttcaccaacatcctgctgctcaacctcctcatcgccatgttcaactacaccttccagcaggtgcaggagcacacggaccagatttggaagttccagcgccatgacctgatcgaggagtaccacggccgccccgccgcgccgccccccttcatcctcctcagccacctgcagctcttcatcaagagggtggtcctgaagactccggccaagaggcacaagcagctcaagaacaagctggagaagaacgaggaggcggccctgctatcctgggagatctacctgaaggagaactacctccagaaccgacagttccagcaaaagcagcggcccgagcagaagatcgaggacatcagcaataaggttgacgccatggtggacctgctggacctggacccactgaagaggtcgggctccatggagcagaggttggcctccctggaggagcaggtggcccagacagcccaagccctgcactggatcgtgaggacgctgcgggccagcggcttcagctcggaggcggacgtccccactctggcctcccagaaggccgcggaggagccggatgctgagccgggaggcaggaagaagacggaggagccgggcgacagctaccacgtgaatgcccggcacctcctctaccccaactgccctgtcacgcgcttccccgtgcccaacgagaaggtgccctgggagacggagttcctgatctatgacccacccttttacacggcagagaggaaggacgcggccgccatggaccccatgggagagaaccccatgggccgcacaggactgcgtgggcgcgggagcctcagctgcttcggacccaaccacacgctgtaccccatggtcacgcggtggaggcggaacgaggatggagccatctgcaggaagagcataaagaagatgctggaagtgctggtggtgaagctccctctctccgagcactgggccctgcctgggggctcccgggagccaggggagatgctacctcggaagctgaagcggatcctccggcaggagcactggccgtcttttgaaaacttgctgaagtgcggcatggaggtgtacaaaggctacatggatgacccgaggaacacggacaatgcctggatcgagacggtggccgtcagcgtccacttccaggaccagaatgacgtggagctgaacaggctgaactctaacctgcacgcctgcgactcgggggcctccatccgatggcaggtggtggacaggcgcatcccactctatgcgaaccacaagaccctcctccagaaggcagccgctgagttcggggctcactactgactgtgccctcaggctgggcggctccagtccatagacgttccccccagaaaccagggcttctctctcctgagcctggccaggactcaggctgttcctgggccctgcacatgatggggtttggtggacccagtgcccctcacggctgccgcaagtctgctgcagatgacctcatgaactggaaggggtcaaggtgacccgggaggagagctcaagacagggcacaggctactcagagctgaggggcccctgggacccttggccatcaggcgaggggctgggcctgtgcagctgggcccttggccagagtccactcccttcctggctgtgtcaccccgagcagctcatccaccatggaggtcattggcctgaggcaagttccccggagagtcggggtcccctgtggccccctcaggcctatgtctgtgaggaaggggccctgccactctccccaagagggcctccatgtttcgaggtgcctcaacatggagccttgcctggcctgggctaggggcactgtctgaactcctgactgtcaggataaactccgtgggggtacaggagcccagacaaagcccaggcctgtcaagagacgcagagggcccctgccagggttggccccagggaccctgggacgaggctgcagaagctctccctccctactccctgggagccacgtgctggccatgtggccagggacggcatgagcaggaggcggggacgtgggggccttctggtttggtgtcaacagctcacaggagcgtgaaccatgagggccctcaggaggggaacgtggtaaaacccaagacattaaatctgccatctcaggcctggctggctcttctgtgctttccacaaataaagttcctgacacgtccagggccaggggctgtgtgacggctgcctgaagttctcctcgatcccccggtgagcttcctgcagcctgtggatgtcctgcagcccctcagccctacccccaagtttctcctctgacccatcagctccctgtcttcattttcctaaacctgggctccagcatcgtccccaagcccaccaggccaggatgcaggcatccacatgccctcctccttggcttcccctgcgtggtggtgccaatgtgccctggcacccctgcagaggctccggatggagcctggggctgcctggccactgagcactggccgaggtgatgcccacccttccctggacaggcctctgtcttccacctgacccaaagctctctagccacccccttgtccccaggtat

SEQ ID NO: 192775 - DNA, 5989 bp, Homo sapiens
  Payload ID: 18054
  Gene Name: transient receptor potential cation channel, subfamily M, member 2
  Uniprot ID: O94759
  ENST ID: ENST00000300482
  CDS Start-End: 214-4725
tgcaccgggcacgcggcgcacgctcgggcgagatgtggatggccccgcggggccagggcggcggtgctgcgcggggacgcgggtgacgccggggcgcgggcggctccgagcagcaaccaccccatgtgtctctagaaccccagtgtagcgagctggagagaggactgtcctgagggcagcaggcctggttgcagctggcgtgggggtctcagaatggagccctcagccctgaggaaagctggctcggagcaggaggagggctttgaggggctgcccagaagggtcactgacctggggatggtctccaatctccggcgcagcaacagcagcctcttcaagagctggaggctacagtgccccttcggcaacaatgacaagcaagaaagcctcagttcgtggattcctgaaaacatcaagaagaaagaatgcgtgtattttgtggaaagttccaaactgtctgatgctgggaaggtggtgtgtcagtgtggctacacgcatgagcagcacttggaggaggctaccaagccccacaccttccagggcacacagtgggacccaaagaaacatgtccaggagatgccaaccgatgcctttggcgacatcgtcttcacgggcctgagccagaaggtgaaaaagtacgtccgagtctcccaggacacgccctccagcgtgatctaccacctcatgacccagcactgggggctggacgtccccaatctcttgatctcggtgaccgggggggccaagaacttcaacatgaagccgcggctgaagagcattttccgcagaggcctggtcaaggtggctcagaccacaggggcctggatcatcacaggggggtcccacaccggcgtcatgaagcaggtaggcgaggcggtgcgggacttcagcctgagcagcagctacaaggaaggcgagctcatcaccatcggagtcgccacctggggcactgtccaccgccgcgagggcctgatccatcccacgggcagcttccccgccgagtacatactggatgaggatggccaagggaacctgacctgcctagacagcaaccactctcacttcatcctcgtggacgacgggacccacggccagtacggggtggagattcctctgaggaccaggctggagaagttcatatcggagcagaccaaggaaagaggaggtgtggccatcaagatccccatcgtgtgcgtggtgctggagggcggcccgggcacgttgcacaccatcgacaacgccaccaccaacggcaccccctgtgtggttgtggagggctcgggccgcgtggccgacgtcattgcccaggtggccaacctgcctgtctcggacatcactatctccctgatccagcagaaactgagcgtgttcttccaggagatgtttgagaccttcacggaaagcaggattgtcgagtggaccaaaaagatccaagatatcgtccggaggcggcagctgctgactgtcttccgggaaggcaaggatggtcagcaggacgtggatgtggccatcttgcaggccttgctgaaagcctcacggagccaagaccactttggccacgagaactgggaccaccagctgaaactggcagtggcatggaatcgcgtggacattgcccgcagtgagatcttcatggatgagtggcagtggaagccttcagatctgcaccccacgatgacagctgcactcatctccaacaagcctgagtttgtgaagctcttcctggagaacggggtgcagctgaaggagtttgtcacctgggacaccttgctctacctgtacgagaacctggacccctcctgcctgttccacagcaagctgcagaaggtgctggtggaggatcccgagcgcccggcttgcgcgcccgcggcgccccgcctgcagatgcaccacgtggcccaggtgctgcgggagctgctgggggacttcacgcagccgctttatccccggccccggcacaacgaccggctgcggctcctgctgcccgttccccacgtcaagctcaacgtgcagggagtgagcctccggtccctctacaagcgttcctcaggccatgtgaccttcaccatggaccccatccgtgaccttctcatttgggccattgtccagaaccgtcgggagctggcaggaatcatctgggctcagagccaggactgcatcgcagcggccttggcctgcagcaagatcctgaaggaactgtccaaggaggaggaggacacggacagctcggaggagatgctggcgctggcggaggagtatgagcacagagccatcggggtcttcaccgagtgctaccggaaggacgaagagagagcccagaaactgctcacccgcgtgtccgaggcctgggggaagaccacctgcctgcagctcgccctggaggccaaggacatgaagtttgtgtctcacgggggcatccaggccttcctgaccaaggtgtggtggggccagctctccgtggacaatgggctgtggcgtgtgaccctgtgcatgctggccttcccgctgctcctcaccggcctcatctccttcagggagaagaggctgcaggatgtgggcacccccgcggcccgcgcccgtgccttcttcaccgcacccgtggtggtcttccacctgaacatcctctcctacttcgccttcctctgcctgttcgcctacgtgctcatggtggacttccagcctgtgccctcctggtgcgagtgtgccatctacctctggctcttctccttggtgtgcgaggagatgcggcagctcttctatgaccctgacgagtgcgggctgatgaagaaggcagccttgtacttcagtgacttctggaataagctggacgtcggcgcaatcttgctcttcgtggcagggctgacctgcaggctcatcccggcgacgctgtaccccgggcgcgtcatcctctctctggacttcatcctgttctgcctccggctcatgcacatttttaccatcagtaagacgctggggcccaagatcatcattgtgaagcggatgatgaaggacgtcttcttcttcctcttcctgctggctgtgtgggtggtgtccttcggggtggccaagcaggccatcctcatccacaacgagcgccgggtggactggctgttccgaggggccgtctaccactcctacctcaccatcttcgggcagatcccgggctacatcgacggtgtgaacttcaacccggagcactgcagccccaatggcaccgacccctacaagcctaagtgccccgagagcgacgcgacgcagcagaggccggccttccctgagtggctgacggtcctcctactctgcctctacctgctcttcaccaacatcctgctgctcaacctcctcatcgccatgttcaactacaccttccagcaggtgcaggagcacacggaccagatttggaagttccagcgccatgacctgatcgaggagtaccacggccgccccgccgcgccgccccccttcatcctcctcagccacctgcagctcttcatcaagagggtggtcctgaagactccggccaagaggcacaagcagctcaagaacaagctggagaagaacgaggaggcggccctgctatcctgggagatctacctgaaggagaactacctccagaaccgacagttccagcaaaagcagcggcccgagcagaagatcgaggacatcagcaataaggttgacgccatggtggacctgctggacctggacccactgaagaggtcgggctccatggagcagaggttggcctccctggaggagcaggtggcccagacagcccaagccctgcactggatcgtgaggacgctgcgggccagcggcttcagctcggaggcggacgtccccactctggcctcccagaaggccgcggaggagccggatgctgagccgggaggcaggaagaagacggaggagccgggcgacagctaccacgtgaatgcccggcacctcctctaccccaactgccctgtcacgcgcttccccgtgcccaacgagaaggtgccctgggagacggagttcctgatctatgacccacccttttacacggcagagaggaaggacgcggccgccatggaccccatgggagacaccctggagccactgtccacgatccagtacaacgtggtggatggcctgagggaccgccggagcttccacgggccgtacacagtgcaggccgggttgcccctgaaccccatgggccgcacaggactgcgtgggcgcgggagcctcagctgcttcggacccaaccacacgctgtaccccatggtcacgcggtggaggcggaacgaggatggagccatctgcaggaagagcataaagaagatgctggaagtgctggtggtgaagctccctctctccgagcactgggccctgcctgggggctcccgggagccaggggagatgctacctcggaagctgaagcggatcctccggcaggagcactggccgtcttttgaaaacttgctgaagtgcggcatggaggtgtacaaaggctacatggatgacccgaggaacacggacaatgcctggatcgagacggtggccgtcagcgtccacttccaggaccagaatgacgtggagctgaacaggctgaactctaacctgcacgcctgcgactcgggggcctccatccgatggcaggtggtggacaggcgcatcccactctatgcgaaccacaagaccctcctccagaaggcagccgctgagttcggggctcactactgactgtgccctcaggctgggcggctccagtccatagacgttccccccagaaaccagggcttctctctcctgagcctggccaggactcaggctgttcctgggccctgcacatgatggggtttggtggacccagtgcccctcacggctgccgcaagtctgctgcagatgacctcatgaactggaaggggtcaaggtgacccgggaggagagctcaagacagggcacaggctactcagagctgaggggcccctgggacccttggccatcaggcgaggggctgggcctgtgcagctgggcccttggccagagtccactcccttcctggctgtgtcaccccgagcagctcatccaccatggaggtcattggcctgaggcaagttccccggagagtcggggtcccctgtggccccctcaggcctatgtctgtgaggaaggggccctgccactctccccaagagggcctccatgtttcgaggtgcctcaacatggagccttgcctggcctgggctaggggcactgtctgaactcctgactgtcaggataaactccgtgggggtacaggagcccagacaaagcccaggcctgtcaagagacgcagagggcccctgccagggttggccccagggaccctgggacgaggctgcagaagctctccctccctactccctgggagccacgtgctggccatgtggccagggacggcatgagcaggaggcggggacgtgggggccttctggtttggtgtcaacagctcacaggagcgtgaaccatgagggccctcaggaggggaacgtggtaaaacccaagacattaaatctgccatctcaggcctggctggctcttctgtgctttccacaaataaagttcctgacacgtccagggccaggggctgtgtgacggctgcctgaagttctcctcgatcccccggtgagcttcctgcagcctgtggatgtcctgcagcccctcagccctacccccaagtttctcctctgacccatcagctccctgtcttcattttcctaaacctgggctccagcatcgtccccaagcccaccaggccaggatgcaggcatccacatgccctcctccttggcttcccctgcgtggtggtgccaatgtgccctggcacccctgcagaggctccggatggagcctggggctgcctggccactgagcactggccgaggtgatgcccacccttccctggacaggcctctgtcttccacctgacccaaagctctctagccacccccttgtccccaggtat

SEQ ID NO: 192776 - DNA, 6221 bp, Homo sapiens
  Payload ID: 18054
  Gene Name: transient receptor potential cation channel, subfamily M, member 2
  Uniprot ID: O94759
  ENST ID: ENST00000397928
  CDS Start-End: 446-4957
tgtgcagaattgtacagttgcgaaaccatgtcgctggcagctggtgctggcggtggagacttccctgtgcggtgctcagtgcagctgcacccgtgggggagggagctctttctctggccctgcagtcacctgaggttgttaccattatgaacggccgctgggacccccgcatgtgcatgtactcccccagagtgtccgggggccccagccaagggacacagctcaggcagctgggaacatgtgcaggctgatgaagagaaccggatgagggcttcacatgaggaagcatgtggccaggtcctctcagaacatcagcctcatcttcctgtctctgatctatttcagcaaccaccccatgtgtctctagaaccccagtgtagcgagctggagagaggactgtcctgagggcagcaggcctggttgcagctggcgtgggggtctcagaatggagccctcagccctgaggaaagctggctcggagcaggaggagggctttgaggggctgcccagaagggtcactgacctggggatggtctccaatctccggcgcagcaacagcagcctcttcaagagctggaggctacagtgccccttcggcaacaatgacaagcaagaaagcctcagttcgtggattcctgaaaacatcaagaagaaagaatgcgtgtattttgtggaaagttccaaactgtctgatgctgggaaggtggtgtgtcagtgtggctacacgcatgagcagcacttggaggaggctaccaagccccacaccttccagggcacacagtgggacccaaagaaacatgtccaggagatgccaaccgatgcctttggcgacatcgtcttcacgggcctgagccagaaggtgaaaaagtacgtccgagtctcccaggacacgccctccagcgtgatctaccacctcatgacccagcactgggggctggacgtccccaatctcttgatctcggtgaccgggggggccaagaacttcaacatgaagccgcggctgaagagcattttccgcagaggcctggtcaaggtggctcagaccacaggggcctggatcatcacaggggggtcccacaccggcgtcatgaagcaggtaggcgaggcggtgcgggacttcagcctgagcagcagctacaaggaaggcgagctcatcaccatcggagtcgccacctggggcactgtccaccgccgcgagggcctgatccatcccacgggcagcttccccgccgagtacatactggatgaggatggccaagggaacctgacctgcctagacagcaaccactctcacttcatcctcgtggacgacgggacccacggccagtacggggtggagattcctctgaggaccaggctggagaagttcatatcggagcagaccaaggaaagaggaggtgtggccatcaagatccccatcgtgtgcgtggtgctggagggcggcccgggcacgttgcacaccatcgacaacgccaccaccaacggcaccccctgtgtggttgtggagggctcgggccgcgtggccgacgtcattgcccaggtggccaacctgcctgtctcggacatcactatctccctgatccagcagaaactgagcgtgttcttccaggagatgtttgagaccttcacggaaagcaggattgtcgagtggaccaaaaagatccaagatatcgtccggaggcggcagctgctgactgtcttccgggaaggcaaggatggtcagcaggacgtggatgtggccatcttgcaggccttgctgaaagcctcacggagccaagaccactttggccacgagaactgggaccaccagctgaaactggcagtggcatggaatcgcgtggacattgcccgcagtgagatcttcatggatgagtggcagtggaagccttcagatctgcaccccacgatgacagctgcactcatctccaacaagcctgagtttgtgaagctcttcctggagaacggggtgcagctgaaggagtttgtcacctgggacaccttgctctacctgtacgagaacctggacccctcctgcctgttccacagcaagctgcagaaggtgctggtggaggatcccgagcgcccggcttgcgcgcccgcggcgccccgcctgcagatgcaccacgtggcccaggtgctgcgggagctgctgggggacttcacgcagccgctttatccccggccccggcacaacgaccggctgcggctcctgctgcccgttccccacgtcaagctcaacgtgcagggagtgagcctccggtccctctacaagcgttcctcaggccatgtgaccttcaccatggaccccatccgtgaccttctcatttgggccattgtccagaaccgtcgggagctggcaggaatcatctgggctcagagccaggactgcatcgcagcggccttggcctgcagcaagatcctgaaggaactgtccaaggaggaggaggacacggacagctcggaggagatgctggcgctggcggaggagtatgagcacagagccatcggggtcttcaccgagtgctaccggaaggacgaagagagagcccagaaactgctcacccgcgtgtccgaggcctgggggaagaccacctgcctgcagctcgccctggaggccaaggacatgaagtttgtgtctcacgggggcatccaggccttcctgaccaaggtgtggtggggccagctctccgtggacaatgggctgtggcgtgtgaccctgtgcatgctggccttcccgctgctcctcaccggcctcatctccttcagggagaagaggctgcaggatgtgggcacccccgcggcccgcgcccgtgccttcttcaccgcacccgtggtggtcttccacctgaacatcctctcctacttcgccttcctctgcctgttcgcctacgtgctcatggtggacttccagcctgtgccctcctggtgcgagtgtgccatctacctctggctcttctccttggtgtgcgaggagatgcggcagctcttctatgaccctgacgagtgcgggctgatgaagaaggcagccttgtacttcagtgacttctggaataagctggacgtcggcgcaatcttgctcttcgtggcagggctgacctgcaggctcatcccggcgacgctgtaccccgggcgcgtcatcctctctctggacttcatcctgttctgcctccggctcatgcacatttttaccatcagtaagacgctggggcccaagatcatcattgtgaagcggatgatgaaggacgtcttcttcttcctcttcctgctggctgtgtgggtggtgtccttcggggtggccaagcaggccatcctcatccacaacgagcgccgggtggactggctgttccgaggggccgtctaccactcctacctcaccatcttcgggcagatcccgggctacatcgacggtgtgaacttcaacccggagcactgcagccccaatggcaccgacccctacaagcctaagtgccccgagagcgacgcgacgcagcagaggccggccttccctgagtggctgacggtcctcctactctgcctctacctgctcttcaccaacatcctgctgctcaacctcctcatcgccatgttcaactacaccttccagcaggtgcaggagcacacggaccagatttggaagttccagcgccatgacctgatcgaggagtaccacggccgccccgccgcgccgccccccttcatcctcctcagccacctgcagctcttcatcaagagggtggtcctgaagactccggccaagaggcacaagcagctcaagaacaagctggagaagaacgaggaggcggccctgctatcctgggagatctacctgaaggagaactacctccagaaccgacagttccagcaaaagcagcggcccgagcagaagatcgaggacatcagcaataaggttgacgccatggtggacctgctggacctggacccactgaagaggtcgggctccatggagcagaggttggcctccctggaggagcaggtggcccagacagcccaagccctgcactggatcgtgaggacgctgcgggccagcggcttcagctcggaggcggacgtccccactctggcctcccagaaggccgcggaggagccggatgctgagccgggaggcaggaagaagacggaggagccgggcgacagctaccacgtgaatgcccggcacctcctctaccccaactgccctgtcacgcgcttccccgtgcccaacgagaaggtgccctgggagacggagttcctgatctatgacccacccttttacacggcagagaggaaggacgcggccgccatggaccccatgggagacaccctggagccactgtccacgatccagtacaacgtggtggatggcctgagggaccgccggagcttccacgggccgtacacagtgcaggccgggttgcccctgaaccccatgggccgcacaggactgcgtgggcgcgggagcctcagctgcttcggacccaaccacacgctgtaccccatggtcacgcggtggaggcggaacgaggatggagccatctgcaggaagagcataaagaagatgctggaagtgctggtggtgaagctccctctctccgagcactgggccctgcctgggggctcccgggagccaggggagatgctacctcggaagctgaagcggatcctccggcaggagcactggccgtcttttgaaaacttgctgaagtgcggcatggaggtgtacaaaggctacatggatgacccgaggaacacggacaatgcctggatcgagacggtggccgtcagcgtccacttccaggaccagaatgacgtggagctgaacaggctgaactctaacctgcacgcctgcgactcgggggcctccatccgatggcaggtggtggacaggcgcatcccactctatgcgaaccacaagaccctcctccagaaggcagccgctgagttcggggctcactactgactgtgccctcaggctgggcggctccagtccatagacgttccccccagaaaccagggcttctctctcctgagcctggccaggactcaggctgttcctgggccctgcacatgatggggtttggtggacccagtgcccctcacggctgccgcaagtctgctgcagatgacctcatgaactggaaggggtcaaggtgacccgggaggagagctcaagacagggcacaggctactcagagctgaggggcccctgggacccttggccatcaggcgaggggctgggcctgtgcagctgggcccttggccagagtccactcccttcctggctgtgtcaccccgagcagctcatccaccatggaggtcattggcctgaggcaagttccccggagagtcggggtcccctgtggccccctcaggcctatgtctgtgaggaaggggccctgccactctccccaagagggcctccatgtttcgaggtgcctcaacatggagccttgcctggcctgggctaggggcactgtctgaactcctgactgtcaggataaactccgtgggggtacaggagcccagacaaagcccaggcctgtcaagagacgcagagggcccctgccagggttggccccagggaccctgggacgaggctgcagaagctctccctccctactccctgggagccacgtgctggccatgtggccagggacggcatgagcaggaggcggggacgtgggggccttctggtttggtgtcaacagctcacaggagcgtgaaccatgagggccctcaggaggggaacgtggtaaaacccaagacattaaatctgccatctcaggcctggctggctcttctgtgctttccacaaataaagttcctgacacgtccagggccaggggctgtgtgacggctgcctgaagttctcctcgatcccccggtgagcttcctgcagcctgtggatgtcctgcagcccctcagccctacccccaagtttctcctctgacccatcagctccctgtcttcattttcctaaacctgggctccagcatcgtccccaagcccaccaggccaggatgcaggcatccacatgccctcctccttggcttcccctgcgtggtggtgccaatgtgccctggcacccctgcagaggctccggatggagcctggggctgcctggccactgagcactggccgaggtgatgcccacccttccctggacaggcctctgtcttccacctgacccaaagctctctagccacccccttgtccccaggtat

SEQ ID NO: 192777 - DNA, 5216 bp, Homo sapiens
  Payload ID: 18054
  Gene Name: transient receptor potential cation channel, subfamily M, member 2
  ENST ID: ENST00000397932
  CDS Start-End: 14-4675
tgggggtctcagaatggagccctcagccctgaggaaagctggctcggagcaggaggagggctttgaggggctgcccagaagggtcactgacctggggatggtctccaatctccggcgcagcaacagcagcctcttcaagagctggaggctacagtgccccttcggcaacaatgacaagcaagaaagcctcagttcgtggattcctgaaaacatcaagaagaaagaatgcgtgtattttgtggaaagttccaaactgtctgatgctgggaaggtggtgtgtcagtgtggctacacgcatgagcagcacttggaggaggctaccaagccccacaccttccagggcacacagtgggacccaaagaaacatgtccaggagatgccaaccgatgcctttggcgacatcgtcttcacgggcctgagccagaaggtgaaaaagtacgtccgagtctcccaggacacgccctccagcgtgatctaccacctcatgacccagcactgggggctggacgtccccaatctcttgatctcggtgaccgggggggccaagaacttcaacatgaagccgcggctgaagagcattttccgcagaggcctggtcaaggtggctcagaccacaggggcctggatcatcacaggggggtcccacaccggcgtcatgaagcaggtaggcgaggcggtgcgggacttcagcctgagcagcagctacaaggaaggcgagctcatcaccatcggagtcgccacctggggcactgtccaccgccgcgagggcctgatccatcccacgggcagcttccccgccgagtacatactggatgaggatggccaagggaacctgacctgcctagacagcaaccactctcacttcatcctcgtggacgacgggacccacggccagtacggggtggagattcctctgaggaccaggctggagaagttcatatcggagcagaccaaggaaagaggaggtgtggccatcaagatccccatcgtgtgcgtggtgctggagggcggcccgggcacgttgcacaccatcgacaacgccaccaccaacggcaccccctgtgtggttgtggagggctcgggccgcgtggccgacgtcattgcccaggtggccaacctgcctgtctcggacatcactatctccctgatccagcagaaactgagcgtgttcttccaggagatgtttgagaccttcacggaaagcaggattgtcgagtggaccaaaaagatccaagatatcgtccggaggcggcagctgctgactgtcttccgggaaggcaaggatggtcagcaggacgtggatgtggccatcttgcaggccttgctgaaagcctcacggagccaagaccactttggccacgagaactgggaccaccagctgaaactggcagtggcatggaatcgcgtggacattgcccgcagtgagatcttcatggatgagtggcagtggaagccttcagatctgcaccccacgatgacagctgcactcatctccaacaagcctgagtttgtgaagctcttcctggagaacggggtgcagctgaaggagtttgtcacctgggacaccttgctctacctgtacgagaacctggacccctcctgcctgttccacagcaagctgcagaaggtgctggtggaggatcccgagcgcccggcttgcgcgcccgcggcgccccgcctgcagatgcaccacgtggcccaggtgctgcgggagctgctgggggacttcacgcagccgctttatccccggccccggcacaacgaccggctgcggctcctgctgcccgttccccacgtcaagctcaacgtgcagggagtgagcctccggtccctctacaagcgttcctcaggccatgtgaccttcaccatggaccccatccgtgaccttctcatttgggccattgtccagaaccgtcgggagctggcaggaatcatctgggctcagagccaggactgcatcgcagcggccttggcctgcagcaagatcctgaaggaactgtccaaggaggaggaggacacggacagctcggaggagatgctggcgctggcggaggagtatgagcacagagccatcggggtcttcaccgagtgctaccggaaggacgaagagagagcccagaaactgctcacccgcgtgtccgaggcctgggggaagaccacctgcctgcagctcgccctggaggccaaggacatgaagtttgtgtctcacgggggcatccaggccttcctgaccaaggtgtggtggggccagctctccgtggacaatgggctgtggcgtgtgaccctgtgcatgctggccttcccgctgctcctcaccggcctcatctccttcagggagaagaggctgcaggatgtgggcacccccgcggcccgcgcccgtgccttcttcaccgcacccgtggtggtcttccacctgaacatcctctcctacttcgccttcctctgcctgttcgcctacgtgctcatggtggacttccagcctgtgccctcctggtgcgagtgtgccatctacctctggctcttctccttggtgtgcgaggagatgcggcagctcttctatgaccctgacgagtgcgggctgatgaagaaggcagccttgtacttcagtgacttctggaataagctggacgtcggcgcaatcttgctcttcgtggcagggctgacctgcaggctcatcccggcgacgctgtaccccgggcgcgtcatcctctctctggacttcatcctgttctgcctccggctcatgcacatttttaccatcagtaagacgctggggcccaagatcatcattgtgaagcggatgatgaaggacgtcttcttcttcctcttcctgctggctgtgtgggtggtgtccttcggggtggccaagcaggccatcctcatccacaacgagcgccgggtggactggctgttccgaggggccgtctaccactcctacctcaccatcttcgggcagatcccgggctacatcgacggtgtgaacttcaacccggagcactgcagccccaatggcaccgacccctacaagcctaagtgccccgagagcgacgcgacgcagcagaggccggccttccctgagtggctgacggtcctcctactctgcctctacctgctcttcaccaacatcctgctgctcaacctcctcatcgccatgttcaactacaccttccagcaggtgcaggagcacacggaccagatttggaagttccagcgccatgacctgatcgaggagtaccacggccgccccgccgcgccgccccccttcatcctcctcagccacctgcagctcttcatcaagagggtggtcctgaagactccggccaagaggcacaagcagctcaagaacaagctggagaagaacgaggaggcggccctgctatcctgggagatctacctgaaggagaactacctccagaaccgacagttccagcaaaagcagcggcccgagcagaagatcgaggacatcagcaataaggcagggctggagctttgggggtcaaggacaagctctgtctgcaaatctagacagttcctgcatctcacggtggtggaatcacgcgggtccgagaaggctccagtaaccaccctcgcatgtttgcaaggctgtctgggaaaacatggcagggttgacgccatggtggacctgctggacctggacccactgaagaggtcgggctccatggagcagaggttggcctccctggaggagcaggtggcccagacagcccaagccctgcactggatcgtgaggacgctgcgggccagcggcttcagctcggaggcggacgtccccactctggcctcccagaaggccgcggaggagccggatgctgagccgggaggcaggaagaagacggaggagccgggcgacagctaccacgtgaatgcccggcacctcctctaccccaactgccctgtcacgcgcttccccgtgcccaacgagaaggtgccctgggagacggagttcctgatctatgacccacccttttacacggcagagaggaaggacgcggccgccatggaccccatgggagacaccctggagccactgtccacgatccagtacaacgtggtggatggcctgagggaccgccggagcttccacgggccgtacacagtgcaggccgggttgcccctgaaccccatgggccgcacaggactgcgtgggcgcgggagcctcagctgcttcggacccaaccacacgctgtaccccatggtcacgcggtggaggcggaacgaggatggagccatctgcaggaagagcataaagaagatgctggaagtgctggtggtgaagctccctctctccgagcactgggccctgcctgggggctcccgggagccaggggagatgctacctcggaagctgaagcggatcctccggcaggagcactggccgtcttttgaaaacttgctgaagtgcggcatggaggtgtacaaaggctacatggatgacccgaggaacacggacaatgcctggatcgagacggtggccgtcagcgtccacttccaggaccagaatgacgtggagctgaacaggctgaactctaacctgcacgcctgcgactcgggggcctccatccgatggcaggtggtggacaggcgcatcccactctatgcgaaccacaagaccctcctccagaaggcagccgctgagttcggggctcactactgactgtgccctcaggctgggcggctccagtccatagacgttccccccagaaaccagggcttctctctcctgagcctggccaggactcaggctgttcctgggccctgcacatgatggggtttggtggacccagtgcccctcacggctgccgcaagtctgctgcagatgacctcatgaactggaaggggtcaaggtgacccgggaggagagctcaagacagggcacaggctactcagagctgaggggcccctgggacccttggccatcaggcgaggggctgggcctgtgcagctgggcccttggccagagtccactcccttcctggctgtgtcaccccgagcagctcatccaccatggaggtcattggcctgaggcaagttccccggagagtcggggtcccctgtggccccctcaggcctatgtctgtgaggaaggggccctgccactctccccaagagggcctccatgtttcgaggtgcctcaacatggagccttgcctggcctgggctaggggcactgtctgaactcctgactgtcaggataa

SEQ ID NO: 192778 - DNA, 582 bp, Homo sapiens
  Payload ID: 18054
  Gene Name: transient receptor potential cation channel, subfamily M, member 2
  ENST ID: ENST00000431901
  CDS Start-End: 152-582
gcgcgagcccgggtgcggggactgaggcggccgtcccgggagcttgtgaagcaaccaccccatgtgtctctagaaccccagtgtagcgagctggagagaggactgtcctgagggcagcaggcctggttgcagctggcgtgggggtctcagaatggagccctcagccctgaggaaagctggctcggagcaggaggagggctttgaggggctgcccagaagggtcactgacctggggatggtctccaatctccggcgcagcaacagcagcctcttcaagagctggaggctacagtgccccttcggcaacaatgacaagcaagaaagcctcagttcgtggattcctgaaaacatcaagaagaaagaatgcgtgtattttgtggaaagttccaaactgtctgatgctgggaaggtggtgtgtcagtgtggctacacgcatgagcagcacttggaggaggctaccaagccccacaccttccagggcacacagtgggacccaaagaaacatgtccaggagatgccaaccgatgcctttggcgacatcgtcttcacgggcctgagccagaaggtgaaaaagtacgtccg

SEQ ID NO: 192779 - DNA, 1669 bp, Homo sapiens
  Payload ID: 18054
  Gene Name: transient receptor potential cation channel, subfamily M, member 2
  ENST ID: ENST00000621064
  CDS Start-End: 99-842
agccctgcactggatcgtgaggacgctgcgggccagcggcttcagctcggaggcggacgtccccactctggcctcccagaaggccgcggaggagccggatgctgagccgggagcaggaagaagacggaggagccgggcgacagtaccacgtgaatgcccggcacctcctctaccccaactgccctgtcacgcgcttccccgtgcccaacgagaaggtgccctgggagacggagttcctgatctatgacccacccttttacacggcagagaggaaggacgcggccgccatggaccccatgggagagaaccccatgggccgcacaggactgcgtgggcgcgggagcctcagctgcttcggacccaaccacacgctgtaccccatggtcacgcggtggaggcggaacgaggatggagccatctgcaggaagagcataaagaagatgctggaagtgctggtggtgaagctccctctctccgagcactgggccctgcctgggggctcccgggagccaggggagatgctacctcggaagctgaagcggatcctccggcaggagcactggccgtcttttgaaaacttgctgaagtgcggcatggaggtgtacaaaggctacatggatgacccgaggaacacggacaatgcctggatcgagacggtggccgtcagcgtccacttccaggaccagaatgacgtggagctgaacaggctgaactctaacctgcacgcctgcgactcgggggcctccatccgatggcaggtggtggacaggcgcatcccactctatgcgaaccacaagaccctcctccagaaggcagccgctgagttcggggctcactactgactgtgccctcaggctgggcggctccagtccatagacgttccccccagaaaccagggcttctctctcctgagcctggccaggactcaggctgttcctgggccctgcacatgatggggtttggtggacccagtgcccctcacggctgccgcaagtctgctgcagatgacctcatgaactggaaggggtcaaggtgacccgggaggagagctcaagacagggcacaggctactcagagctgaggggcccctgggacccttggccatcaggcgaggggctgggcctgtgcagctgggcccttggccagagtccactcccttcctggctgtgtcaccccgagcagctcatccaccatggaggtcattggcctgaggcaagttccccggagagtcggggtcccctgtggccccctcaggcctatgtctgtgaggaaggggccctgccactctccccaagagggcctccatgtttcgaggtgcctcaacatggagccttgcctggcctgggctaggggcactgtctgaactcctgactgtcaggataaactccgtgggggtacaggagcccagacaaagcccaggcctgtcaagagacgcagagggcccctgccagggttggccccagggaccctgggacgaggctgcagaagctctccctccctactccctgggagccacgtgctggccatgtggccagggacggcatgagcaggaggcggggacgtgggggccttctggtttggtgtcaacagctcacaggagcgtgaaccatgagggccctcaggaggggaacgtggtaaaacccaagacattaaatctgccatctcaggc
